(19) United States
(12) Patent Application Publication
(10) Pub. No.: US 2007/0026409 A1
(43) Pub. Date: Feb. 1, 2007

(54) Nucleic acid and amino acid sequences involved in pain

(75) Inventors: Clifford Woolf, Newton, MA (US); Donatella D'Urso, Duesseldorf (DE); Katia Befort, Strasbourg (FR); Michael Costigan, Somerville, MA (US)

Correspondence Address: PALMER & DODGE, LLP;KATHLEEN M. WILLIAMS, 111 HUNTINGTON AVENUE, BOSTON, MA, 02199, US

(73) Assignee: The General Hospital Corporation

(21) Appl. No.: 10/743,643

(22) Filed: Dec. 22, 2003

Related U.S. Application Data
(63) Continuation-in-part of application No. 10/219,051, filed on Aug. 14, 2002.
(60) Provisional application No. 60/312,147, filed on Aug. 14, 2001.
(60) Provisional application No. 60/346,382, filed on Nov. 1, 2001.
(60) Provisional application No. 60/333,347, filed on Nov. 26, 2001.

(51) Int. Cl. C12Q 1/68; C07H 21/04; C07K 14/705; C12N 5/08

(52) U.S. Cl. 435/6; 435/69.1; 435/320.1; 435/368; 530/350; 536/23.5

(57) ABSTRACT

The present invention relates to nucleic acid sequences which are related to pain and which are differentially expressed during pain. The invention further relates to methods of identifying nucleic acid sequences which are differentially expressed during pain, microarrays comprising such differentially expressed sequences and methods of screening agents for the ability to regulate the expression of such differentially expressed sequences.

### PRIORITY

[0001] This application is a Continuation-in-Part of U.S. application Ser. No. 10/219,051, filed Aug. 14, 2002, which claims the benefit of U.S. Provisional Application No. 60/312,147, filed Aug. 14, 2001; U.S. Provisional Application No. 60/346,382, filed Nov. 1, 2001; and U.S. Provisional Application No. 60/333,347, filed Nov. 26, 2001. The entire teachings of the above applications are incorporated herein by reference.

### Sequence Listing

[0002] The present application includes a Sequence Listing submitted herewith on three identical CD-ROM disks pursuant to 37 C.F.R. §1.53(e). The information on each CD-ROM is identical. Submitted are the Computer Readable Copy (disk 1) of the sequence listing, and Copy 1 (disk 2) and Copy 2 (disk 3). The following information is identical for each CD-ROM submitted: Machine Format: IBM-PC; Operating System: MS-Windows; Files Contained: Formal_sequence_listing2ndappl.txt; Size: 7.56 MB; Date of Creation: Dec. 19, 2003. The information on each CD-ROM is incorporated herein by reference in its entirety.

### BACKGROUND OF THE INVENTION

[0003] Pain is a state-dependent sensory experience which can be represented by a constellation of distinct types of pain including chronic pain, neuropathic pain, inflammatory pain, and physiological pain. Current therapy is, however, either relatively ineffective or accompanies by substantial side effects (Sindrup and Jensen, 1999 Pain 83: 389). All of the primary forms of pain therapy have been discovered wither empirically through folk medicine, or serendipitously. These forms of treatment include opiates, non-steroidal anti-inflammatory drugs (NSAIDS), local anesthetics, anticonvulsants, and tricyclic antidepressants (TCAs).

[0004] Recently there has been a great deal of progress in understanding the mechanisms that produce pain (McCleskey and Gold, 1999, Annu. Rev. Physiol. 61: 835; Woolf and Salter, 2000, Science 288: 1765; Mogil et al., 2000, Annu. Rev. Neurosci. 23: 777). It is increasingly clear that multiple mechanisms operating at different sites, and with different temporal profiles, are involved. In consequence, there is a need in the art for a shift in pain management from treatment essentially by trial and error to a strategy that attempts to identify and treat the mechanisms present in a given patient (Woolf and Mannion, 1999, Lancet 353: 1959; Woolf and Decosterd, 1999, Pain 82: 1). Accordingly, there is a need in the art for techniques which enable the identification of the genes responsible for these mechanisms.

[0005] The present invention, in an effort to meet such a need, provides a plurality of genes which are differentially expressed in animals which have been subjected to pain. The present invention provides advantages over existing measurements of differential expression in that the invention provides lower thresholds of differential expression. The present invention thus encompasses a much larger number of genes which show differential expression, and therefore provides a much improved method for identifying a larger number of genes whose expression may be directly related to the mechanisms which underlie pain.

### SUMMARY OF THE INVENTION

[0006] The present invention provides a composition comprising two or more isolated polynucleotides, wherein each of said two or more isolated polynucleotides is selected from the polynucleotides of Table 11.

The present invention also provides a composition comprising two or more isolated polynucleotides, wherein each of said two or more isolated polynucleotides is selected from the polynucleotides of Table 10.

[0007] The invention also provides a composition comprising two or more isolated polynucleotides, wherein each of said two or more isolated polynucleotides is selected from the group consisting of: (a) a polynucleotide comprising any of the polynucleotides specified in Table 11 in the columns designated “rat gene” and “human gene”; (b) a polynucleotide encoding an amino acid sequence selected from the group consisting of: amino acid sequences which are homologous to any of the amino acid sequences specified in Table 11 in the columns designated “rat protein” and “human protein” by at least the homology as specified for the respective sequence in Table 11 in the column designated “% homology” and which encodes a polypeptide exhibiting the biological function as specified for the respective sequence in Table 11 in the column designated “identifier”; (c) the amino acid specified in Table 11 in the columns designated “rat protein” and “human protein”; (d) a polynucleotide which hybridizes under high stringency conditions to a polynucleotide specified in (a) to (b) and encodes a polypeptide exhibiting the biological function as specified for the respective sequence in Table 11 in the column designated “identifier”; (e) a polynucleotide the nucleic acid sequence or which deviates from the nucleic acid sequences specified in (a) to (c) due to the degeneration of the genetic code and encodes a polypeptide exhibiting the biological function as specified for the respective sequence in Table 11 in the column designated “identifier”; and (f) a polynucleotide which represents a fragment, derivative or allelic variation of a nucleic acid sequence specified in (a) to (d) and encodes a polypeptide exhibiting the biological function as specified for the respective sequence in Table 11 in the column designated “identifier”.

[0008] The invention further provides polypeptide sequences, indicated by Accession no. in Table 11, which are encoded by the polynucleotide sequences shown in Table 11 which are differentially expressed by at least 1.2 fold across at least three replicate screens of neuronal tissue obtained from an animal subjected to pain relative to an animal not subjected to the same pain, with a P-value of less than 0.05.

[0009] The invention further provides polypeptide sequences, indicated by Accession no. in Table 11, which are encoded by the polynucleotide sequences shown in Table 11 which are differentially expressed by at least 1.4 fold across at least three replicate screens of neuronal tissue obtained from an animal subjected to pain relative to an animal not subjected to the same pain, with a P-value of less than 0.05.

[0010] The invention further provides human polypeptide sequences, indicated by Accession no. in Table 11, which are encoded by the human polynucleotide sequences shown in Table 11 which are differentially expressed by at least 1.2 fold across at least three replicate screens of neuronal tissue obtained from an animal subjected to pain relative to an animal not subjected to the same pain, with a P-value of less than 0.05.

[0011] The invention further provides polypeptide sequences, indicated by Accession no. in Table 11, which are encoded by the polynucleotide sequences shown in Table 11 which are differentially expressed by at least 1.4 fold in an animal subjected to pain relative to an animal not subjected to the same pain.

[0012] The invention further provides human polypeptide sequences, indicated by Accession no. in Table 11, which are encoded by the human polynucleotide sequences shown in Table 11 which are differentially expressed by at least 1.4 fold in an animal subjected to pain relative to an animal not subjected to the same pain.

[0013] The invention further provides human polynucleotide sequences, indicated by Accession no. in Table 11 which are differentially expressed by greater than 1.4 fold in an animal subjected to pain relative to an animal not subjected to pain and polypeptide sequences encoded thereby. Preferably, the animal is a human.

[0014] The invention further provides human polynucleotide sequences, indicated by Accession no. in Table 11, which are differentially expressed by at least 1.2 fold across at least three replicate screens of neuronal tissue obtained from an animal subjected to pain relative to an animal not subjected to the same pain, with a p-value of less than 0.05.

[0015] The invention further provides polypeptide sequences, indicated by Accession no. in Table 10, which are encoded by the polynucleotide sequences shown in Table 10 which are differentially expressed by at least 1.2 fold across at least three replicate screens of neuronal tissue obtained from an animal subjected to pain relative to an animal not subjected to the same pain, with a P-value of less than 0.05.

[0016] The invention further provides polypeptide sequences, indicated by Accession no. in Table 10, which are encoded by the polynucleotide sequences shown in Table 10 which are differentially expressed by at least 1.4 fold across at least three replicate screens of neuronal tissue obtained from an animal subjected to pain relative to an animal not subjected to the same pain, with a P-value of less than 0.05.

[0017] The invention further provides human polypeptide sequences, indicated by Accession no. in Table 10, which are encoded by the human polynucleotide sequences shown in Table 10 which are differentially expressed by at least 1.2 fold across at least three replicate screens of neuronal tissue obtained from an animal subjected to pain relative to an animal not subjected to the same pain, with a P-value of less than 0.05.

[0018] The invention further provides polypeptide sequences, indicated by Accession no. in Table 10, which are encoded by the polynucleotide sequences shown in Table 10 which are differentially expressed by at least 1.4 fold in an animal subjected to pain relative to an animal not subjected to the same pain.

[0019] The invention further provides human polypeptide sequences, indicated by Accession no. in Table 10, which are encoded by the human polynucleotide sequences shown in Table 10 which are differentially expressed by at least 1.4 fold in an animal subjected to pain relative to an animal not subjected to the same pain.

[0020] The invention further provides human polynucleotide sequences, indicated by Accession no. in Table 10 which are differentially expressed by greater than 1.4 fold in an animal subjected to pain relative to an animal not subjected to pain and polypeptide sequences encoded thereby. Preferably, the animal is a human.

[0021] The invention further provides human polynucleotide sequences, indicated by Accession no. in Table 10, which are differentially expressed by at least 1.2 fold across at least three replicate screens of neuronal tissue obtained from an animal subjected to pain relative to an animal not subjected to the same pain, with a p-value of less than 0.05.

[0022] The present invention provides a composition comprising polynucleotides which are differentially expressed by at least +/−1.2 fold in at least three replicate assays of nerve tissue obtained from a nerve injury or inflammation pain model, with a p-value of less than 0.05, wherein each of the polynucleotides is selected from the polynucleotides listed in Tables 10, and preferably selected from the polynucleotides listed in Table 11.

[0023] In one embodiment, each of the two or more isolated polynucleotides is differentially expressed by at least 1.4 fold in the nerve tissue of an animal subjected to pain relative to the animal not subjected to the pain, and alternatively, are differentially expressed by at least 1.4 fold across three replicate assays of expression in nerve tissue obtained from a nerve injury pain model with a p-value of less than 0.05.

[0024] In an alternate embodiment, each of the two or more isolated polynucleotides is differentially expressed by at least 2 fold in the neurons of an animal subjected to pain relative to the animal not subjected to the pain.

[0025] In one embodiment, the nerve tissue is the sensory neurons of the dorsal root ganglion, or dorsal horn of the spinal cord.

[0026] The present invention provides a composition comprising two or more isolated polynucleotides, wherein each of said two or more isolated polynucleotides is selected from the polynucleotides of Tables 1 or 2 or a sequence which hybridizes under high stringency conditions thereto, and wherein at least one of said two or more isolated polynucleotides is unique to Table 2, or a sequence which hybridizes under high stringency conditions thereto.

[0027] The invention also provides a composition comprising two or more isolated polynucleotides, wherein each of said two or more isolated polynucleotides is selected from the group consisting of: a polynucleotide comprising any of the polynucleotides specified in Table 1 or 2 in the columns designated “rat gene” and “human gene”, and wherein at least one of said two or more isolated polynucleotides is unique to Table 2 in the columns designated “rat gene” and “human gene”; a polynucleotide encoding an amino acid sequence selected from the group consisting of: amino acid sequences which are homologue to any of the amino acid specified in Table 2 in the columns designated “rat protein” and “human protein” by at least the homology as specified for the respective sequence in Table 2 in the column designated “% homology” and encodes a polypeptide exhibiting the biological function as specified for the respective sequence in Table 2 in the column designated “identifier”; and the amino acid specified in Table 2 in the columns designated “rat protein” and “human protein”; a polynucleotide which hybridizes under high stringency conditions to a polynucleotide specified in (a) to (b) and encodes a polypeptide exhibiting the biological function as specified for the respective sequence in Table 2 in the column designated “identifier”; a polynucleotide the nucleic acid sequence or which deviates from the nucleic acid sequences specified in (a) to (c) due to the degeneration of the genetic code and encodes a polypeptide exhibiting the biological function as specified for the respective sequence in Table 2 in the column designated “identifier”; and a polynucleotide which represents a fragment, derivative or allelic variation of a nucleic acid sequence specified in (a) to (d) and encodes a polypeptide exhibiting the biological function as specified for the respective sequence in Table 2 in the column designated “identifier”.

[0028] The invention further provides polypeptide sequences, indicated by Accession no. in Table 2, which are encoded by the polynucleotide sequences shown in Tables 2 which are differentially expressed by at least 1.2 fold across at least three replicate screens of neuronal tissue obtained from an animal subjected to pain relative to an animal not subjected to the same pain, with a P-value of less than 0.05.

[0029] The invention further provides human polypeptide sequences, indicated by Accession no. in Table 2, which are encoded by the human polynucleotide sequences shown in Tables 2 which are differentially expressed by at least 1.2 fold across at least three replicate screens of neuronal tissue obtained from an animal subjected to pain relative to an animal not subjected to the same pain, with a P-value of less than 0.05.

[0030] The invention further provides polypeptide sequences, indicated by Accession no. in Tables 2 or 3, which are encoded by the polynucleotide sequences shown in Tables 2 or 3 which are differentially expressed by at least 1.4 fold in an animal subjected to pain relative to an animal not subjected to the same pain.

[0031] The invention further provides human polypeptide sequences, indicated by Accession no. in Tables 2 or 3, which are encoded by the human polynucleotide sequences shown in Tables 2 or 3 which are differentially expressed by at least 1.4 fold in an animal subjected to pain relative to an animal not subjected to the same pain.

[0032] The invention further provides human polynucleotide sequences, indicated by Accession no. in Table 2 or 3 which are differentially expressed by greater than 1.4 fold in an animal subjected to pain relative to an animal not subjected to pain and polypeptide sequences encoded thereby. Preferably, the animal is a human.

[0033] The invention further provides human polynucleotide sequences, indicated by Accession no. in Table 2, which are differentially expressed by at least 1.2 fold across at least three replicate screens of neuronal tissue obtained from an animal subjected to pain relative to an animal not subjected to the same pain, with a p-value of less than 0.05.

[0034] Table 1 of the present invention includes polynucleotide sequences which have been examined using the methods described herein, and have been previously individually described in the art as being regulated in animal models of pain. Not all of the polynucleotides shown in Table 1, however, are “differentially expressed” according to the present invention. The invention is based, in part, upon the discovery that certain polynucleotides shown in Table 1 are differentially expressed in nerve tissue. Those polynucleotides indicated as having a Fold change of +/−1.4 or greater are differentially expressed.

[0035] Table 2 and 3 of the present invention include polynucleotide sequences which have not been previously described in the art as being regulated in animal pain models and which have been analyzed in at least three replicate screens of neuronal tissue from animals subjected to pain, and have attained a statistical significance of p<0.05. Table 2 and 3, however, also include one or more of the sequence indicated in Table 1. Accordingly, the phrase “unique to Table x” refers to a sequence which is indicated in Table x, and is not indicated in Table 1. Therefore, the invention also is based, in part, upon the discovery that polynucleotides (listed in Tables 2 and 3) are differentially expressed in nerve tissue obtained from an animal subjected to pain relative to an animal not subjected to the same pain. This discovery is demonstrated in nerve injury models of pain: e.g., spared nerve injury, axotomy, chronic constriction, and nerve ligation, and inflammation pain models. Each of tables 2 and 3 represents a polynucleotide sequence which is identified herein as being differentially expressed in an animal subjected to pain by at least 1.4 fold relative to the expression of the same sequence in an animal which has not been subjected to the same pain. Table 2 represents sequences which have been analyzed in at least three replicate assays of differential expression and are differentially expressed by at least 1.4 fold in an animal subjected to pain relative to an animal not subjected to pain, and have a statistical significance of P<0.05. Thus, each of the polynucleotides shown in Tables 2 or 3 is differentially expressed in an animal subjected to pain according to the present invention.

[0036] Table 4 and 5 of the present invention include polynucleotide sequences which have not been previously described in the art as being regulated in an animal pain model, and which have been identified herein as being differentially expressed in an animal subjected to inflammatory pain by at least 1.4 fold. All of the sequences in Tables 4 and 5 are identified herein as being differentially expressed, and a number of the polynucleotides indicated in Tables 4 and 5 have also been included in Table 2, as having attained a statistical significance of p<0.05 in three replicate analyses of gene expression.

[0037] Accordingly, the present invention provides a composition comprising polynucleotides which are differentially expressed by at least +/−1.2 fold in at least three replicate assays of nerve tissue obtained from a nerve injury or inflammation pain model, with a p-value of less than 0.05, wherein each of the polynucleotides is selected from the polynucleotides listed in Tables 1 or 2, and wherein at least one of the polynucleotides is selected from the polynucleotides listed in Table 2.

[0038] In one embodiment, each of the two or more isolated polynucleotides is differentially expressed by at least 1.4 fold in the nerve tissue of an animal subjected to pain relative to the animal not subjected to the pain, and alternatively, are differentially expressed by at least 1.4 fold across three replicate assays of expression in nerve tissue obtained from a nerve injury pain model with a p-value of less than 0.05.

[0039] In an alternate embodiment, each of the two or more isolated polynucleotides is differentially expressed by at least 2 fold in the neurons of an animal subjected to pain relative to the animal not subjected to the pain.

[0040] In one embodiment, the nerve tissue is the sensory neurons of the dorsal root ganglion, or dorsal horn of the spinal cord.

[0041] The invention also provides a plurality of vectors each comprising an isolated polynucleotide, wherein each of the isolated polynucleotides is selected from Table 1, 2, 3, 4, or 5, or a sequence which hybridizes under high stringency conditions thereto, and wherein at least one of the isolated polynucleotides is unique to Table 2, 3, 4, or 5, or a sequence which hybridizes under high stringency conditions thereto.

[0042] The invention also provides a plurality of vectors each comprising an isolated polynucleotide, wherein each of the isolated polynucleotides is selected from Table 10 and/or 11, or a sequence which hybridizes under high stringency conditions thereto.

[0043] The invention further provides a plurality of viral vectors each comprising an isolated polynucleotide, wherein each of the isolated polynucleotides is selected from Table 1, 2, 3, 4, or 5, or a sequence which hybridizes under high stringency conditions thereto, and wherein at least one of the isolated polynucleotides is unique to Table 2, 3, 4, or 5 or a sequence which hybridizes under high stringency conditions thereto.

[0044] The invention further provides a plurality of viral vectors each comprising an isolated polynucleotide, wherein each of the isolated polynucleotides is selected from Table 10 and/or 11, or a sequence which hybridizes under high stringency conditions thereto.

[0045] The invention further provides a plurality of vectors each comprising an isolated polynucleotide, wherein each of said two or more isolated polynucleotides is selected from the group consisting of: (a) a polynucleotide comprising any of the polynucleotides specified in Table 1-2 in the columns designated “rat gene” and “human gene”, and wherein at least one of said two or more isolated polynucleotides is unique to Table 2 in the columns designated “rat gene” and “human gene”; (b) a polynucleotide encoding an amino acid sequence selected from the group consisting of: (i) amino acid sequences which are homologue to any of the amino acid specified in Table 2 in the columns designated “rat protein” and “human protein” by at least the homology as specified for the respective sequence in Table 2 in the column designated “% homology” and encodes a polypeptide exhibiting the biological function as specified for the respective sequence in Table 2 in the column designated “identifier”; (ii) the amino acid specified in Table 2 in the columns designated “rat protein” and “human protein”; (c) a polynucleotide which hybridizes under high stringency conditions to a polynucleotide specified in (a) to (b) and encodes a polypeptide exhibiting the biological function as specified for the respective sequence in Table 2 in the column designated “identifier”; (d) a polynucleotide the nucleic acid sequence or which deviates from the nucleic acid sequences specified in (a) to (c) due to the degeneration of the genetic code and encodes a polypeptide exhibiting the biological function as specified for the respective sequence in Table 2 in the column designated “identifier”; (e) a polynucleotide which represents a fragment, derivative or allelic variation of a nucleic acid sequence specified in (a) to (d) and encodes a polypeptide exhibiting the biological function as specified for the respective sequence in Table 2 in the column designated “identifier”.

[0046] The invention further provides a plurality of vectors each comprising an isolated polynucleotide, wherein each of said two or more isolated polynucleotides is selected from the group consisting of: (a) a polynucleotide comprising any of the polynucleotides specified in Table 10 and/or 11 in the columns designated “rat gene” and “human gene”; (b) a polynucleotide encoding an amino acid sequence selected from the group consisting of: (i) amino acid sequences which are homologue to any of the amino acid specified in Table 10 and/or 11 in the columns designated “rat protein” and “human protein” by at least the homology as specified for the respective sequence in Table 10 and/or 11 in the column designated “% homology” and encodes a polypeptide exhibiting the biological function as specified for the respective sequence in Table 10 or 11 in the column designated “identifier”; (ii) the amino acid specified in Table 10 or 11 in the columns designated “rat protein” and “human protein”; (c) a polynucleotide which hybridizes under high stringency conditions to a polynucleotide specified in (a) to (b) and encodes a polypeptide exhibiting the biological function as specified for the respective sequence in Table 10 or 11 in the column designated “identifier”; (d) a polynucleotide the nucleic acid sequence or which deviates from the nucleic acid sequences specified in (a) to (c) due to the degeneration of the genetic code and encodes a polypeptide exhibiting the biological function as specified for the respective sequence in Table 10 or 11 in the column designated “identifier”; (e) a polynucleotide which represents a fragment, derivative or allelic variation of a nucleic acid sequence specified in (a) to (d) and encodes a polypeptide exhibiting the biological function as specified for the respective sequence in Table 10 or 11 in the column designated “identifier”.

[0047] In one embodiment, the vectors described above are contained within a host cell.

[0048] The invention further provides a method for identifying a nucleotide sequence which is differentially regulated in an animal subjected to pain, comprising: hybridizing a nucleic acid sample corresponding to RNA obtained from the animal to at least three replicates of a nucleic acid sample comprising one or more nucleic acid molecules of known identity; measuring the hybridization of the nucleic acid sample to the one or more nucleic acid molecules of known identity for each of the replicates, wherein a 1.2 fold difference in the hybridization, and a p-value of less than 0.05 across the at least three replicates, of the nucleic acid sample to the one or more nucleic acid molecules of known identity relative to a nucleic acid sample obtained from an animal which has not been subjected to the pain is indicative of the differential expression of the nucleotide sequence in the animal subjected to pain.

[0049] The present invention also provides a method for identifying a nucleotide sequence which is differentially regulated in an animal subjected to pain, comprising: hybridizing a nucleic acid sample corresponding to RNA obtained from the animal to a nucleic acid sample comprising one or more nucleic acid molecules of known identity; measuring the hybridization of the nucleic acid sample to the one or more nucleic acid molecules of known identity, wherein a 1.4 fold difference in the hybridization of the nucleic acid sample to the one or more nucleic acid molecules of known identity relative to a nucleic acid sample obtained from an animal which has not been subjected to the pain is indicative of the differential expression of the nucleotide sequence in the animal subjected to pain.

[0050] The invention further provides a method for identifying a nucleotide sequence which is differentially regulated in an animal subjected to pain, comprising: hybridizing a nucleic acid sample corresponding to RNA obtained from the animal to at least three replicates of an array comprising a solid substrate and one or more nucleic acid molecules of known identity; wherein each nucleic acid member has a unique position and is stably associated with the solid substrate; and measuring the hybridization of the nucleic acid sample to the at least three replicates of the array, wherein a 1.2 fold difference in the hybridization, and a p-value of less than 0.05 across the at least three replicates, of the nucleic acid sample to the one or more nucleic acid molecules of known identity comprising the array relative to a nucleic acid sample obtained from an animal which has not been subjected to the pain is indicative of the differential expression of the nucleotide sequence in the animal subjected to pain.

[0051] The invention still further provides a method for identifying a nucleotide sequence which is differentially regulated in an animal subjected to pain, comprising: hybridizing a nucleic acid sample corresponding to RNA obtained from an animal which has been subjected to pain to an array comprising a solid substrate and a plurality of nucleic acid members; wherein each nucleic acid member has a unique position and is stably associated with the solid substrate; and measuring the hybridization of the nucleic acid sample to the array, wherein a 1.4 fold difference in the hybridization of the nucleic acid sample to one or more nucleic acid members comprising the array relative to a nucleic acid sample obtained from an animal which has not been subjected to the pain is indicative of the differential expression of the nucleotide sequence in the animal subjected to pain.

[0052] In one embodiment, any of the preceding methods for identifying a nucleotide sequence which is differentially regulated in an animal subjected to pain may further comprise the step of verifying the differential expression of the nucleotide sequence by a molecular procedure selected from the group consisting of Northern analysis, in situ hybridization, and PCR.

[0053] The invention provides a method for identifying a nucleotide sequence which is differentially regulated in an animal subjected to pain, comprising: hybridizing a nucleic acid sample corresponding to RNA obtained from an animal which has been subjected to pain to an array comprising a solid substrate and a plurality of nucleic acid members; wherein each nucleic acid member has a unique position and is stably associated with the solid substrate; measuring the hybridization of the nucleic acid sample to the array, wherein a 1.4 fold difference in the hybridization of the nucleic acid sample to one or more nucleic acid members comprising the array relative to a nucleic acid sample obtained from an animal which has not been subjected to the pain is indicative of the differential expression of the nucleotide sequence in the animal subjected to pain; and verifying the differential expression of the nucleotide sequence by a molecular procedure selected from the group consisting of Northern analysis, in situ hybridization, and PCR.

[0054] In one embodiment, a 1.4 fold change in the hybridization of the nucleic acid sample to one or more nucleic acid members comprising the array relative to a nucleic acid sample obtained from an animal which has not been subjected to the pain is indicative of the differential expression of the nucleotide sequence following pain.

[0055] In a further embodiment, a 2 fold change in the hybridization of the nucleic acid sample to one or more nucleic acid members comprising the array relative to a nucleic acid sample obtained from an animal which has not been subjected to the pain is indicative of the differential expression of the nucleotide sequence following pain.

[0056] In one embodiment, the nucleic acid sample is labeled with a detectable label prior to the hybridization to the array.

[0057] In a further embodiment, the above methods for identifying a nucleic acid sequence which is differentially regulated in an animal subjected to pain further comprises the step of isolating the nucleic acid sample from the animal.

[0058] In one embodiment, nucleic acid sample is cRNA.

[0059] The present invention also provides an array comprising: a plurality of polynucleotide members, wherein each of the polynucleotide members is selected from Table 1, 2, 3, 4, or 5 and wherein at least one of the isolated polynucleotides is unique to Table 2, 3, 4, or 5; and a solid substrate, wherein each polynucleotide member has a unique position on the array and is stably associated with the solid substrate. Such an array will be referred to herein as a “pain specific array”.

[0060] The invention still further provides an array comprising: a plurality of polynucleotide members, wherein each of the polynucleotide members is selected from Table 1, 2, 3, 4, or 5, and wherein at least one of the isolated polynucleotides is unique to Table 2, 3, 4, or 5 and wherein the plurality of polynucleotide members are obtained from neuronal tissue obtained from at least two different species of animal; and a solid substrate, wherein each polynucleotide member obtained from each of the two different species has a unique position on the array and is stably associated with the solid substrate. Such an array will be referred to herein as a “pain specific array”.

[0061] The invention also comprises an array comprising: (a) a plurality of polynucleotide members, wherein each of said plurality of polynucleotides is selected from the group consisting of: (i) a polynucleotide comprising any of the polynucleotides specified in Table 1-2 in the columns designated “rat gene” and “human gene”, and wherein at least one of said two or more isolated polynucleotides is unique to Table 2 in the columns designated “rat gene” and “human gene”; (ii) a polynucleotide encoding an amino acid sequence selected from the group consisting of: (1) amino acid sequences which are homologue to any of the amino acid specified in Table 2 in the columns designated “rat protein” and “human protein” by at least the homology as specified for the respective sequence in Table 2 in the column designated “% homology” and encodes a polypeptide exhibiting the biological function as specified for the respective sequence in Table 2 in the column designated “identifier”; (2) the amino acid specified in Table 2 in the columns designated “rat protein” and “human protein”; (iii) a polynucleotide which hybridizes under high stringency conditions to a polynucleotide specified in (i) to (ii) and encodes a polypeptide exhibiting the biological function as specified for the respective sequence in Table 2 in the column designated “identifier”; (iv) a polynucleotide the nucleic acid sequence or which deviates from the nucleic acid sequences specified in (i) to (iii) due to the degeneration of the genetic code and encodes a polypeptide exhibiting the biological function as specified for the respective sequence in Table 2 in the column designated “identifier”; (v) a polynucleotide which represents a fragment, derivative or allelic variation of a nucleic acid sequence specified in (i) to (iv) and encodes a polypeptide exhibiting the biological function as specified for the respective sequence in Table 2 in the column designated “identifier”; and (b) a solid substrate, wherein each polynucleotide member has a unique position on said array and is stably associated with said solid substrate.

[0062] The present invention also provides an array comprising: a plurality of polynucleotide members, wherein each of the polynucleotide members is selected from Table 10 and/or 11; and a solid substrate, wherein each polynucleotide member has a unique position on the array and is stably associated with the solid substrate. Such an array will be referred to herein as a “pain specific array”.

[0063] The invention still further provides an array comprising: a plurality of polynucleotide members, wherein each of the polynucleotide members is selected from Table 10 and/or 11, wherein the plurality of polynucleotide members are obtained from neuronal tissue obtained from at least two different species of animal; and a solid substrate, wherein each polynucleotide member obtained from each of the two different species has a unique position on the array and is stably associated with the solid substrate. Such an array will be referred to herein as a “pain specific array”.

[0064] The invention also comprises an array comprising: (a) a plurality of polynucleotide members, wherein each of said plurality of polynucleotides is selected from the group consisting of: (i) a polynucleotide comprising any of the polynucleotides specified in Table 10 and/or 11 in the columns designated “rat gene” and “human gene”; (ii) a polynucleotide encoding an amino acid sequence selected from the group consisting of: (1) amino acid sequences which are homologue to any of the amino acid specified in Table 10 and/or 11 in the columns designated “rat protein” and “human protein” by at least the homology as specified for the respective sequence in Table 10 and/or 11 in the column designated “% homology” and encodes a polypeptide exhibiting the biological function as specified for the respective sequence in Table 10 and/or 11 in the column designated “identifier”; (2) the amino acid specified in Table 10 and/or 11 in the columns designated “rat protein” and “human protein”; (iii) a polynucleotide which hybridizes under high stringency conditions to a polynucleotide specified in (i) to (ii) and encodes a polypeptide exhibiting the biological function as specified for the respective sequence in Table 10 and/or 11 in the column designated “identifier”; (iv) a polynucleotide the nucleic acid sequence or which deviates from the nucleic acid sequences specified in (i) to (iii) due to the degeneration of the genetic code and encodes a polypeptide exhibiting the biological function as specified for the respective sequence in Table 10 and/or 11 in the column designated “identifier”; (v) a polynucleotide which represents a fragment, derivative or allelic variation of a nucleic acid sequence specified in (i) to (iv) and encodes a polypeptide exhibiting the biological function as specified for the respective sequence in Table 10 and/or 11 in the column designated “identifier”; and (b) a solid substrate, wherein each polynucleotide member has a unique position on said array and is stably associated with said solid substrate.

[0065] In one embodiment, the plurality of polynucleotide members is differentially expressed by at least 1.2 fold across at least three replicate assays of expression in neuronal tissue of an animal subjected to pain with a p-value of less than 0.05 relative to an animal not subjected to the pain.

[0066] In one embodiment, the plurality of polynucleotide members is differentially expressed by at least 1.4 fold in the neurons of the animal subjected to pain relative to an animal not subjected to the pain.

[0067] In a further embodiment, the array comprises from 10 to 20,000 polynucleotide members.

[0068] In one embodiment, the array further comprises negative and positive control sequences and quality control sequences selected from the group consisting of cDNA sequences encoded by housekeeping genes, plant gene sequences, bacterial sequences, PCR products and vector sequences.

[0069] The invention further provides a method of identifying an agent that increases or decreases the expression of a polynucleotide sequence that is differentially expressed in neuronal tissue of a first animal which is subjected to pain comprising: administering the agent to the first animal; hybridizing nucleic acid isolated from one or more sensory neurons of the first and a second animal to a pain specific array; and measuring the hybridization of the nucleic acid isolated from the neuronal tissue of the first and second animal to the array; wherein an increase in hybridization of the nucleic acid from the first animal to one or more nucleic acid members of the array relative to hybridization of the nucleic acid from a second animal which is subjected to pain but to which is not administered the agent to one or more nucleic acid members of the array identifies the agent as increasing the expression of the polynucleotide sequence, and wherein a decrease in hybridization of the nucleic acid from the first animal to one or more nucleic acid members of the array relative to the hybridization of the nucleic acid from second animal to one or more nucleic acid members of the array identifies the agent as decreasing the expression of the polynucleotide sequence.

[0070] In one embodiment, the preceding method further comprises the step of verifying the increase or decrease in the hybridization by a molecular procedure selected from the group consisting of Northern analysis, in situ hybridization, and PCR.

[0071] In one embodiment, the nucleic acid sample isolated from the first and second animal is labeled with a detectable label prior to the hybridization to the array.

[0072] In a further embodiment, the nucleic acid sample isolated from the first animal is labeled with a different detectable label than the nucleic acid sample isolated from the second animal.

[0073] The invention also provides a method for identifying a compound which regulates the expression of a polynucleotide sequence which is differentially expressed in an animal subjected to pain, comprising: (a) providing a cell comprising and capable of expressing one or more of the polynucleotide selected from the group consisting of: (i) a polynucleotide comprising any of the polynucleotides specified in Table 1-2 in the columns designated “rat gene” and “human gene”, and wherein at least one of said two or more isolated polynucleotides is unique to Table 2 in the columns designated “rat gene” and “human gene”; (ii) a polynucleotide encoding an amino acid sequence selected from the group consisting of: (1) amino acid sequences which are homologue to any of the amino acid specified in Table 2 in the columns designated “rat protein” and “human protein” by at least the homology as specified for the respective sequence in Table 2 in the column designated “% homology” and encodes a polypeptide exhibiting the biological function as specified for the respective sequence in Table 2 in the column designated “identifier”; (2) the amino acid specified in Table 2 in the columns designated “rat protein” and “human protein”; (iii) a polynucleotide which hybridizes under high stringency conditions to a polynucleotide specified in (i) to (ii) and encodes a polypeptide exhibiting the biological function as specified for the respective sequence in Table 2 in the column designated “identifier”; (iv) a polynucleotide the nucleic acid sequence or which deviates from the nucleic acid sequences specified in (i) to (iii) due to the degeneration of the genetic code and encodes a polypeptide exhibiting the biological function as specified for the respective sequence in Table 2 in the column designated “identifier”; (v) a polynucleotide which represents a fragment, derivative or allelic variation of a nucleic acid sequence specified in (i) to (iv) and encodes a polypeptide exhibiting the biological function as specified for the respective sequence in Table 2 in the column designated “identifier”; (b) contacting said cell with a candidate compound; and (c) measuring the expression of said one or more of the polynucleotide specified supra, wherein if the expression of said differentially expressed polynucleotide sequence is increased in an animal which is subjected to pain, then said candidate modulator will be considered to regulate the expression of said polynucleotide if the expression of said polynucleotide is decreased by at least 10% in the presence of said candidate modulator, and wherein if the expression of said differentially expressed polynucleotide sequence is decreased in an animal subjected to pain, then said candidate modulator will be considered to regulate the expression of said polynucleotide if the expression of said polynucleotide is increased by at least 10% in the presence of said candidate modulator.

[0074] The invention also provides a method for identifying a compound which regulates the expression of a polynucleotide sequence which is differentially expressed in an animal subjected to pain, comprising: (a) providing a cell comprising and capable of expressing one or more of the polynucleotide selected from the group consisting of: (i) a polynucleotide comprising any of the polynucleotides specified in Table 10 and/or 11 in the columns designated “rat gene” and “human gene”; (ii) a polynucleotide encoding an amino acid sequence selected from the group consisting of: (1) amino acid sequences which are homologue to any of the amino acid specified in Table 10 and/or 11 in the columns designated “rat protein” and “human protein” by at least the homology as specified for the respective sequence in Table 10 and/or 11 in the column designated “% homology” and encodes a polypeptide exhibiting the biological function as specified for the respective sequence in Table 10 and/or 11 in the column designated “identifier”; (2) the amino acid specified in Table 10 and/or 11 in the columns designated “rat protein” and “human protein”; (iii) a polynucleotide which hybridizes under high stringency conditions to a polynucleotide specified in (i) to (ii) and encodes a polypeptide exhibiting the biological function as specified for the respective sequence in Table 10 and/or 11 in the column designated “identifier”; (iv) a polynucleotide the nucleic acid sequence or which deviates from the nucleic acid sequences specified in (i) to (iii) due to the degeneration of the genetic code and encodes a polypeptide exhibiting the biological function as specified for the respective sequence in Table 10 and/or 11 in the column designated “identifier”; (v) a polynucleotide which represents a fragment, derivative or allelic variation of a nucleic acid sequence specified in (i) to (iv) and encodes a polypeptide exhibiting the biological function as specified for the respective sequence in Table 10 and/or 11 in the column designated “identifier”; (b) contacting said cell with a candidate compound; and (c) measuring the expression of said one or more of the polynucleotide specified supra, wherein if the expression of said differentially expressed polynucleotide sequence is increased in an animal which is subjected to pain, then said candidate modulator will be considered to regulate the expression of said polynucleotide if the expression of said polynucleotide is decreased by at least 10% in the presence of said candidate modulator, and wherein if the expression of said differentially expressed polynucleotide sequence is decreased in an animal subjected to pain, then said candidate modulator will be considered to regulate the expression of said polynucleotide if the expression of said polynucleotide is increased by at least 10% in the presence of said candidate modulator.

[0075] The invention also provides a method for identifying a compound which regulates the expression of a polynucleotide sequence which is differentially expressed in an animal subjected to pain, comprising: providing a cell comprising and capable of expressing one or more of the polynucleotide sequences shown in Tables 1, 2, 3, 4, or 5; contacting the cell with a candidate compound; and measuring the expression of the one or more of the polynucleotide sequences shown in Tables 1, 2, 3, 4, or 5, wherein an increase or decrease in the expression of the one or more of the polynucleotide sequences shown in Table 1, 2, 3, 4, or 5 of at least 10% is indicative of regulation of the differentially expressed polynucleotide sequence.

[0076] The invention still further provides a method for identifying a compound which regulates the activity of one or more of the polypeptides shown in Table 1, 2, 3, 4, or 5, or the activity of a polypeptide encoded by a polynucleotide sequence indicated in Table 1, 2, 3, 4, or 5 comprising: providing a cell comprising the one or more polypeptides; contacting the cell with a candidate compound; and measuring the activity of the one or more polypeptides, wherein an increase or decrease of the activity of the one or more polypeptides of at least 10% relative to the activity of the one or more polypeptides in the cell, wherein the cell is not contacted with the candidate compound, identifies the candidate compound as a compound which regulates the activity of the one or more polypeptides.

[0077] The invention also provides a method for identifying a compound which regulates the expression of a polynucleotide sequence which is differentially expressed in an animal subjected to pain, comprising: providing a cell comprising and capable of expressing one or more of the polynucleotide sequences shown in Tables 10 and/or 11; contacting the cell with a candidate compound; and measuring the expression of the one or more of the polynucleotide sequences shown in Tables 10 and/or 11, wherein an increase or decrease in the expression of the one or more of the polynucleotide sequences shown in Table 10 and/or 11 of at least 10% is indicative of regulation of the differentially expressed polynucleotide sequence.

[0078] The invention still further provides a method for identifying a compound which regulates the activity of one or more of the polypeptides shown in Table 10 and/or 11, or the activity of a polypeptide encoded by a polynucleotide sequence indicated in Table 10 and/or 111 comprising: providing a cell comprising the one or more polypeptides; contacting the cell with a candidate compound; and measuring the activity of the one or more polypeptides, wherein an increase or decrease of the activity of the one or more polypeptides of at least 10% relative to the activity of the one or more polypeptides in the cell, wherein the cell is not contacted with the candidate compound, identifies the candidate compound as a compound which regulates the activity of the one or more polypeptides.

[0079] In one embodiment, the candidate compound is selected from the group consisting of small molecule, protein, RNAi, and antisense.

[0080] In a further embodiment, the candidate compound is an antibody which binds to the polypeptide.

[0081] The invention also provides a method for producing a pharmaceutical formulation comprising: providing a cell comprising the one or more polypeptides; selecting a compound which regulates the activity of the one or more polypeptides; and mixing the compound with a carrier.

[0082] In one embodiment, the step of selecting comprises the steps of contacting the cell with a candidate compound; and measuring the activity of the one or more polypeptides, wherein an increase or decrease of the activity of the one or more polypeptides of at least 10% relative to the activity of the one or more polypeptides in the cell, wherein the cell is not contacted with the candidate compound, identifies the candidate compound as a compound which regulates the activity of the one or more polypeptides.

[0083] The invention also provides a method for producing a pharmaceutical formulation comprising: (a) providing a cell comprising said one or more polypeptides encoded by a polynucleotide selected from the group consisting of: (i) a polynucleotide comprising any of the polynucleotides specified in Table 1-2 in the columns designated “rat gene” and “human gene”, and wherein at least one of said two or more isolated polynucleotides is unique to Table 2 in the columns designated “rat gene” and “human gene”; (ii) a polynucleotide encoding an amino acid sequence selected from the group consisting of: (1) amino acid sequences which are homologue to any of the amino acid specified in Table 2 in the columns designated “rat protein” and “human protein” by at least the homology as specified for the respective sequence in Table 2 in the column designated “% homology” and encodes a polypeptide exhibiting the biological function as specified for the respective sequence in Table 2 in the column designated “identifier”; (2) the amino acid specified in Table 2 in the columns designated “rat protein” and “human protein”; (iii) a polynucleotide which hybridizes under high stringency conditions to a polynucleotide specified in (i) to (ii) and encodes a polypeptide exhibiting the biological function as specified for the respective sequence in Table 2 in the column designated “identifier”; (iv) a polynucleotide the nucleic acid sequence or which deviates from the nucleic acid sequences specified in (i) to (iii) due to the degeneration of the genetic code and encodes a polypeptide exhibiting the biological function as specified for the respective sequence in Table 2 in the column designated “identifier”; (v) a polynucleotide which represents a fragment, derivative or allelic variation of a nucleic acid sequence specified in (i) to (iv) and encodes a polypeptide exhibiting the biological function as specified for the respective sequence in Table 2 in the column designated “identifier”; (b) selecting a compound which regulates the activity of said one or more polypeptides; and (c) mixing said compound with a carrier.

[0084] The invention also provides a method for producing a pharmaceutical formulation comprising: (a) providing a cell comprising said one or more polypeptides encoded by a polynucleotide selected from the group consisting of: (i) a polynucleotide comprising any of the polynucleotides specified in Table 10 and/or 11 in the columns designated “rat gene” and “human gene”; (ii) a polynucleotide encoding an amino acid sequence selected from the group consisting of: (1) amino acid sequences which are homologue to any of the amino acid specified in Table 10 and/or 11 in the columns designated “rat protein” and “human protein” by at least the homology as specified for the respective sequence in Table 10 and/or 11 in the column designated “% homology” and encodes a polypeptide exhibiting the biological function as specified for the respective sequence in Table 10 and/or 11 in the column designated “identifier”; (2) the amino acid specified in Table 10 and/or 11 in the columns designated “rat protein” and “human protein”; (iii) a polynucleotide which hybridizes under high stringency conditions to a polynucleotide specified in (i) to (ii) and encodes a polypeptide exhibiting the biological function as specified for the respective sequence in Table 10 and/or 11 in the column designated “identifier”; (iv) a polynucleotide the nucleic acid sequence or which deviates from the nucleic acid sequences specified in (i) to (iii) due to the degeneration of the genetic code and encodes a polypeptide exhibiting the biological function as specified for the respective sequence in Table 10 and/or 11 in the column designated “identifier”; (v) a polynucleotide which represents a fragment, derivative or allelic variation of a nucleic acid sequence specified in (i) to (iv) and encodes a polypeptide exhibiting the biological function as specified for the respective sequence in Table 10 and/or 11 in the column designated “identifier”; (b) selecting a compound which regulates the activity of said one or more polypeptides; and (c) mixing said compound with a carrier.

[0085] In one embodiment, the step of selecting comprises the steps of contacting said cell with a candidate compound; and measuring the activity of said one or more polypeptides, wherein an increase or decrease of the activity of said one or more polypeptides of at least 10% relative to the activity of said one or more polypeptides in said cell, wherein the cell is not contacted with the candidate compound, identifies said candidate compound as a compound which regulates the activity of said one or more polypeptides

[0086] The invention also provides a method for identifying a compound which regulates the activity, in an animal, of one or more of the polypeptides shown in Table 1, 2, 3, 4, or 5, or a polypeptide encoded by one or more polynucleotide sequence indicated in Table 1, 2, 3, 4, or 5 comprising: administering a candidate compound to an animal comprising the one or more polypeptides; and measuring the activity of the one or more polypeptides wherein an increase or decrease of the activity of the polypeptide of at least 10% relative to the activity of the one or more polypeptides in an animal to which the candidate compound is not administered, identifies the candidate compound as a compound which regulates the activity of the one or more polypeptides.

[0087] The invention also provides a method for identifying a compound which regulates the activity, in an animal, of one or more of the polypeptides shown in Table 10 and/or 11, or a polypeptide encoded by one or more polynucleotide sequence indicated in Table 10 and/or 11 comprising: administering a candidate compound to an animal comprising the one or more polypeptides; and measuring the activity of the one or more polypeptides wherein an increase or decrease of the activity of the polypeptide of at least 10% relative to the activity of the one or more polypeptides in an animal to which the candidate compound is not administered, identifies the candidate compound as a compound which regulates the activity of the one or more polypeptides.

[0088] Preferably, the candidate compound is selected from the group consisting of small molecule, protein, RNAi, and antisense.

[0089] In one embodiment, the candidate compound is an antibody which binds to the polypeptide.

[0090] The invention still further provides a method for identifying a small molecule which regulates the activity of one or more of the polypeptides indicated in Table 1, 2, 3, 4, or 5, or a polypeptide encoded by one or more polynucleotides indicated in Table 1, 2, 3, 4, or 5 comprising: providing a cell comprising the one or more polypeptides; generating a small molecule library; providing a candidate small molecule, selected from the library; contacting the cell with the candidate small molecule; and measuring the activity of the one or more polypeptides, wherein an increase or decrease of the activity of the one or more polypeptides of at least 10% relative to the activity of the one or more polypeptides in the cell, wherein the cell is not contacted with the candidate small molecule, identifies the candidate small molecule as a small molecule which regulates the activity of the one or more polypeptides.

[0091] The invention still further provides a method for identifying a small molecule which regulates the activity of one or more of the polypeptides indicated in Table 10 and/or 11, or a polypeptide encoded by one or more polynucleotides indicated in Table 10 and/or 11 comprising: providing a cell comprising the one or more polypeptides; generating a small molecule library; providing a candidate small molecule, selected from the library; contacting the cell with the candidate small molecule; and measuring the activity of the one or more polypeptides, wherein an increase or decrease of the activity of the one or more polypeptides of at least 10% relative to the activity of the one or more polypeptides in the cell, wherein the cell is not contacted with the candidate small molecule, identifies the candidate small molecule as a small molecule which regulates the activity of the one or more polypeptides.

[0092] Preferably, the small molecule library comprises components selected from the group consisting of heterocyclics, aromatics, alicyclics, aliphatics, steroids, antibiotics, enzyme inhibitors, ligands, hormones, alkaloids, opioids, terpenes, porphyrins, toxins, and catalysts, and combinations thereof.

[0093] The invention also relates to a method for identifying a small molecule which regulates the activity of one or more of the polypeptides indicated in Table 2, comprising: (a) providing a cell comprising said one or more polypeptides encoded by a polynucleotide selected from the group consisting of: (i) a polynucleotide comprising any of the polynucleotides specified in Table 1-2 in the columns designated “rat gene” and “human gene”, and wherein at least one of said two or more isolated polynucleotides is unique to Table 2 in the columns designated “rat gene” and “human gene”; (ii) a polynucleotide encoding an amino acid sequence selected from the group consisting of: (1) amino acid sequences which are homologue to any of the amino acid specified in Table 2 in the columns designated “rat protein” and “human protein” by at least the homology as specified for the respective sequence in Table 2 in the column designated “% homology” and encodes a polypeptide exhibiting the biological function as specified for the respective sequence in Table 2 in the column designated “identifier”; (2) the amino acid specified in Table 2 in the columns designated “rat protein” and “human protein”; (iii) a polynucleotide which hybridizes under high stringency conditions to a polynucleotide specified in (i) to (ii) and encodes a polypeptide exhibiting the biological function as specified for the respective sequence in Table 2 in the column designated “identifier”; (iv) a polynucleotide the nucleic acid sequence or which deviates from the nucleic acid sequences specified in (i) to (iii) due to the degeneration of the genetic code and encodes a polypeptide exhibiting the biological function as specified for the respective sequence in Table 2 in the column designated “identifier”; (v) a polynucleotide which represents a fragment, derivative or allelic variation of a nucleic acid sequence specified in (i) to (iv) and encodes a polypeptide exhibiting the biological function as specified for the respective sequence in Table 2 in the column designated “identifier”; (b) generating a small molecule library; (c) providing a candidate small molecule, selected from said library; (d) contacting said cell with said candidate small molecule; and (e) measuring the activity of said one or more polypeptides, wherein an increase or decrease of the activity of said one or more polypeptides of at least 10% relative to the activity of said one or more polypeptides in said cell, wherein the cell is not contacted with the candidate small molecule, identifies said candidate small molecule as a small molecule which regulates the activity of said one or more polypeptides.

[0094] The invention also relates to a method for identifying a small molecule which regulates the activity of one or more of the polypeptides indicated in Table 10 and/or 11, comprising: (a) providing a cell comprising said one or more polypeptides encoded by a polynucleotide selected from the group consisting of: (i) a polynucleotide comprising any of the polynucleotides specified in Table 10 and/or 11 in the columns designated “rat gene” and “human gene”; (ii) a polynucleotide encoding an amino acid sequence selected from the group consisting of: (1) amino acid sequences which are homologue to any of the amino acid specified in Table 10 and/or 11 in the columns designated “rat protein” and “human protein” by at least the homology as specified for the respective sequence in Table 10 and/or 11 in the column designated “% homology” and encodes a polypeptide exhibiting the biological function as specified for the respective sequence in Table 10 and/or 11 in the column designated “identifier”; (2) the amino acid specified in Table 10 and/or 11 in the columns designated “rat protein” and “human protein”; (iii) a polynucleotide which hybridizes under high stringency conditions to a polynucleotide specified in (i) to (ii) and encodes a polypeptide exhibiting the biological function as specified for the respective sequence in Table 10 and/or 11 in the column designated “identifier”; (iv) a polynucleotide the nucleic acid sequence or which deviates from the nucleic acid sequences specified in (i) to (iii) due to the degeneration of the genetic code and encodes a polypeptide exhibiting the biological function as specified for the respective sequence in Table 10 and/or 11 in the column designated “identifier”; (v) a polynucleotide which represents a fragment, derivative or allelic variation of a nucleic acid sequence specified in (i) to (iv) and encodes a polypeptide exhibiting the biological function as specified for the respective sequence in Table 10 and/or 11 in the column designated “identifier”; (b) generating a small molecule library; (c) providing a candidate small molecule, selected from said library; (d) contacting said cell with said candidate small molecule; and (e) measuring the activity of said one or more polypeptides, wherein an increase or decrease of the activity of said one or more polypeptides of at least 10% relative to the activity of said one or more polypeptides in said cell, wherein the cell is not contacted with the candidate small molecule, identifies said candidate small molecule as a small molecule which regulates the activity of said one or more polypeptides.

[0095] The invention further relates to a method for identifying a compound useful in the treatment of pain, comprising: providing a host cell comprising a vector comprising one or more of the polynucleotides identified in Table 1, 2, 3, 4, or 5; maintaining the host cell under conditions which permit the expression of the one or more polynucleotides; selecting a compound which regulates the activity of a polypeptide encoded by the one or more polynucleotides; administering the compound to an animal subjected to pain; and measuring the level of pain in the animal, wherein a decrease in the level of pain in the animal of at least 10%, identifies the compound as being useful for treating pain.

[0096] The invention further relates to a method for identifying a compound useful in the treatment of pain, comprising: providing a host cell comprising a vector comprising one or more of the polynucleotides identified in Table 10 and/or 11; maintaining the host cell under conditions which permit the expression of the one or more polynucleotides; selecting a compound which regulates the activity of a polypeptide encoded by the one or more polynucleotides; administering the compound to an animal subjected to pain; and measuring the level of pain in the animal, wherein a decrease in the level of pain in the animal of at least 10%, identifies the compound as being useful for treating pain.

[0097] In one embodiment, the step of selecting includes the steps of contacting the cell with a candidate compound; and measuring the activity of the polypeptide encoded by the one or more polynucleotides, wherein an increase or decrease of the activity of the polypeptide of at least 10% relative to the activity of the polypeptide in the cell, wherein the cell is not contacted with the candidate compound, identifies the candidate compound as a compound which regulates the activity of the polypeptide.

[0098] The invention further provides a method for identifying a compound useful in the treatment of pain, comprising: (a) providing a host cell comprising a vector comprising one or more of the polynucleotides selected from the group consisting of: (i) a polynucleotide comprising any of the polynucleotides specified in Table 1-2 in the columns designated “rat gene” and “human gene”, and wherein at least one of said two or more isolated polynucleotides is unique to Table 2 in the columns designated “rat gene” and “human gene”; (ii) a polynucleotide encoding an amino acid sequence selected from the group consisting of: (1) amino acid sequences which are homologue to any of the amino acid specified in Table 2 in the columns designated “rat protein” and “human protein” by at least the homology as specified for the respective sequence in Table 2 in the column designated “% homology” and encodes a polypeptide exhibiting the biological function as specified for the respective sequence in Table 2 in the column designated “identifier”; (2) the amino acid specified in Table 2 in the columns designated “rat protein” and “human protein”; (iii) a polynucleotide which hybridizes under high stringency conditions to a polynucleotide specified in (i) to (ii) and encodes a polypeptide exhibiting the biological function as specified for the respective sequence in Table 2 in the column designated “identifier”; (iv) a polynucleotide the nucleic acid sequence or which deviates from the nucleic acid sequences specified in (i) to (iii) due to the degeneration of the genetic code and encodes a polypeptide exhibiting the biological function as specified for the respective sequence in Table 2 in the column designated “identifier”; (v) a polynucleotide which represents a fragment, derivative or allelic variation of a nucleic acid sequence specified in (i) to (iv) and encodes a polypeptide exhibiting the biological function as specified for the respective sequence in Table 2 in the column designated “identifier”; (b) maintaining said host cell under conditions which permit the expression of said one or more polynucleotides; (c) selecting a compound which regulates the activity of a polypeptide encoded by said one or more polynucleotides; (d) administering said compound to an animal subjected to pain; and (e) measuring the level of pain in said animal, wherein a decrease in the level of pain in said animal of at least 10%, identifies said compound as being useful for treating pain.

[0099] The invention further provides a method for identifying a compound useful in the treatment of pain, comprising: (a) providing a host cell comprising a vector comprising one or more of the polynucleotides selected from the group consisting of: (i) a polynucleotide comprising any of the polynucleotides specified in Table 10 and/or 11 in the columns designated “rat gene” and “human gene”; (ii) a polynucleotide encoding an amino acid sequence selected from the group consisting of: (1) amino acid sequences which are homologue to any of the amino acid specified in Table 10 and/or 11 in the columns designated “rat protein” and “human protein” by at least the homology as specified for the respective sequence in Table 10 and/or 11 in the column designated “% homology” and encodes a polypeptide exhibiting the biological function as specified for the respective sequence in Table 10 and/or 11 in the column designated “identifier”; (2) the amino acid specified in Table 10 and/or 11 in the columns designated “rat protein” and “human protein”; (iii) a polynucleotide which hybridizes under high stringency conditions to a polynucleotide specified in (i) to (ii) and encodes a polypeptide exhibiting the biological function as specified for the respective sequence in Table 10 and/or 11 in the column designated “identifier”; (iv) a polynucleotide the nucleic acid sequence or which deviates from the nucleic acid sequences specified in (i) to (iii) due to the degeneration of the genetic code and encodes a polypeptide exhibiting the biological function as specified for the respective sequence in Table 10 and/or 11 in the column designated “identifier”; (v) a polynucleotide which represents a fragment, derivative or allelic variation of a nucleic acid sequence specified in (i) to (iv) and encodes a polypeptide exhibiting the biological function as specified for the respective sequence in Table 10 and/or 11 in the column designated “identifier”; (b) maintaining said host cell under conditions which permit the expression of said one or more polynucleotides; (c) selecting a compound which regulates the activity of a polypeptide encoded by said one or more polynucleotides; (d) administering said compound to an animal subjected to pain; and (e) measuring the level of pain in said animal, wherein a decrease in the level of pain in said animal of at least 10%, identifies said compound as being useful for treating pain.

[0100] In one embodiment, the step of selecting includes the steps of contacting said cell with a candidate compound; and measuring the activity of the polypeptide encoded by said one or more polynucleotides, wherein an increase or decrease of the activity of said polypeptide of at least 10% relative to the activity of said polypeptide in said cell, wherein the cell is not contacted with the candidate compound, identifies said candidate compound as a compound which regulates the activity of said polypeptide.

[0101] The invention also provides a method of treating pain in an animal comprising administering to the animal an antisense polynucleotide capable of inhibiting the expression of one or more of the polynucleotide sequences indicated in Table 1, 2, 3, 4, or 5.

[0102] The invention further provides a method of treating pain in an animal comprising administering to the animal a double stranded RNA molecule wherein one of the strands of the double stranded RNA molecule is identical to a portion of an mRNA transcript obtained from one or more of the polynucleotide sequences indicated in Table 1, 2, 3, 4, or 5.

[0103] The invention still further provides a method of treating pain in an animal in need thereof, comprising: administering to the animal a therapeutically effective amount of an agent which modulates the activity of one or more of the polypeptides indicated in Table 1, 2, 3, 4, or 5, or a polypeptide encoded by one or more of the polynucleotides indicated in Table 1, 2, 3, 4, or 5.

[0104] The invention also provides a method of treating pain in an animal in need thereof, comprising: administering a therapeutically effective amount of an antibody which binds to one or more of the polypeptides indicated in Table 1, 2, 3, 4, or 5, or a polypeptide encoded by one or more of the polynucleotides indicated in Table 1, 2, 3, 4, or 5.

[0105] The invention still further provides a method of treating pain in an animal in need thereof, comprising: administering a therapeutically effective amount of one or more of the polypeptides indicated in Table 1, 2, 3, 4, or 5, or a polypeptide encoded by one or more of the polynucleotides indicated in Table 1, 2, 3, 4, or 5.

[0106] The invention further relates to a method of detecting pain in an animal suspected of having pain comprising: measuring the amount of one or more of the polynucleotide sequences of Table 10 or 11 in an animal suspected of having pain, wherein if said amount of the one or more polynucleotides is increased or decreased by at least 1.2 fold across at least three replicate screens and is statistically significant at P<0.05 in the animal compared to the amount of the same one or more polynucletoide sequences of Table 10 or 11 in an animal not suspected of having pain, then pain is detected in the animal suspected of having pain.

[0107] In one embodiment, the amount of said one or more polynucleotide sequences is measured in one or more sensory neurons.

[0108] In a further embodiment, the sensory neurons are selected from the group consisting of dorsal horn neurons and dorsal root ganglion neurons.

[0109] In one embodiment the polynucleotide is measured in a “patient sample” wherein a “patient sample” as used herein refers to blood, plasma, serum, or cerebro-spinal fluid.

[0110] In one embodiment, the polynucletoide is differentially expressed by 1.4 fold.

[0111] The invention further relates to a method of detecting pain in an animal suspected of having pain comprising: measuring the amount of one or more of the polynucleotide sequences of Table 1, 2, 3, 4, or 5 in an animal suspected of having pain, wherein if said amount of the one or more polynucleotides is increased or decreased by at least 1.2 fold across at least three replicate screens and is statistically significant at P<0.05 in the animal compared to the amount of the same one or more polynucletoide sequences of Table 1, 2, 3, 4, or 5 in an animal not suspected of having pain, then pain is detected in the animal suspected of having pain.

[0112] In one embodiment, the amount of said one or more polynucleotide sequences is measured in one or more sensory neurons.

[0113] In a further embodiment, the sensory neurons are selected from the group consisting of dorsal horn neurons and dorsal root ganglion neurons.

[0114] In one embodiment the polynucleotide is measured in a “patient sample” wherein a “patient sample” as used herein refers to blood, plasma, serum, or cerebro-spinal fluid.

[0115] In one embodiment, the polynucletoide is differentially expressed by 1.4 fold.

[0116] A method of detecting pain in an animal suspected of having pain comprising: measuring the amount of one or more of the polypeptide sequences of Table 10 or 11 in the animal suspected of having pain, wherein if the amount of said one or more polypeptides is increased or decreased by at least 1.2 fold across at least three replicate screens and is statistically significant at P<0.05 in the animal compared to the amount of the same one or more polypeptide sequences of Table 10 or 11 in an animal not suspected of having pain, then pain is detected in the animal suspected of having pain.

[0117] In one embodiment, the amount of said one or more polynucleotide sequences is measured in one or more sensory neurons.

[0118] In a further embodiment, the sensory neurons are selected from the group consisting of dorsal horn neurons and dorsal root ganglion neurons.

[0119] In one embodiment the polypeptide is measured in a “patient sample” wherein a “patient sample” as used herein refers to blood, plasma, serum, or cerebro-spinal fluid.

[0120] In one embodiment, the polypeptide is differentially expressed by 1.4 fold.

[0121] The invention still further provides a method of detecting pain in an animal suspected of having pain comprising: measuring the amount of one or more of the polypeptide sequences of Table 1, 2, 3, 4, or 5 in the animal suspected of having pain, wherein if the amount of said one or more polypeptides is increased or decreased by at least 1.2 fold across at least three replicate screens and is statistically significant at P<0.05 in the animal compared to the amount of the same one or more polypeptide sequences of Table 1, 2, 3, 4, or 5 in an animal not suspected of having pain, then pain is detected in the animal suspected of having pain.

[0122] In one embodiment, the amount of said one or more polypeptide sequences is measured in one or more sensory neurons.

[0123] In a further embodiment, the sensory neurons are selected from the group consisting of dorsal horn neurons and dorsal root ganglion neurons.

[0124] In one embodiment the polypeptide is measured in a “patient sample” wherein a “patient sample” as used herein refers to blood, plasma, serum, or cerebro-spinal fluid.

[0125] In one embodiment, the polypeptide is differentially expressed by 1.4 fold.

[0126] The invention also provides a pharmaceutical formulation comprising one or more polypeptides indicated in Table 1, 2, 3, 4, or 5, or a polypeptide encoded by one or more of the polynucleotides indicated in Table 1, 2, 3, 4, or 5, and a carrier.

[0127] The invention also provides a pharmaceutical formulation comprising one or more antibodies which bind to one or more of the polypeptides indicated in Table 1, 2, 3, 4, or 5, or a polypeptide encoded by one or more of the polynucleotides indicated in Table 1, 2, 3, 4, or 5, and a carrier.

[0128] The invention also provides a method of treating pain in an animal comprising administering to the animal an antisense polynucleotide capable of inhibiting the expression of one or more of the polynucleotide sequences indicated in Table 10 and/or 11.

[0129] The invention further provides a method of treating pain in an animal comprising administering to the animal a double stranded RNA molecule wherein one of the strands of the double stranded RNA molecule is identical to a portion of an mRNA transcript obtained from one or more of the polynucleotide sequences indicated in Table 10 and/or 11.

[0130] The invention still further provides a method of treating pain in an animal in need thereof, comprising: administering to the animal a therapeutically effective amount of an agent which modulates the activity of one or more of the polypeptides indicated in Table 10 and/or 11, or a polypeptide encoded by one or more of the polynucleotides indicated in Table 10 and/or 11.

[0131] The invention also provides a method of treating pain in an animal in need thereof, comprising: administering a therapeutically effective amount of an antibody which binds to one or more of the polypeptides indicated in Table 10 and/or 11, or a polypeptide encoded by one or more of the polynucleotides indicated in Table 10 and/or 11.

[0132] The invention still further provides a method of treating pain in an animal in need thereof, comprising: administering a therapeutically effective amount of one or more of the polypeptides indicated in Table 10 and/or 11, or a polypeptide encoded by one or more of the polynucleotides indicated in Table 10 and/or 11.

[0133] The invention also provides a pharmaceutical formulation comprising one or more polypeptides indicated in Table 10 and/or 11, or a polypeptide encoded by one or more of the polynucleotides indicated in Table 10 and/or 11, and a carrier.

[0134] The invention also provides a pharmaceutical formulation comprising one or more antibodies which bind to one or more of the polypeptides indicated in Table 10 and/or 11, or a polypeptide encoded by one or more of the polynucleotides indicated in Table 10 and/or 11, and a carrier.

[0135] The invention further relates to the use of: (a) a polynucleotide selected from the group consisting of: (i) a polynucleotide comprising any of the polynucleotides specified in Table 1-2 in the columns designated “rat gene” and “human gene”, and wherein at least one of said two or more isolated polynucleotides is unique to Table 2 in the columns designated “rat gene” and “human gene”; (ii) a polynucleotide encoding an amino acid sequence selected from the group consisting of: (1) amino acid sequences which are homologue to any of the amino acid specified in Table 2 in the columns designated “rat protein” and “human protein” by at least the homology as specified for the respective sequence in Table 2 in the column designated “% homology” and encodes a polypeptide exhibiting the biological function as specified for the respective sequence in Table 2 in the column designated “identifier”; (2) the amino acid specified in Table 2 in the columns designated “rat protein” and “human protein”; (iii) a polynucleotide which hybridizes under high stringency conditions to a polynucleotide specified in (a) to (b) and encodes a polypeptide exhibiting the biological function as specified for the respective sequence in Table 2 in the column designated “identifier”; (iv) a polynucleotide the nucleic acid sequence or which deviates from the nucleic acid sequences specified in (a) to (c) due to the degeneration of the genetic code and encodes a polypeptide exhibiting the biological function as specified for the respective sequence in Table 2 in the column designated “identifier”; (v) a polynucleotide which represents a fragment, derivative or allelic variation of a nucleic acid sequence specified in (a) to (d) and encodes a polypeptide exhibiting the biological function as specified for the respective sequence in Table 2 in the column designated “identifier”; (vi) a polypeptide encoded by any of the polynucleotides specified in (i) to (v); in the preparation of a medicament for the treatment of pain in an animal.

[0136] The invention further relates to the use of: (a) a polynucleotide selected from the group consisting of: (i) a polynucleotide comprising any of the polynucleotides specified in Table 10 and/or 11 in the columns designated “rat gene” and “human gene”; (ii) a polynucleotide encoding an amino acid sequence selected from the group consisting of: (1) amino acid sequences which are homologue to any of the amino acid specified in Table 10 and/or 11 in the columns designated “rat protein” and “human protein” by at least the homology as specified for the respective sequence in Table 10 and/or 11 in the column designated “% homology” and encodes a polypeptide exhibiting the biological function as specified for the respective sequence in Table 10 and/or 11 in the column designated “identifier”; (2) the amino acid specified in Table 10 and/or 11 in the columns designated “rat protein” and “human protein”; (iii) a polynucleotide which hybridizes under high stringency conditions to a polynucleotide specified in (a) to (b) and encodes a polypeptide exhibiting the biological function as specified for the respective sequence in Table 10 and/or 11 in the column designated “identifier”; (iv) a polynucleotide the nucleic acid sequence or which deviates from the nucleic acid sequences specified in (a) to (c) due to the degeneration of the genetic code and encodes a polypeptide exhibiting the biological function as specified for the respective sequence in Table 10 and/or 11 in the column designated “identifier”; (v) a polynucleotide which represents a fragment, derivative or allelic variation of a nucleic acid sequence specified in (a) to (d) and encodes a polypeptide exhibiting the biological function as specified for the respective sequence in Table 10 and/or 11 in the column designated “identifier”; (vi) a polypeptide encoded by any of the polynucleotides specified in (i) to (v); in the preparation of a medicament for the treatment of pain in an animal.

[0137] The present invention still further relates to the use of a compound which can modulate the activity of a polypeptide which is encoded by a polynucleotide selected from the group consisting of: (a) a polynucleotide comprising any of the polynucleotides specified in Table 1-2 in the columns designated “rat gene” and “human gene”, and wherein at least one of said two or more isolated polynucleotides is unique to Table 2 in the columns designated “rat gene” and “human gene”; (b) a polynucleotide encoding an amino acid sequence selected from the group consisting of: (i) amino acid sequences which are homologue to any of the amino acid specified in Table 2 in the columns designated “rat protein” and “human protein” by at least the homology as specified for the respective sequence in Table 2 in the column designated “% homology” and encodes a polypeptide exhibiting the biological function as specified for the respective sequence in Table 2 in the column designated “identifier”; (ii) the amino acid specified in Table 2 in the columns designated “rat protein” and “human protein”; (c) a polynucleotide which hybridizes under high stringency conditions to a polynucleotide specified in (a) to (b) and encodes a polypeptide exhibiting the biological function as specified for the respective sequence in Table 2 in the column designated “identifier”; (d) a polynucleotide the nucleic acid sequence or which deviates from the nucleic acid sequences specified in (a) to (c) due to the degeneration of the genetic code and encodes a polypeptide exhibiting the biological function as specified for the respective sequence in Table 2 in the column designated “identifier”; (e) a polynucleotide which represents a fragment, derivative or allelic variation of a nucleic acid sequence specified in (a) to (d) and encodes a polypeptide exhibiting the biological function as specified for the respective sequence in Table 2 in the column designated “identifier”; in the preparation of a medicament for the treatment of pain in an animal.

[0138] The present invention provides a pharmaceutical formulation comprising one or more polypeptides encoded by a polynucleotide selected from the group consisting of: (a) a polynucleotide comprising any of the polynucleotides specified in Table 1-2 in the columns designated “rat gene” and “human gene”, and wherein at least one of said two or more isolated polynucleotides is unique to Table 2 in the columns designated “rat gene” and “human gene”; (b) a polynucleotide encoding an amino acid sequence selected from the group consisting of: (i) amino acid sequences which are homologue to any of the amino acid specified in Table 2 in the columns designated “rat protein” and “human protein” by at least the homology as specified for the respective sequence in Table 2 in the column designated “% homology” and encodes a polypeptide exhibiting the biological function as specified for the respective sequence in Table 2 in the column designated “identifier”; (ii) the amino acid specified in Table 2 in the columns designated “rat protein” and “human protein”; (c) a polynucleotide which hybridizes under high stringency conditions to a polynucleotide specified in (a) to (b) and encodes a polypeptide exhibiting the biological function as specified for the respective sequence in Table 2 in the column designated “identifier”; (d) a polynucleotide the nucleic acid sequence or which deviates from the nucleic acid sequences specified in (a) to (c) due to the degeneration of the genetic code and encodes a polypeptide exhibiting the biological function as specified for the respective sequence in Table 2 in the column designated “identifier”; (e) a polynucleotide which represents a fragment, derivative or allelic variation of a nucleic acid sequence specified in (a) to (d) and encodes a polypeptide exhibiting the biological function as specified for the respective sequence in Table 2 in the column designated “identifier”; and a carrier.

[0139] The invention still further provides a pharmaceutical formulation comprising one or more antibodies which bind to one or more of the polypeptides encoded by a polynucleotide selected from the group consisting of: (a) a polynucleotide comprising any of the polynucleotides specified in Table 1-2 in the columns designated “rat gene” and “human gene”, and wherein at least one of said two or more isolated polynucleotides is unique to Table 2 in the columns designated “rat gene” and “human gene”; (b) a polynucleotide encoding an amino acid sequence selected from the group consisting of: (i) amino acid sequences which are homologue to any of the amino acid specified in Table 2 in the columns designated “rat protein” and “human protein” by at least the homology as specified for the respective sequence in Table 2 in the column designated “% homology” and encodes a polypeptide exhibiting the biological function as specified for the respective sequence in Table 2 in the column designated “identifier”; (ii) the amino acid specified in Table 2 in the columns designated “rat protein” and “human protein”; (c) a polynucleotide which hybridizes under high stringency conditions to a polynucleotide specified in (a) to (b) and encodes a polypeptide exhibiting the biological function as specified for the respective sequence in Table 2 in the column designated “identifier”; (d) a polynucleotide the nucleic acid sequence or which deviates from the nucleic acid sequences specified in (a) to (c) due to the degeneration of the genetic code and encodes a polypeptide exhibiting the biological function as specified for the respective sequence in Table 2 in the column designated “identifier”; (e) a polynucleotide which represents a fragment, derivative or allelic variation of a nucleic acid sequence specified in (a) to (d) and encodes a polypeptide exhibiting the biological function as specified for the respective sequence in Table 2 in the column designated “identifier”; and a carrier.

[0140] The present invention still further relates to the use of a compound which can modulate the activity of a polypeptide which is encoded by a polynucleotide selected from the group consisting of: (a) a polynucleotide comprising any of the polynucleotides specified in Table 10 and/or 11 in the columns designated “rat gene” and “human gene”; (b) a polynucleotide encoding an amino acid sequence selected from the group consisting of: (i) amino acid sequences which are homologue to any of the amino acid specified in Table 10 and/or 11 in the columns designated “rat protein” and “human protein” by at least the homology as specified for the respective sequence in Table 10 and/or 11 in the column designated “% homology” and encodes a polypeptide exhibiting the biological function as specified for the respective sequence in Table 10 and/or 11 in the column designated “identifier”; (ii) the amino acid specified in Table 10 and/or 11 in the columns designated “rat protein” and “human protein”; (c) a polynucleotide which hybridizes under high stringency conditions to a polynucleotide specified in (a) to (b) and encodes a polypeptide exhibiting the biological function as specified for the respective sequence in Table 10 and/or 11 in the column designated “identifier”; (d) a polynucleotide the nucleic acid sequence or which deviates from the nucleic acid sequences specified in (a) to (c) due to the degeneration of the genetic code and encodes a polypeptide exhibiting the biological function as specified for the respective sequence in Table 10 and/or 11 in the column designated “identifier”; (e) a polynucleotide which represents a fragment, derivative or allelic variation of a nucleic acid sequence specified in (a) to (d) and encodes a polypeptide exhibiting the biological function as specified for the respective sequence in Table 10 and/or 11 in the column designated “identifier”; in the preparation of a medicament for the treatment of pain in an animal.

[0141] The present invention provides a pharmaceutical formulation comprising one or more polypeptides encoded by a polynucleotide selected from the group consisting of: (a) a polynucleotide comprising any of the polynucleotides specified in Table 10 and/or 111 in the columns designated “rat gene” and “human gene”; (b) a polynucleotide encoding an amino acid sequence selected from the group consisting of: (i) amino acid sequences which are homologue to any of the amino acid specified in Table 10 and/or 11 in the columns designated “rat protein” and “human protein” by at least the homology as specified for the respective sequence in Table 10 and/or 11 in the column designated “% homology” and encodes a polypeptide exhibiting the biological function as specified for the respective sequence in Table 10 and/or 11 in the column designated “identifier”; (ii) the amino acid specified in Table 10 and/or 11 in the columns designated “rat protein” and “human protein”; (c) a polynucleotide which hybridizes under high stringency conditions to a polynucleotide specified in (a) to (b) and encodes a polypeptide exhibiting the biological function as specified for the respective sequence in Table 10 and/or 11 in the column designated “identifier”; (d) a polynucleotide the nucleic acid sequence or which deviates from the nucleic acid sequences specified in (a) to (c) due to the degeneration of the genetic code and encodes a polypeptide exhibiting the biological function as specified for the respective sequence in Table 10 and/or 11 in the column designated “identifier”; (e) a polynucleotide which represents a fragment, derivative or allelic variation of a nucleic acid sequence specified in (a) to (d) and encodes a polypeptide exhibiting the biological function as specified for the respective sequence in Table 10 and/or 11 in the column designated “identifier”; and a carrier.

[0142] The invention still further provides a pharmaceutical formulation comprising one or more antibodies which bind to one or more of the polypeptides encoded by a polynucleotide selected from the group consisting of: (a) a polynucleotide comprising any of the polynucleotides specified in Table 10 and/or 11 in the columns designated “rat gene” and “human gene”; (b) a polynucleotide encoding an amino acid sequence selected from the group consisting of: (i) amino acid sequences which are homologue to any of the amino acid specified in Table 10 and/or 11 in the columns designated “rat protein” and “human protein” by at least the homology as specified for the respective sequence in Table 10 and/or 11 in the column designated “% homology” and encodes a polypeptide exhibiting the biological function as specified for the respective sequence in Table 10 and/or 11 in the column designated “identifier”; (ii) the amino acid specified in Table 10 and/or 11 in the columns designated “rat protein” and “human protein”; (c) a polynucleotide which hybridizes under high stringency conditions to a polynucleotide specified in (a) to (b) and encodes a polypeptide exhibiting the biological function as specified for the respective sequence in Table 10 and/or 11 in the column designated “identifier”; (d) a polynucleotide the nucleic acid sequence or which deviates from the nucleic acid sequences specified in (a) to (c) due to the degeneration of the genetic code and encodes a polypeptide exhibiting the biological function as specified for the respective sequence in Table 10 and/or 11 in the column designated “identifier”; (e) a polynucleotide which represents a fragment, derivative or allelic variation of a nucleic acid sequence specified in (a) to (d) and encodes a polypeptide exhibiting the biological function as specified for the respective sequence in Table 10 and/or 11 in the column designated “identifier”; and a carrier.

[0143] According to the invention, a sequence differentially expressed under pain conditions must be differentially expressed in the neurons of an animal subjected to nerve injury, or inflammatory pain, thus differential expression in an animal subjected to nerve injury pain is determined, according to the invention, in one or all of the following nerve injury pain models. A sequence which is differentially expressed according to the invention is a sequence which is differentially expressed in (1) an axotomy pain model, (2) a spared nerve injury pain model, (3) chronic constriction pain model, (4) spinal segmental nerve lesion pain model, or (5) an inflammation pain model, or may be differentially expressed in all five pain models, or in a combination of two or more models.

[0144] As used herein differential expression of a sequence in nerve tissue is determined in either a “nerve injury pain model” or a “inflammation pain model”, or both. There are four alternate nerve injury pain models by which differential expression can be determined according to the invention: axotomy, spared nerve injury (SNI), spinal segmental nerve lesion, and chronic constriction.

[0145] As used herein, an “axotomy pain model” refers to a situation in which one or a plurality of peripheral nerve fibers is severed, either by traumatic injury or experimental or surgical manipulation. An “axotomy pain model” may further refer to an experimental model in which all of the axons of a given population of nerve cells are completely severed. For example, an “axotomy pain model” useful in the present invention may be a model in which all of the axons that comprise the sciatic nerve are surgically cut. All of the nerve cells in the dorsal root ganglion which gave rise to the axons of the sciatic nerve are thus said to be “axotomized”.

[0146] As used herein, a “spared nerve injury pain model” refers to a situation in which one of the terminal branches of the sciatic nerve is spared from axotomy (Decosterd and Woolf, 2000 Pain 87: 149). The SNI procedure comprises an axotomy and ligation of the tibial and common peroneal nerves leaving the sural nerve intact.

[0147] As used herein, a “spinal segmental nerve lesion” and “chronic constriction” refer to two types of “neuropathic pain models” useful in the present invention. Both models are well known to those of skill in the art (See, for example Kim and Chung, 1992 Pain 50: 355; and Bennett, 1993 Muscle Nerve 16: 1040 for a description of the “segmental nerve lesion” and “chronic constriction” respectively). A “segmental nerve lesion” and/or “chronic constriction” neuropathic pain model may be evaluated for the presence of “pain” using any of the behavioral, electrophysiological, and/or neurochemical criteria described below.

[0148] As used herein, an “inflammatory pain model” refers to a situation in which an animal is subjected to pain, as defined herein, by the induction of peripheral tissue inflammation (Stein et al., (1988) Pharmacol Biochem Behav 31: 445-451; Woolf et al., (1994) Neurosci. 62, 327-331). The inflammation can be produced by injection of an irritant such as complete Freunds adjuvant (CFA), carrageenan, turpentine, croton oil, and the like into the skin, subcutaneously, into a muscle, into a joint, or into a visceral organ. In addition, an “inflammatory pain model” can be produced by the administration of cytokines or inflammatory mediators such as lippopolysoccharide (LPS), or nerve growth factor (NGF) which can mimic the effects of inflammation. An “inflammatory pain model” can be evaluated for the presence of “pain” using behavioral, electrophysiological, and/or neurochemical criteria as described below.

[0149] A polynucleotide is thus differentially expressed herein if it is differentially expressed in any or all of the axotomy, SNI, chronic constriction, segmental nerve lesion and inflammatory pain models.

[0150] As used herein, “nerve tissue” refers to animal tissue comprising nerve cells, the neuropil, glia, neural inflammatory cells, and endothelial cells in contact with “nerve tissue”. “Nerve cells” may be any type of nerve cell known to those of skill in the art including, but not limited to motor neurons, sensory neurons, enteric neurons, sympathetic neurons, parasympathetic neurons, association neurons, and central nervous system neurons. “Glial cells” useful in the present invention include, but are not limited to astrocytes, Schwan cells, and oligodendrocytes. “Neural inflammatory cells” useful in the present invention include, but are not limited to microglia. Preferably, “nerve tissue” as used herein refers to nerve cells obtained from the dorsal root ganglion, or dorsal horn of the spinal cord.

[0151] As used herein, “sensory neuron” refers to any sensory neuron in an animal. A “sensory neuron” can be a peripheral sensory neuron, central sensory neuron, or enteric sensory neuron. A “sensory neuron” includes all parts of a neuron including, but not limited to the cell body, axon, and dendrite(s). A “sensory neuron” refers to a neuron which receives and transmits information (encoded by a combination of action potentials, neurotransmitters and neuropeptides) relating to sensory input, including, but not limited to pain, heat, touch, cold, pressure, vibration, etc. Examples of “sensory neurons” include, but are not limited to dorsal root ganglion neurons, dorsal horn neurons of the spinal cord, autonomic neurons, trigeminal ganglion neurons, and the like.

[0152] As used herein, “animal” refers to a organism classified within the phylogenetic kingdom Animalia. As used herein, an “animal” also refers to a mammal. Animals, useful in the present invention, include, but are not limited to mammals, marsupials, mice, dogs, cats, cows, humans, deer, horses, sheep, livestock, and the like.

[0153] As used herein, “subjected” refers to a state of being in which an animal is experiencing pain, wherein whether or not the animal is experiencing pain is determined using the behavioral, electrophysiological, and/or neurochemical criteria described above. As used herein, “subjected” does not refer to the past experience of pain only, but can also include the present experience of pain.

[0154] As used herein, “polynucleotide” refers to a polymeric form of nucleotides of 2 up to 1,000 bases in length, or even more, either ribonucleotides or deoxyribonucleotides or a modified form of either type of nucleotide. The term includes single and double stranded forms of DNA. The term is synonymous with “oligonucleotide”. Polynucleotides of the invention include those indicated by accession number in Tables 1, 2, 3, 4, or 5, or a portion thereof.

[0155] As used herein, “polypeptide” refers to any kind of polypeptide such as peptides, human proteins, fragments of human proteins, proteins or fragments of proteins from non-human sources, engineered versions proteins or fragments of proteins, enzymes, antigens, drugs, molecules involved in cell signaling, such as receptor molecules, antibodies, including polypeptides of the immunoglobulin superfamily, such as antibody polypeptides or T-cell receptor polypeptides. Preferably, a “polypeptide” useful according to the invention is indicated by accession number in Tables 1, 2, 3, 4, or 5. Also included, are a fragment, domain, or epitope of one or more of the polypeptides indicated in Tables 2, 3, 4, or 5 provided that the fragment, domain, or epitope maintains the same function as the protein indicated in Table 2, 3, 4, or 5, wherein the function of the polypeptide is known to those of skill in the art. Also included, are a fragment, domain, or epitope of one or more of the polypeptides indicated in Tables 2 or 3 provided that the fragment, domain, or epitope maintains the same function as the protein indicated in Table 2 or 3, under the column heading “identifier”, “description” or “protein type”

[0156] As used herein, the term “vector” refers to a nucleic acid molecule capable of transporting another nucleic acid to which it has been linked. One type of vector is a “plasmid”, which refers to a circular double stranded nucleic acid loop into which additional nucleic acid segments can be ligated. Another type of vector is a “viral vector”, wherein additional nucleic acid segments can be ligated into the viral genome. Certain vectors are capable of autonomous replication in a host cell into which they are introduced (e.g., bacterial vectors having a bacterial origin of replication and episomal mammalian vectors). Other vectors (e.g., non-episomal mammalian vectors) are integrated into the genome of a host cell upon introduction into the host cell, and thereby are replicated along with the host genome. Moreover, certain vectors are capable of directing the expression of genes to which they are operatively linked. Such vectors are referred to herein as “expression vectors”. In general, expression vectors of utility in recombinant nucleic acid techniques are often in the form of plasmids. In the present specification, “plasmid” and “vector” can be used interchangeably as the plasmid is the most commonly used form of vector. However, the invention is intended to include such other forms of expression vectors, such as viral vectors (e.g., replication defective retroviruses, adenoviruses and adeno-associated viruses), which serve equivalent functions.

[0157] As used herein, the term “hybridizing” or “hybridization” refers to the hydrogen binding with a complementary nucleic acid, via an interaction between for example, a target nucleic acid sequence and a nucleic acid member in an array.

[0158] Typically, selective hybridization occurs when two nucleic acid sequences are substantially complementary (at least about 65% complementary over a stretch of at least 14 to 25 nucleotides, preferably at least about 75%, more preferably at least about 90% complementary). See Kanehisa, M., 1984, Nucleic Acids Res. 12: 203, incorporated herein by reference. As a result, it is expected that a certain degree of mismatch is tolerated. Such mismatch may be small, such as a mono-, di- or tri-nucleotide. Alternatively, a region of mismatch may encompass loops, which are defined as regions in which there exists a mismatch in an uninterrupted series of four or more nucleotides.

[0159] Numerous factors influence the efficiency and selectivity of hybridization of two nucleic acids, for example a nucleic acid member to a target nucleic acid sequence. These factors include nucleic acid member length, nucleotide sequence and/or composition, hybridization temperature, buffer composition and potential for steric hindrance in the region to which the nucleic acid member is required to hybridize.

[0160] A positive correlation exists between the nucleic acid member length and both the efficiency and accuracy with which a nucleic acid member will anneal to a target sequence. In particular, longer sequences have a higher melting temperature (TM) than do shorter ones, and are less likely to be repeated within a given target sequence, thereby minimizing promiscuous hybridization. Hybridization temperature varies inversely with nucleic acid member annealing efficiency, as does the concentration of organic solvents, e.g., formamide, that might be included in a hybridization mixture, while increases in salt concentration facilitate binding. Under stringent annealing conditions, longer nucleic acids, hybridize more efficiently than do shorter ones, which are sufficient under more permissive conditions. As herein used, the term “standard stringent conditions” means hybridization will occur only if there is at least 95% and preferably at least 97% identity between the sequences, wherein the region of identity comprises at least 10 nucleotides. In one embodiment, the sequences hybridize under stringent conditions following incubation of the sequences overnight at 42° C., followed by stringent washes (0.2×SSC at 65° C.). As several factors affect the stringency of hybridization, the combination of parameters is more important than the absolute measure of a single factor.

[0161] As defined herein, an “array” refers a plurality of unique nucleic acids attached to one surface of a solid support at a density exceeding 20 different nucleic acids/cm² wherein each of the nucleic acids is attached to the surface of the solid support in a non-identical preselected region. In one embodiment, the nucleic acid attached to the surface of the solid support is DNA. In a preferred embodiment, the nucleic acid attached to the surface of the solid support is cDNA. In another preferred embodiment, the nucleic acid attached to the surface of the solid support is cDNA synthesized by polymerase chain reaction (PCR). Preferably, a nucleic acid comprising an array, according to the invention, is at least 20 nucleotides in length. Preferably, a nucleic acid comprising an array is less than 6,000 nucleotides in length. More preferably, a nucleic acid comprising an array is less than 500 nucleotides in length. In one embodiment, the array comprises at least 500 different nucleic acids attached to one surface of the solid support. In another embodiment, the array comprises at least 10 different nucleic acids attached to one surface of the solid support. In yet another embodiment, the array comprises at least 10,000 different nucleic acids attached to one surface of the solid support. The term “nucleic acid”, as used herein, is interchangeable with the term “polynucleotide”.

[0162] As used herein, “plurality” refers to more than two. Plurality, according to the invention, can be 3 or more, 100 or more, or 1000 or more.

[0163] As used herein, “attaching” or “spotting” refers to a process of depositing a nucleic acid onto a solid substrate to form a nucleic acid array such that the nucleic acid is irreversibly bound to the solid substrate via covalent bonds, hydrogen bonds or ionic interactions.

[0164] As used herein, “stably associated” refers to a nucleic acid that is irreversibly bound to a solid substrate to form an array via covalent bonds, hydrogen bonds or ionic interactions such that the nucleic acid retains its unique preselected position relative to all other nucleic acids that are stably associated with an array, or to all other preselected regions on the solid substrate under conditions wherein an array is analyzed (i.e., hybridization and scanning).

[0165] As used herein, “solid substrate” or “solid support” refers to a material having a rigid or semi-rigid surface. The terms “substrate” and “support” are used interchangeable herein with the terms “solid substrate” and “solid support”. The solid support may be biological, non-biological, organic, inorganic, or a combination of any of these, existing as particles, strands, precipitates, gels, sheets, tubing, spheres, containers, capillaries, pads, slices, films, plates, slides, etc. Often, the substrate is a silicon or glass surface, (poly)tetrafluoroethylene, (poly)vinylidendifluoride, polystyrene, polycarbonate, a charged membrane, such as nylon 66 or nitrocellulose, or combinations thereof. In a preferred embodiment, the solid support is glass. Preferably, at least one surface of the substrate will be substantially flat. Preferably, the surface of the solid support will contain reactive groups, including, but not limited to, carboxyl, amino, hydroxyl, thiol, or the like. In one embodiment, the surface is optically transparent.

[0166] As used herein, “preselected region”, “predefined region”, or “unique position” refers to a localized area on a substrate which is, was, or is intended to be used for the deposit of a nucleic acid and is otherwise referred to herein in the alternative as a “selected region” or simply a “region.” The preselected region may have any convenient shape, e.g., circular, rectangular, elliptical, wedge-shaped, etc. In some embodiments, a preselected region is smaller than about 1 cm², more preferably less than 1 mm², still more preferably less than 0.5 mm², and in some embodiments about 0.125 to 0.5 mm².

[0167] As used herein, “unique to Table X”, where “X” is one or more of 2, 3, 4, or 5, refers to a polynucleotide or polypeptide sequence which is indicated in Table X, but is not indicated in Table 1.

[0168] As used herein, the term “level of expression” refers to the measurable expression level of a given nucleic acid. The level of expression of a nucleic acid is determined by methods well known in the art. The term “differentially expressed” or “differential expression” refers to an increase or decrease in the measurable expression level of a given nucleic acid. As used herein, “differentially expressed” or “differential expression” means the difference in the level of expression of a nucleic acid is at least 1.4-fold or more in two samples used for comparison, both of which are compared to the same normal standard sample. “Differentially expressed” or “differential expression” according to the invention also means a 1.4-fold, or more, up to and including 2-fold, 5-fold, 10-fold, 20-fold, 50-fold or more difference in the level of expression of a nucleic acid in two samples used for comparison. A nucleic acid is also said to be “differentially expressed” in two samples if one of the two samples contains no detectable expression of a given nucleic acid, provided that the detectably expressed nucleic acid is expressed at +/−at least 1.4 fold. Differential expression of a nucleic acid sequence is “inhibited” the difference in the level of expression of the nucleic acid in two or more samples used for comparison is altered such that it is no longer at least a 1.4 fold difference. Absolute quantification of the level of expression of a nucleic acid may be accomplished by including a known concentration(s) of one or more control nucleic acid species, generating a standard curve based on the amount of the control nucleic acid and extrapolating the expression level of the “unknown” nucleic acid species from the hybridization intensities of the unknown with respect to the standard curve.

[0169] Alternatively, “differential expression”, according to the invention, refers to a 1.2 fold increase or decrease in the level of expression of a nucleic acid in an animal subjected to pain compared to the level of expression in an animal not subjected to the same pain, combined with a statistical significance of p<0.05 in at least three replicate assays of gene expression. Calculation of a statistically significant 1.2 fold threshold in the increase or decrease in the difference of expression of a nucleic acid, when compared to a normal standard sample is based on a statistical analysis of triplicate array data points using, for example, a student's t-test. “Differential expression” of a polynucleotide sequence, as used herein, is established if the expression of a sequence measured in several types of animal pain model, such as nerve injury models or an inflammation model, is increased or decreased by at least 1.2 fold in at least one of the pain models, and if the differential expression is found to be significant across three replicate analyses of differential expression in an animal pain model. Alternatively, a differentially expressed polynucleotide may be differentially expressed in several (e.g., two or more) animal pain models.

[0170] The “level of expression” is measured by hybridization analysis using labeled target nucleic acids according to methods well known in the art (see, for example, Ausubel et al., Short Protocols in Molecular Biology, 3^{rd} Ed. 1995, John Wiley and Sons, Inc.). The label on the target nucleic acid is a luminescent label, an enzymatic label, a radioactive label, a chemical label or a physical label. Preferably, the target nucleic acids are labeled with a fluorescent molecule. Preferred fluorescent labels include fluorescein, amino coumarin acetic acid, tetramethylrhodamine isothiocyanate (TRITC), Texas Red, Cy3 and Cy5.

[0171] As used herein, “differential expression” when measured using microarray hybridization as described herein, can be determined using one or more of three alternate measurements: (1) The hybridization intensity can be measured by comparing the level of hybridization of nucleic acid samples obtained from a naïve animal to the level of hybridization of nucleic acid samples from an animal subjected to any of the pain models described herein. This measurement is termed the “intensity ratio”. (2) Alternatively, a method of measuring “differential expression” is to utilize the “Affymetrix ratio” which is obtained by analyzing the hybridization levels obtained from nucleic acid samples obtained from a naïve animal and those obtained from nucleic acid samples obtained from an animal subjected to any of the pain models described herein, using the software provided with the Affymetrix Microarray software suite (Affymetrix, Santa Clara, Calif.). The Affymetrix ratio can be determined by following the protocols included with the Affymetrix brand software and microarray analysis equipment. Whether measured using the intensity ratio or the Affymetrix ratio, a nucleic acid molecule of the present invention is differentially expressed if it demonstrates at least a 1.4 fold change in expression levels in an animal subjected to the neuropathic or inflammation pain as described herein relative to an animal not subjected to the same pain. (3) Preferably, “differential expression” is measured in either a nerve injury model, or inflammation pain model, or both, at multiple time points after an animal has been subjected to pain. “Differential expression” is further measured in at least three replicate samples for each time point, and for multiple pain models (e.g. nerve injury models, an inflammation models), such that a statistical evaluation may be made of the significance of the differential expression. Accordingly, a polynucleotide sequence is “differentially expressed” if it is differentially expressed by at least 1.4 fold, and/or is differentially expressed by at least 1.2 fold, with a p-value of less than 0.05 across at least two sets of triplicate assays in any of the pain models versus the corresponding control. The fold differential expression, when paired with the statistical analysis of at least two replicate expression assays, can be measured using either of the “intensity ratio” or “affymetrix ratio” described above.

### DESCRIPTION OF THE DRAWINGS

[0172] FIG. 1 shows the data from a representative Northern analysis performed on target nucleic acid obtained from dorsal root ganglion neurons from a rat axotomy pain model.

[0173] FIG. 2 shows the in situ hybridization of dorsal root ganglion tissue sections with labeled oligonucleotide probes specific for SNAP, c-jun, or TrkA.

[0174] FIG. 3 shows the in situ hybridization of dorsal root ganglion tissue sections with labeled oligonucleotide probes specific for GTPcylco, IES-JE, CCHL2A, or VGF.

### DETAILED DESCRIPTION

[0175] The present invention is based, in part, on the discovery that the polynucleotides listed in Tables 1, 2, 3, 4, or 5 are differentially expressed by at least +/−1.4 fold in nerve injury and/or inflammation animal pain models. While the polynucleotides listed in Table 1 have been previously suggested to be regulated in pain models, the present invention is distinguished over the prior art in that only polynucleotides which demonstrate at least a +/−1.4 fold change in expression in a neuropathic and/or inflammation animal pain model are considered to be differentially expressed according to the invention. The invention further provides the polynucleotides listed in Tables 2, 3, 4, or 5 which are differentially expressed by at least +/−1.4 fold in a nerve injury or inflammation animal pain model, but which have not previously been suggested to be regulated in animal pain models (i.e., which are not indicate in Table 1). In addition, the invention provides the polynucleotides listed in Table 2 which have been identified herein as being differentially expressed by at least +/−1.2 fold at least two sets of triplicate assays in multiple nerve injury and inflammation pain models, with a p-value of less than 0.05. The invention further provides methods for identifying nucleic acid sequences which are differentially regulated in animals that have been subjected to pain, wherein differential expression is defined as an increase or decrease of the expression of the nucleic acid sequence by at least 1.2 fold compared to the same sequence in an animal which has not been subjected to pain, in triplicate assays with a statistical significance of p<0.05. The invention further provides methods for identifying nucleic acid sequences which are differentially regulated in animals that have been subjected to pain, wherein differential expression is defined as an increase or decrease of the expression of the nucleic acid sequence by at least 1.4 fold compared to the same sequence in an animal which has not been subjected to pain. The invention further provides methods of constructing arrays comprising isolated nucleic acid sequences which are differentially regulated in pain, and methods of screening for potential therapeutic compounds which may alter the expression of these sequences using the arrays. The invention also relates to methods for screening for candidate compounds which are capable of regulating the expression of one or more of the polynucleotide sequences of Tables 1, 2, 3, 4, or 5, or which are capable of regulating the activity of one or more of the polypeptides indicated in Table 1, 2, 3, 4, or 5, or a polypeptide encoded by one or more of the polynucleotides indicated in Table 1, 2, 3, 4, or 5, or which are capable of modulating pain in an animal.

[0176] In addition, the invention is based on the discovery that a subset of genes described in Tables 1-5 are differentially expressed in two or more neuropathic pain models. This subset of genes is shown in Table 10. The invention also relates to a yet smaller subset of genes than that of Table 10, which, based on their known or putative function in biological systems are likely to modulate or transduce pain by changing the properties, excitability, structure and/or connectivity of neurons in sensory pain circuits.

[0177] As described above, animals which have been subjected to pain include animal models of pain, in which the animal has been artificially manipulated to mimic one or more types of pain, including physiological, inflammatory, or neuropathic pain. Animals subjected to pain also include animals which have experienced pain as the result of a traumatic injury, or animals which have experienced physiological, inflammatory, or neuropathic pain not induced in the setting of an animal model.

Pain

[0178] The present invention relates to polynucleotides which are differentially expressed in (a) an animal that is subjected to pain relative to (b) an animal not subjected to pain. According to the invention, the pain to which the animals of (a) and (b) are subjected is the same pain, that is, if a polynucleotide is differentially expressed in an axotomy pain model then the differential expression is relative to the expression of the polynucleotide in an animal which is not an axotomy pain model.

[0179] As used herein, “pain” refers to a state-dependent sensory experience generated by the activation of peripheral sensory neurons, the nociceptors. As used herein, “pain” refers to several different types of pain, including physiological or protective pain, inflammatory pain that occurs after tissue damage, and neuropathic pain which occurs after damage to the nervous system. Physiological pain is initiated by sensory nociceptor fibers innervating the peripheral tissues and activated only by noxious stimuli, and is characterized by a high threshold to mechanical and thermal stimuli and rapid, transient responses to such stimuli. Inflammatory and neuropathic pain are characterized by displays of behavior indicating either spontaneous pain, measured by spontaneous flexion, vocalization, biting, or even self mutilation, or abnormal hypersensitivity to normally innocuous stimuli or to noxious stimuli, such as mechanical or thermal stimuli. Regardless of the type of pain, as used herein “pain” can be measured using behavioral criteria, such as thermal and mechanical sensitivity, weight bearing, visceral hypersensitivity, or spontaneous locomotor activity, electrophysiological criteria, such as in vivo or in vitro recordings from primary sensory neurons and central neurons to assess changes in receptive field properties, excitability or synaptic input, or neurochemical criteria, such as changes in the expression or distribution of neurotransmitters, neuropeptides and proteins in primary sensory and central neurons, activation of signal transduction cascades, expression of transcription factors, or phosphorylation of proteins.

[0180] Behavioral criteria used to measure “pain” include, but are not limited to mechanical allodynia and hyperalgesia, and temperature allodynia and hyperalgesia. Mechanical allodynia is generally measured using a series of ascending force von Frey monofilaments. The filaments are each assigned a force which must be applied longitudinally across the filament to produce a bend, or bow in the filament. Thus the applied force which causes an animal to withdraw a limb can be measured (Tal and Bennett, 1994 Pain 57: 375). An animal can be said to be experiencing “pain” if the animal demonstrates a withdrawal reflex in response to a force that is reduced by at least 30% compared to the force that elicits a withdrawal reflex in an animal which is not in “pain”. In one embodiment, an animal is said to be experiencing “pain” if the withdrawal reflex in response to a force that is reduced 40%, 50%, 60%, 70%, 80%, 90% and as much as 99% compared to the force required to elicit a similar reflex in a naïve animal.

[0181] Mechanical hypersensitivity can be measured by applying a sharp object, such as a pin, to the skin of an animal with a force sufficient to indent, but not penetrate the skin. The duration of withdrawal from the sharp stimulus may then be measured, wherein an increase in the duration of withdrawal is indicative of “pain” (Decostard et al., 1998 Pain 76: 159). For example, an animal can be said to be experiencing “pain” if the withdrawal duration following a sharp stimulus is increased by at least 2 fold compared with an animal that is not experiencing “pain”. In one embodiment, an animal is said to be experiencing “pain” if the withdrawal duration is increased by 3, 4, 5, 6, 7, 8, 9, and up to 10 fold compared to an animal not experiencing “pain”.

[0182] Temperature allodynia can be measured by placing a drop of acetone onto the skin surface of an animal using an instrument such as a blunt needle attached to a syringe without touching the skin with the needle. The rapid evaporation of the acetone cools the skin to which it is applied. The duration of the withdrawal response to the cold sensation can then be measured (Choi et al., 1994 Pain 59: 369). An animal can be said to be in “pain” if the withdrawal duration following acetone application is increased by at least 2 fold as compared to an animal that is not experiencing “pain”. According to the invention an animal can be said to be in “pain” if the withdrawal duration following thermal stimulation is increased by 4, 6, 8, 10, 12, 14, 16, 18, and up to 20 fold compared to an animal not experiencing “pain”.

[0183] Temperature hyperalgesia can be measured by exposing a portion of the skin surface of an animal, such as the plantar surface of the foot, to a beam of radiant heat through a transparent perspex surface (Hargreaves et al., 1988 Pain 32:77). The duration of withdrawal from the heat stimulus may be measured, wherein an increase in the duration of withdrawal is indicative of “pain”. An animal can be said to be experiencing “pain” if the duration of the withdrawal from the heat stimulus increases by at least 2 fold compared with an animal that is not experiencing “pain”. In addition, an animal can be said to be experiencing “pain” if the duration of the withdrawal from heat stimulus is increased by 3, 4, 5, 6, 7, 8, 9, and up to 10 fold compared with an animal that is not experiencing “pain”.

[0184] In addition to the behavioral criteria described above, an animal can be deemed to be experiencing “pain” by measuring electrophysiological changes, in vitro or in vivo, in primary sensory, or central sensory neurons. Electrophysiological changes can include increased neuronal excitability, changes in receptive field input, or increased synaptic input. The technique of measuring cellular physiology is well known to those of skill in the art (see, for example, Hille, 1992 Ion channels of excitable membranes. Sinauer Associates, Inc., Sunderland, Mass.). An increase in neuronal excitability may be identified, for example, by measuring an increase in the number of action potentials per unit time in a given neuron. An animal is said to be experiencing “pain” if there is at least a 2 fold increase in the action potential firing rate compared with an animal that is not experiencing “pain.” In addition, and animal can be said to be experiencing “pain” if the action potential firing rate is increased by, 3, 4, 5, 6, 7, 8, and up to 10 fold compared to an animal that is not experiencing “pain”. An increase in synaptic input to a sensory neuron, either peripheral or central, may be identified, for example, by measuring the rate of end-plate excitatory potentials (EPSPS) recorded in from the neuron. An animal is said to be experiencing “pain” if there is at least a 2 fold, 3, 4, 5, 6, 7, 8, and up to 10 fold increase in the rate of EPSPs recorded from a given neuron compared to an animal that is not experiencing pain.

[0185] Alternatively, neurochemical criteria may be used to determine whether or not an animal is experiencing “pain”. For example, an animal which has experienced “pain” will display changes in the expression or distribution of neurotransmitters, neuropeptides and protein in primary sensory and central neurons, activation of signal transduction cascades, expression of transcription factors, or phosphorylation of proteins. Gene and protein expression, and phosphorylation of proteins such as transcription factors may be measured using a number of techniques known to those of skill in the art including but not limited to PCR, Southern analysis, Northern analysis, Western analysis, immunohistochemistry, and the like. Examples of signal transduction pathway constituents which may be activated in an animal which is experiencing pain include, but are not limited to ERK, p38, and CREB. Examples of genes which may exhibit enhanced expression include immediate early genes such as c-fos, protein kinases such as PKC and PKA. Examples of other proteins which may be phosphorylated in an animal experiencing pain include receptors and ion channels such as the NMDA or AMPA receptors. Regardless of whether the measure is of transcription, translation or phosphorylation an animal can be said to be experiencing “pain” if one measures at least a 2 fold increase or decrease in any of these parameters compared to an animal not experiencing pain. An animal can be further said to be experiencing “pain” if there is a 3, 4, 5, 6, 7, 8, and up to 10 fold increase in the measurement of any of the above parameters compared to an animal not experiencing “pain”.

[0186] As used herein, “pain” refers to any of the behavioral, electrophysiological, or neurochemical criteria described above. In addition, “pain” can be assessed using combinations of these criteria.

[0187] As used herein, “pain” can refer to “pain” experienced by an animal as a result of accidental trauma (e.g., falling trauma, burn trauma, toxic trauma, etc.), congenital deformity or malformation, infection (e.g., inflammatory pain), or other conditions which are not within the control of the animal experiencing the “pain”. Alternatively, “pain” may be inflicted onto an animal by subjecting the animal to one or more “pain models”.

[0188] The present invention comprises polynucleotide sequences that are differentially expressed in nerve injury pain models, including axotomy, SNI, chronic constriction, and segmental nerve lesion, as well as inflammation pain models. It is also within the scope of the present invention that the polynucleotides described herein as being differentially expressed in nerve injury, or neuropathic pain models may be also differentially expressed in other pain models known to those of skill in the art.

[0189] As used herein, a “pain model” refers to any manipulation of an animal during which the animal experiences “pain”, as defined above. “Pain models” can be classified as those that test the sensitivity of normal animals to intense or noxious stimuli. These tests include responses to thermal, mechanical, or chemical stimuli. Thermal stimuli is usually hot (42 to 55° C.) and includes radiant heat to the tail (the tail flick test) radiant heat to the plantar surface of the hindpaw (the Hargreaves test, supra), the hotplate test, and immersion of the hindpaw or tail in hot water. Alternatively, thermal stimuli can be cold stimulus (30° to −10° C.), such as immersion in cold water, acetone evaporation or cold plate tests which may be used to test cold pain responsiveness using the thresholds discussed above. The end points are latency to response and the duration of the response as well as vocalization and licking the paw, as described above. Mechanical Stimuli typically involves measurements of the threshold for eliciting a withdrawal reflex of the hindpaw to graded strength monofilament von Frey hairs wherein one can measure the force of the filament required to elicit a reflex. Alternatively, mechanical stimuli can be a sustained pressure stimulus to a paw (e.g., the Ugo Basila analgesiometer). The duration of response to a standard pin prick can also be measured. Threshold values for identifying a stimulus that causes “pain” to the animal are described above. Chemical Stimuli typically involves the application or injection of a chemical irritant to the skin, muscle joints or internal organs like the bladder or peritoneum. Irritants can include capsaicin, mustard oil, bradykinin, ATP, formalin, or acetic acid. The outcome measures include vocalization, licking the paw, writhing or spontaneous flexion.

[0190] Alternatively, a “pain model” can be a test that measures changes in the excitability of the peripheral or central components of the pain neural pathway pain sensitization, termed “peripheral sensitization” and “central sensitization”. “Peripheral Sensitization” involves changes in the threshold and responsiveness of high threshold nociceptors which can be induced by: repeated heat stimuli, or application or injection of sensitizing chemicals (e.g. prostaglandins, bradykinin, histamine, serotonin, capsaicin, mustard oil). The outcome measures are thermal and mechanical sensitivity in the area of application/stimulation using the techniques described above in behaving animals or electrophysiological measurements of single sensory fiber receptive field properties either in vivo or using isolated skin nerve preparations. “Central sensitization” involves changes in the excitability of neurons in the central nervous system induced by activity in peripheral pain fibers. “Central sensitization” can be induced by noxious stimuli (e.g., heat) chemical irritants (e.g., injection/application of capsaicin/mustard oil or formalin or electrical activation of sensory fibers). The outcome measures are: behavioral, electrophysiological, and neurochemical.

[0191] Alternatively, a “pain model” can refer to those tests that measure the effect of peripheral inflammation on pain sensitivity. The inflammation can be produced by injection of an irritant such as complete Freunds adjuvant, carrageenan, turpentine, croton oil etc into the skin, subcutaneously, into a muscle into a joint or into a visceral organ. Production of a controlled UV light burn and ischaemia can also be used. Administration of cytokines or inflammatory mediators such as lipopolysaccharide (LPS), or nerve growth factor (NGF) can mimic the effects of inflammation. The outcome of these models may also be measured as behavioral, electrophysiological, and/or neurochemical changes.

[0192] Further, a “pain model” includes those tests that mimic peripheral neuropathic pain using lesions of the peripheral nervous system. Examples of such lesions include, but are not limited to complete transection of a peripheral nerve (axotomy; Watson, 1973, J. Physiol. 231:41), liagation of a spinal segmental nerve (CHUNG model; Kim and Chung, 1992, Pain, 50:355-63), partial nerve injury (Seltzer, 1979, Pain, 29: 1061), Spared Nerve Injury model (Decosterd and Woolf, 2000, Pain 87:149), chronic constriction injury (Bennett, 1993 Muscle Nerve 16: 1040), toxic neuropathies, such as diabetes (streptozocin model), pyridoxine neuropathy, taxol, vincristine and other antineoplastic agent-induced neuropathies, ischaemia to a nerve, peripheral neuritis models (e.g., CFA applied perineurally), models of postherpetic neuralgia using HSV infection. Such neuropathic pain models are also referred to herein as a “nerve injury pain model”. The outcome of these neuropathic or nerve injury “pain models” can be measured using behavioral, electrophysiological, and/or neurochemical criteria as described above.

[0193] In addition, a “pain model” refers to those tests that mimic central neuropathic pain using lesions of the central nervous system. For example, central neuropathic pain may be modeled by mechanical compressive, ischemic, infective, or chemical injury to the spinal cord of an animal. The outcome of such a model is measured using the behavioral, electrophysiological, and/or neurochemical criteria described above.

Identification of Nucleic Acid Sequences Differentially Expressed in Pain

[0194] In one embodiment, the present invention provides isolated nucleic acid sequences which are differentially regulated in an animal which has been subjected to neuropathic pain relative to an animal not subjected to neuropathic pain, and a method for identifying such sequences. The present invention provides a method for identifying a nucleotide sequence which is differentially regulated in an animal subjected to pain, comprising: hybridizing a nucleic acid sample corresponding to RNA obtained from the animal to a nucleic acid sample comprising one or more nucleic acid molecules of known identity; and measuring the hybridization of the nucleic acid sample to the one or more nucleic acid molecules of known identity, wherein a 1.4 fold difference in the hybridization of the nucleic acid sample to the one or more nucleic acid molecules of known identity relative to a nucleic acid sample obtained from an animal which has not been subjected to the same pain is indicative of the differential expression of the nucleotide sequence in an animal subjected to pain. Alternatively, the invention provides a method for identifying a nucleotide sequence which is differentially regulated in an animal subjected to pain, comprising: hybridizing at least three replicates of a nucleic acid sample corresponding to RNA obtained from the animal to at least three replicates of a nucleic acid sample comprising one or more nucleic acid molecules of known identity and measuring the hybridization of the nucleic acid sample to the one or more nucleic acid molecules of known identity for each of said replicates. A 1.2 fold difference in the hybridization, and a p-value of less than 0.05 across the replicates, of the nucleic acid sample to the one or more nucleic acid molecules of known identity relative to a nucleic acid sample obtained from an animal which has not been subjected to pain is indicative of the differential expression of the nucleotide sequence in the animal subjected to pain

[0195] Generally, the present invention provides a method for identifying nucleic acid sequences which are differentially regulated in an animal which has been subjected to pain comprising isolating messenger RNA from an animal, generating cRNA from the mRNA sample, hybridizing the cRNA to a microarray comprising a plurality of nucleic acid molecules stably associated with discrete locations on the array, and identifying patterns of hybridization of the cRNA to the array. According to the present invention, a nucleic acid molecule which hybridizes to a given location on the array is said to be differentially regulated if the hybridization signal is at least 1.4 fold higher or lower than the hybridization signal at the same location on an identical array hybridized with a nucleic acid sample obtained from an animal that has not been subjected to pain. Alternatively, at least three independent replicate RNA samples are generated and hybridized to at least three replicate arrays, such that statistical significance may be conferred to the fold change in expression of a sequence in an animal subjected to pain relative to an animal not subjected to pain, wherein a 1.2 fold change in expression and a p-value of less than 0.05 is indicative of differential expression.

[0196] Nucleic Acid Samples

[0197] Nucleic acid samples to be examined for differentially regulated sequences may be obtained from animals using techniques that are well described in the art. In a preferred embodiment of the invention, the animal from which the nucleic acid is obtained is a pain model. In one embodiment, an animal pain model is an experimental model which tests the sensitivity of normal animals to intense or noxious stimuli. These tests include responses to thermal, mechanical, or chemical stimuli. Thermal stimuli is usually hot (42 to 55° C.) and includes radiant heat to the tail (the tail flick test) radiant heat to the plantar surface of the hindpaw (the Hargreaves test, supra), the hotplate test, and immersion of the hindpaw or tail in hot water. Alternatively, thermal stimuli can be cold stimulus (30° to −10° C.), such as immersion in cold water, acetone evaporation or cold plate tests which may be used to test cold pain responsiveness using the thresholds discussed above. The end points are latency to response and the duration of the response as well as vocalization and licking the paw, as described above. Mechanical stimuli typically involves measurements of the threshold for eliciting a withdrawal reflex of the hindpaw to graded strength monofilament von Frey hairs wherein one can measure the force of the filament required to elicit a reflex. Alternatively, mechanical stimuli can be a sustained pressure stimulus to a paw (e.g., the Ugo Basila analgesiometer). The duration of response to a standard pin prick can also be measured. Threshold values for identifying a stimulus that causes “pain” to the animal are described above. Chemical Stimuli typically involves the application or injection of a chemical irritant to the skin, muscle joints or internal organs like the bladder or peritoneum. Irritants can include capsaicin, mustard oil, bradykinin, ATP, formalin, or acetic acid. The outcome measures include vocalization, licking the paw, writhing or spontaneous flexion. In an alternate embodiment, the animal pain model is designed to measure changes in the excitability of the peripheral or central components of the pain neural pathway pain sensitization, termed peripheral sensitization and central sensitization. Peripheral Sensitization involves changes in the threshold and responsiveness of high threshold nociceptors which can be induced by: repeated heat stimuli, or application or injection of sensitizing chemicals (e.g. prostaglandins, bradykinin, histamine, serotonin, capsaicin, mustard oil). The outcome measures are thermal and mechanical sensitivity in the area of application/stimulation using the techniques described above in behaving animals or electrophysiological measurements of single sensory fiber receptive field properties either in vivo or using isolated skin nerve preparations. Central sensitization involves changes in the excitability of neurons in the central nervous system induced by activity in peripheral pain fibers. Central sensitization can be induced by noxious stimuli (e.g., heat) chemical irritants (e.g., injection/application of capsaicin/mustard oil or formalin or electrical activation of sensory fibers). The outcome measures are: behavioral, electrophysiological, and neurochemical. In a further embodiment, the animal pain model is an experimental model that measures the effect of peripheral inflammation on pain sensitivity. The inflammation can be produced by injection of an irritant such as complete Freunds adjuvant, carrageenan, turpentine, croton oil etc into the skin, subcutaneously, into a muscle into a joint or into a visceral organ using doses and administration techniques that are well known in the art. Production of a controlled UV light burn and ischaemia can also be used. Administration of cytokines or inflammatory mediators such as lipopolysaccharide (LPS), or nerve growth factor (NGF) can mimic the effects of inflammation. The outcome of these models may also be measured as behavioral, electrophysiological, and/or neurochemical changes.

[0198] In a preferred embodiment, the animal pain model is a model that mimic peripheral neuropathic pain using lesions of the peripheral nervous system (i.e., a nerve injury model). Examples of such lesions include, but are not limited to complete transection of a peripheral nerve (axotomy; Watson, 1973, J. Physiol. 231:41), liagation of a spinal segmental nerve (Kim and Chung, 1992, Pain, 50:355-63), partial nerve injury (Seltzer, 1979, Pain, 29: 1061), Spared Nerve Injury model (Decosterd and Woolf, 2000, Pain 87:149), chronic constriction injury (Bennett, 1993 Muscle Nerve 16: 1040), toxic neuropathies, such as diabetes (streptozocin model), pyridoxine neuropathy, taxol, vincristine and other antineoplastic agent-induced neuropathies, ischaemia to a nerve, peripheral neuritis models (e.g., CFA applied perineurally), models of postherpetic neuralgia using HSV infection. The outcome of these neuropathic pain models can be measured using behavioral, electrophysiological, and/or neurochemical criteria as described above. Alternatively, the neuropathic animal pain model may be one which mimics central neuropathic pain using lesions of the central nervous system. For example, central neuropathic pain may be modeled by mechanical compressive, ischemic, infective, or chemical injury to the spinal cord of an animal. The outcome of such a model is measured using the behavioral, electrophysiological, and/or neurochemical criteria described above.

[0199] In a further preferred embodiment, the animal pain model is a model which mimics inflammation using injectable irritants and/or inflammatory mediators. Examples of such models include animals which are injected with, for example complete Freunds adjuvant (CFA), carrageenan, turpentine, croton oil, cytokines, lippopolysoccharide (LPS), or nerve growth factor (NGF) (Stein et al., 1988 Pharmacol Biochem Behav 31:445; Woolf et al., 1994, Neuroscience, 62: 327). The outcome of inflammation pain model can be measured using behavioral, electrophysiological, and/or neurochemical criteria as described above.

[0200] Alternatively, nucleic acid samples may be obtained from animals which are not pain models, but which have been subjected to pain as a result of traumatic injury, infection, genetic, or congenital birth defects, and the like. In addition, nucleic acid samples may be obtained from an animal which is not a pain model, and which has not been subjected to pain as a result of a traumatic injury, or infection. Such an animal is termed a “naïve” animal, and the expression of nucleic acid sequences in the naïve animal can be compared to the expression of the same nucleic acid molecules in animals subjected to pain to determine differential expression.

[0201] Nucleic acid samples, useful in the present invention for determining differential expression of nucleic acid sequences in an animal subjected to pain may be obtained from any cell of the animal. In a preferred embodiment, the nucleic acid is obtained from one or more sensory neurons of the animal. In a further preferred embodiment the nucleic acid is obtained from the primary sensory neurons of the dorsal root ganglion or dorsal horn of the spinal cord. However, nucleic acid may be obtained from other neurons including, but not limited to cranial nerve nuclei, peripheral and/or central autonomic neurons, enteric neurons, thalamic neurons, and neurons of sensory regions of the cortex such as primary sensory cortex.

[0202] Sensory neurons may be obtained from an animal using techniques that are well established in the art. For example, in embodiments where nucleic acid samples are to be obtained from rat dorsal root ganglion (DRG) neurons, rats (whether naïve or pain models) are rapidly killed by decapitation and the DRG is dissected, removed and quickly snap-frozen on a bed of crushed dry ice, or in liquid nitrogen. RNA is then extracted from the tissues, also using techniques that are well known in the art (see, for example, Ausubel supra). For example, the tissue is prepared by homogenization in a glass teflon homogenizer in 1 ml denaturing solution (4M guanidinium thiosulfate, 25 mM sodium citrate, pH 7.0, 0.1M 2-ME, 0.5% (w/v) N-laurylsarkosine) per 100 mg tissue. Following transfer of the homogenate to a 5-ml polypropylene tube, 0.1 ml of 2 M sodium acetate, pH 4, 1 ml water-saturated phenol, and 0.2 ml of 49:1 chloroform/isoamyl alcohol are added sequentially. The sample is mixed after the addition of each component, and incubated for 15 min at 0-4° C. after all components have been added. The sample is separated by centrifugation for 20 min at 10,000×g, 4° C., precipitated by the addition of 1 ml of 100% isopropanol, incubated for 30 minutes at −20° C. and pelleted by centrifugation for 10 minutes at 10,000×g, 4° C. The resulting RNA pellet is dissolved in 0.3 ml denaturing solution, transferred to a microfuge tube, precipitated by the addition of 0.3 ml of 100% isopropanol for 30 minutes at −20° C., and centrifuged for 10 minutes at 10,000×g at 4° C. The RNA pellet is washed in 70% ethanol, dried, and resuspended in 100-200 μl DEPC-treated water or DEPC-treated 0.5% SDS (Chomczynski and Sacchi, 1987, Anal. Biochem., 162: 156).

[0203] Alternatively, total RNA may be extracted from tissues useful in the present invention using Trizol reagent (Invitrogen, Carlsbad, Calif.), following the manufacturers instructions. Purity and integrity of RNA is assessed by absorbance at 260/280 nm and separation of RNA samples on a 1% agarose gel followed by inspection under ultraviolet light.

[0204] Following total RNA isolation from tissues or cell of an animal useful in the present invention, the RNA is converted to cRNA for use in array hybridization. The preparation of cRNA is well-known and well-documented in the prior art.

[0205] In an alternate embodiment, the total RNA is converted to cDNA for use in array hybridization. cDNA may be prepared according to the following method. Total cellular RNA is isolated (as described) and passed through a column of oligo(dT)-cellulose to isolate polyA RNA. The bound polyA mRNAs are eluted from the column with a low ionic strength buffer. To produce cDNA molecules, short deoxythymidine oligonucleotides (12-20 nucleotides) are hybridized to the polyA tails to be used as primers for reverse transcriptase, an enzyme that uses RNA as a template for DNA synthesis. Alternatively, mRNA species are primed from many positions by using short oligonucleotide fragments comprising numerous sequences complementary to the mRNA of interest as primers for cDNA synthesis. The resultant RNA-DNA hybrid is converted to a double stranded DNA molecule by a variety of enzymatic steps well-known in the art (Watson et al., 1992, Recombinant DNA, 2nd edition, Scientific American Books, New York).

[0206] Microarray Analysis

[0207] In one embodiment, the present invention provides a method for the identification of differentially expresses nucleic acid sequences in pain in which cDNA obtained from sensory neurons of animals subjected to pain is hybridized to a polynucleotide microarray of known genes or ESTs and the hybridization levels of the cDNA to the polynucleotide microarray are measured.

[0208] Microarrays, useful in the identification of differentially expressed nucleic acid sequences, may be any microarray known in the art which comprises known sequences. A polynucleotide microarray refers to a plurality of unique nucleic acids attached to one surface of a solid support at a density exceeding 20 different nucleic acids/cm² wherein each of the nucleic acids is attached to the surface of the solid support in a non-identical preselected region. In one embodiment, the nucleic acid attached to the surface of the solid support is DNA. In a preferred embodiment, the nucleic acid attached to the surface of the solid support is cDNA. In another preferred embodiment, the nucleic acid attached to the surface of the solid support is cDNA synthesized by polymerase chain reaction (PCR). Preferably, a nucleic acid comprising an array, according to the invention, is at least 20 nucleotides in length. Preferably, a nucleic acid comprising an array is less than 6,000 nucleotides in length. More preferably, a nucleic acid comprising an array is less than 500 nucleotides in length. In one embodiment, the array comprises at least 500 different nucleic acids attached to one surface of the solid support. In another embodiment, the array comprises at least 10 different nucleic acids attached to one surface of the solid support. In yet another embodiment, the array comprises at least 10,000 different nucleic acids attached to one surface of the solid support.

[0209] In a preferred embodiment, the microarray comprises known nucleic acid molecules stably associated with discrete predefined regions, and which are obtained from an animal of the same species as the animal which had been subjected to pain and from which the nucleic acid sample to be tested is obtained. In a preferred embodiment, the microarray is a commercially available microarray which may be obtained from a commercial source such as Affymetrix (Santa Clara, Calif.). For example, in one embodiment nucleic acid samples are obtained from a rat pain model and are hybridized to a polynucleotide microarray comprising known rat gene sequences and ESTs. In a further preferred embodiment, the microarray is an Affymetrix Gene Chip® array including, but not limited to the human U95 array, the murine U74 array, and the rat U34 array.

[0210] In one embodiment three independent replicate nucleic acid samples are prepared from three separate pain model animals (for tissues with a low abundance of nerve cells, such as the DRG, samples from several animals may be pooled to generate a single replicate) are hybridized to at least three replicate polynucleotide arrays, such that a statistical analysis may be performed on the resulting hybridization levels.

[0211] Sample Preparation

[0212] Prior to hybridization of nucleic acid to the polynucleotide microarray, the nucleic acid samples must be prepared to facilitate subsequent detection of hybridization. The nucleic acid samples obtained from animals that have been subjected to pain (and from naïve animals for the determination of differential expression) are referred to as “probes” for the microarray and are capable of binding to a polynucleotide or nucleic acid member of complementary sequence through one or more types of chemical bonds, usually through complementary base pairing, usually through hydrogen bond formation.

[0213] As used herein, a polynucleotide derived from an mRNA transcript refers to a polynucleotide for which synthesis of the mRNA transcript or a subsequence thereof has ultimately served as a template. Thus, a cDNA reverse transcribed from an mRNA, an RNA transcribed from that cDNA, a DNA amplified from the cDNA, an RNA transcribed from the amplified DNA, etc., are all derived from the mRNA transcript and detection of such derived products is indicative of the presence and/or abundance of the original transcript in a sample. Thus, suitable target nucleic acid samples include, but are not limited to, mRNA transcripts of a gene or genes, cDNA reverse transcribed from the mRNA, cRNA transcribed from the cDNA, DNA amplified from a gene or genes, RNA transcribed from amplified DNA, and the like. The polynucleotide probes used herein are preferably derived from sensory neurons of an animal that has been subjected to pain.

[0214] In the simplest embodiment, such a polynucleotide probe comprises total mRNA or a nucleic acid sample corresponding to mRNA (e.g., cDNA) isolated from sensory neurons, ganglia, nuclei, or brain tissue. In another embodiment, the total mRNA is isolated from a given sample using, for example, an acid guanidinium-phenol-chloroform extraction method and polyA+ mRNA is isolated by oligo dT column chromatography or by using (dT)n magnetic beads (see, e.g., Sambrook et al., Molecular Cloning: A Laboratory Manual (2nd ed.), Vols. 1-3, Cold Spring Harbor Laboratory, (1989), or Current Protocols in Molecular Biology, F. Ausubel et al., ed. Greene Publishing and Wiley-Interscience, New York (1987). In a preferred embodiment, total RNA is extracted using TRIzol reagent (GIBCO/BRL). Purity and integrity of RNA is assessed by absorbance at 260/280 nm and agarose gel electrophoresis followed by inspection under ultraviolet light.

[0215] In some embodiments, it is desirable to amplify the probe nucleic acid sample prior to hybridization, for example, when total RNA is obtained from a small population of neurons. One of skill in the art will appreciate that whatever amplification method is used, if a quantitative result is desired, care must be taken to use a method that maintains or controls for the relative frequencies of the amplified polynucleotides. Methods of “quantitative” amplification are well known to those of skill in the art. For example, quantitative PCR involves simultaneously co-amplifying a known quantity of a control sequence using the same primers. This provides an internal standard that may be used to calibrate the PCR reaction. The high density array may then include probes specific to the internal standard for quantification of the amplified polynucleotide. Detailed protocols for quantitative PCR are provided in PCR Protocols, A Guide to Methods and Applications, innis et al., Academic Press, Inc. N.Y., (1990).

[0216] Other suitable amplification methods include, but are not limited to polymerase chain reaction (PCR) (Innis, et al., PCR Protocols. A guide to Methods and Application. Academic Press, Inc. San Diego, (1990)), ligase chain reaction (LCR) (see Wu and Wallace, Genomics, 4: 560 (1989), Landegren, et al., Science, 241: 1077 (1988) and Barringer, et al., Gene, 89: 117 (1990), transcription amplification (Kwoh, et al., Proc. Natl. Acad. Sci. USA, 86: 1173 (1989)), and self-sustained sequence replication (Guatelli, et al., Proc. Nat. Acad. Sci. USA, 87: 1874 (1990)).

[0217] In a particularly preferred embodiment, the probe nucleic acid sample mRNA is reverse transcribed with a reverse transcriptase and a primer consisting of oligo dT and a sequence encoding the phage T7 promoter to provide single stranded DNA template. The second DNA strand is polymerized using a DNA polymerase. After synthesis of double-stranded cDNA, T7 RNA polymerase is added and RNA is transcribed from the cDNA template. Successive rounds of transcription from each single cDNA template results in amplified RNA. Methods of in vitro polymerization are well known to those of skill in the art (see, e.g., Sambrook, supra.) and this particular method is described in detail by Van Gelder, et al., Proc. Natl. Acad. Sci. USA, 87: 1663-1667 (1990) who demonstrate that in vitro amplification according to this method preserves the relative frequencies of the various RNA transcripts. Moreover, Eberwine et al. Proc. Natl. Acad. Sci. USA, 89: 3010-3014 provide a protocol that uses two rounds of amplification via in vitro transcription to achieve greater than 106 fold amplification of the original starting material thereby permitting expression monitoring even where biological samples are limited.

[0218] In order to measure the hybridization of a probe nucleic acid to a polynucleotide array to determine differential expression, the probe nucleic acid is preferable labeled with a detectable label. Any analytically detectable marker that is attached to or incorporated into a molecule may be used in the invention. An analytically detectable marker refers to any molecule, moiety or atom which is analytically detected and quantified.

[0219] Detectable labels suitable for use in the present invention include any composition detectable by spectroscopic, photochemical, biochemical, immunochemical, electrical, optical or chemical means. Useful labels in the present invention include biotin for staining with labeled streptavidin conjugate, magnetic beads (e.g., Dynabeads™), fluorescent dyes (e.g., fluorescein, texas red, rhodamine, green fluorescent protein, and the like), radiolabels (e.g., ³H, ¹²⁵I, 35S, ¹⁴C, or ³²P), enzymes (e.g., horse radish peroxidase, alkaline phosphatase and others commonly used in an ELISA), and calorimetric labels such as colloidal gold or colored glass or plastic (e.g., polystyrene, polypropylene, latex, etc.) beads. Patents teaching the use of such labels include U.S. Pat. Nos. 3,817,837; 3,850,752; 3,939,350; 3,996,345; 4,277,437; 4,275,149; and 4,366,241.

[0220] Means of detecting such labels are well known to those of skill in the art. Thus, for example, radiolabels may be detected using photographic film or scintillation counters, fluorescent markers may be detected using a photodetector to detect emitted light. Enzymatic labels are typically detected by providing the enzyme with a substrate and detecting the reaction product produced by the action of the enzyme on the substrate, and calorimetric labels are detected by simply visualizing the colored label.

[0221] The labels may be incorporated by any of a number of means well known to those of skill in the art. However, in a preferred embodiment, the label is simultaneously incorporated into the probe during the amplification step in the preparation of the probe polynucleotides. Thus, for example, polymerase chain reaction (PCR) with labeled primers or labeled nucleotides will provide a labeled amplification product. In a preferred embodiment, transcription amplification, as described above, using a labeled nucleotide (e.g. fluorescein-labeled UTP and/or CTP) incorporates a label into the transcribed polynucleotides.

[0222] Alternatively, a label may be added directly to the original polynucleotide sample (e.g., mRNA, polyA mRNA, cDNA, etc.) or to the amplification product after the amplification is completed. Means of attaching labels to polynucleotides are well known to those of skill in the art and include, for example nick translation or end-labeling (e.g. with a labeled RNA) and subsequent attachment (ligation) of a polynucleotide linker joining the sample polynucleotide to a label (e.g., a fluorophore).

[0223] In a preferred embodiment, the fluorescent modifications are by cyanine dyes e.g. Cy-3/Cy-5 dUTP, Cy-3/Cy-5 dCTP (Amersham Pharmacia) or alexa dyes (Khan, J., Simon, R., Bittner, M., Chen, Y., Leighton, S. B., Pohida, T., Smith, P. D., Jiang, Y., Gooden, G. C., Trent, J. M. & Meltzer, P. S. (1998) Cancer Res. 58, 50095013.).

[0224] In a preferred embodiment, a probe nucleic acid obtained from an animal that has been subjected to pain and a nucleic acid sample obtained from an animal not subjected to pain are co-hybridized to the polynucleotide array. In this embodiment, the two probe samples used for comparison are labeled with different fluorescent dyes which produce distinguishable detection signals, for example, probes made from an animal pain model are labeled with Cy5 and probes made from a naïve animal are labeled with Cy3. The differently labeled target samples are hybridized to the same microarray simultaneously. In a preferred embodiment, the labeled targets are purified using methods known in the art, e.g., ethanol purification or column purification.

[0225] In a preferred embodiment, the probes will include one or more control molecules which hybridize to control sequences on the microarray to normalize signals generated from the microarray. Labeled normalization targets are polynucleotide sequences that are perfectly complementary to control oligonucleotides that are spotted onto the microarray. The signals obtained from the normalization controls after hybridization provide a control for variations in hybridization conditions, label intensity, “reading” efficiency and other factors that may cause the signal of a perfect hybridization to vary between arrays. In a preferred embodiment, signals (e.g., fluorescence intensity) read from all other probes in the array are divided by the signal (e.g., fluorescence intensity) from the control probes thereby normalizing the measurements.

[0226] Preferred normalization probes are selected to reflect the average length of the other probes present in the sample, however, they are selected to cover a range of lengths. The normalization control(s) can also be selected to reflect the (average) base composition of the other probes in the array, however in a preferred embodiment, only one or a few normalization probes are used and they are selected such that they hybridize well (i.e. no secondary structure) and do not match any other probe molecules.

[0227] Hybridization to Polynucleotide Arrays

[0228] To determine the differential expression of a nucleic acid sequence in an animal subjected to pain, labeled probe nucleic acids are hybridized to a polynucleotide array comprising polynucleotides of known sequence or identity. Polynucleotide hybridization involves providing a denatured probe and target polynucleotide under conditions where the probe nucleic acid member and its complementary target can form stable hybrid duplexes through complementary base pairing. The polynucleotides that do not form hybrid duplexes are then washed away leaving the hybridized polynucleotides to be detected, typically through detection of an attached detectable label. It is generally recognized that polynucleotides are denatured by increasing the temperature or decreasing the salt concentration of the buffer containing the polynucleotides. Under low stringency conditions (e.g., low temperature and/or high salt) hybrid duplexes (e.g., DNA:DNA, RNA:RNA, or RNA:DNA) will form even where the annealed sequences are not perfectly complementary. Thus specificity of hybridization is reduced at lower stringency. Conversely, at higher stringency (e.g., higher temperature or lower salt) successful hybridization requires fewer mismatches.

[0229] The invention provides for hybridization conditions comprising the Dig (digoxygenin) hybridization mix (Boehringer); or formamide-based hybridization solutions, for example as described in Ausubel et al., supra and Sambrook et al. supra.

[0230] Alternatively, as described above, a preferred embodiment of the present invention comprises hybridizing probe nucleic acid molecules to an Affymetrix Gene Chip®. In this embodiment, hybridization of the probe nucleic acid molecules to the polynucleotide array is carried out according to the manufacturers instructions.

[0231] Methods of optimizing hybridization conditions are well known to those of skill in the art (see, e.g., Laboratory Techniques in Biochemistry and Molecular Biology, Vol. 24: Hybridization With Polynucleotide Probes, P. Tijssen, ed. Elsevier, N.Y., (1993)).

[0232] Following hybridization, non-hybridized labeled or unlabeled polynucleotide is removed from the support surface, conveniently by washing, thereby generating a pattern of hybridized probe polynucleotide on the substrate surface. A variety of wash solutions are known to those of skill in the art and may be used. The resultant hybridization patterns of labeled, hybridized oligonucleotides and/or polynucleotides may be visualized or detected in a variety of ways, with the particular manner of detection being chosen based on the particular label of the test polynucleotide, where representative detection means include scintillation counting, autoradiography, fluorescence measurement, calorimetric measurement, light emission measurement and the like. In the preferred embodiment, in which the probe nucleic acid is hybridized to an Affymetrix Gene Chip®, the hybridization pattern of the probe nucleic acid molecules is detected and measured according to the Affymetrix protocol, and using Affymetrix instrumentation.

[0233] Following hybridization and any washing step(s) and/or subsequent treatments, as described above, the resultant hybridization pattern is detected. In detecting or visualizing the hybridization pattern, the intensity or signal value of the label will be not only be detected but quantified, by which is meant that the signal from each spot of the hybridization will be measured and compared to a unit value corresponding to the signal emitted by a known number of end labeled target polynucleotides to obtain a count or absolute value of the copy number of each end-labeled target that is hybridized to a particular spot on the array in the hybridization pattern.

[0234] Expression Analysis

[0235] Methods for analyzing the data collected from hybridization to arrays are well known in the art. For example, where detection of hybridization involves a fluorescent label, data analysis can include the steps of determining fluorescent intensity as a function of substrate position from the data collected, removing outliers, i.e., data deviating from a predetermined statistical distribution, and calculating the relative binding affinity of the test polynucleotides from the remaining data. The resulting data is displayed as an image with the intensity in each region varying according to the binding affinity between associated oligonucleotides and/or polynucleotides and the test polynucleotides.

[0236] According to the present invention, there are three sets of measurements which may be used to determine differential expression of a polynucleotide obtained from an animal subjected to pain relative to an animal not subjected to pain. In one embodiment, differential expression may be determined by measuring the intensity ratio, as defined above, wherein a +/−1.4 fold change or greater in the intensity ratio is indicative of differential expression. In a preferred embodiment, differential expression may be determined by measuring the Affymetrix ratio using the software suite and manufacturers protocols, available from Affymetrix (Santa Clara, Calif.), wherein a change in expression of +/−1.4 fold or greater is indicative of differential expression.

[0237] In another preferred embodiment, differential expression of sequences can be established if they are differentially expressed by at least 1.2 fold, with a p-value of less than 0.05, in a statistical analysis of triplicate array data points using an appropriate statistical analysis, such as the student's t-test.

[0238] For example, Table 2 represents a composite of all those genes which were originally identified as differentially regulated by at least 1.4 fold in either SNI or axotomy pain models. Differential expression was subsequently evaluated in at least three replicate arrays using at least three replicate nucleic acid samples obtained from the animal nerve injury and inflammation pain models. From the replicate screening method, polynucletoide sequences can be identified as differentially expressed which have a lower fold change (i.e., lower than 1.4 fold) in expression in an animal subjected to pain, provided that a statistical analysis of the replicate data yields a p-value of less than 0.05. Tables 6 and 7 below show an example of an experimental replicate scheme which may be used to obtain the data shown in Table 2. The animal pain model is indicated in the column labeled “animal model”, and the elapsed time following the generation of the pain model (i.e., time post surgery) is indicated. Experiments can be performed on samples obtained from both dorsal horn (Table 6) and DRG (Table 7) tissues.

TABLE 6
Affimetrix microarray experiments

| Animal Model | Time Points | | | | # hybridization exp | Total # r. | |
|---|---|---|---|---|---|---|---|
| CCI DH | 3 d | 7 d | 21 d | 40 d | 4 × 3 | | 12 |
| Chung DH | 3 d | 7 d | 21 d | 40 d | 4 × 3 | | 12 |
| SNI DH | 3 d | 7 d | 21 d | 40 d | 4 × 3 | | 12 |
| Sham CCI = SNI DH | 3 d | 7 d | 21 d | none | 3 × 3 | | 9 |
| Sham Chung DH | 3 d | 7 d | 21 d | none | 3 × 3 | | 9 |
| Naïve DH | | | | | 1 × 3 | | 3 |
| | | | | | | Total | 57 |
| CFA injec. DH | 12 h | 24 h | 5 d | | 3 × 3 | | 9 |
| | | | | | | Total | 67 |

[0239] TABLE 7
Affimetrix microarray experiments

| | | | | | # hybridization |
|---|---|---|---|---|---|
| Animal Model | Time Points | | | | exp |
| CCI DRG L4 | 3 d | 7 d | 21 d | 40 d | 4 × 3 |
| Chung DRG L4 | 3 d | 7 d | 21 d | 40 d | 4 × 3 |
| SNI DRG L4 | 3 d | 7 d | 21 d | 40 d | 4 × 3 |
| CCI DRG L5 | 3 d | 7 d | 21 d | 40 d | 4 × 3 |
| Chung DRG L5 | 3 d | 7 d | 21 d | 40 d | 4 × 3 |
| SNI DRG L5 | 3 d | 7 d | 21 d | 40 d | 4 × 3 |
| Sham CCI = SNI L4 + L5 | 3 d | 7 d | 21 d | none | 3 × 3 |
| Sham Chung L4 + L5 | 3 d | 7 d | 21 d | none | 3 × 3 |
| Naïve L4 | | | | | 1 × 3 |
| Naïve L5 | | | | | 1 × 3 |
| CFA injec. DRG (L4 + L5 | 12 h | 24 h | 5 d | | 3 × 3 |
| pool) | | | | | |
| | | | | | Total 105 |

DH = dorsal horn of the spinal cord
DRG = dorsal root ganglion
CCI = chronic constriction of the sciatic nerve
Chung = ligation of the spinal nerves L5 and L6 (lombar region) distal to the correspondent dorsal root ganglions
SNI = spare nerve injury model (ligation and axotomy of the tibial and pereonal nerves)
CFA = injection in the paw of complete Freund's adijuvant (inflammatory pain model)

[0240] The nerve injury pain models represented are the Spinal segmental nerve injury (Chung), Chronic Constriction Injury (CCI) and Spared Nerve Injury (SNI) models at time points 3, 7, 21 and 40 days. The inflammatory model represented is intraplantar Complete Freund's Adjuvant (CFA) injection into the hind paw at 0.5, 1 and 5 days post injection. The tissue are lumbar DRGs and dorsal horn (i.e two tissues four models, 4 time points (3 for CFA)=30 different pain comparisons each in triplicate each compared against the appropriate control.

[0241] The following is an example of a detection protocol that may be used for the simultaneous analysis of two nucleic acid samples to be compared, wherein one sample is obtained from primary sensory neurons of an animal pain model and the other is obtained from primary sensory neurons of a naïve animal, and wherein each sample is labeled with a different fluorescent dye, such as Cy3 and Cy5. This type of protocol would produce an intensity ratio.

[0242] Each element of the microarray is scanned for the first fluorescent color. The intensity of the fluorescence at each array element is proportional to the expression level of that nucleic acid sequence in the sample.

[0243] The scanning operation is repeated for the second fluorescent label. The ratio of the two fluorescent intensities provides a highly accurate and quantitative measurement of the relative gene expression level in the two primary sensory neuron samples.

[0244] In a preferred embodiment, fluorescence intensities of the immobilized target nucleic acid sequences can be determined from images taken with a custom confocal microscope equipped with laser excitation sources and interference filters appropriate for the Cy3 and Cy5 fluorophores. Separate scans were taken for each fluorophore at a resolution of 225 μm² per pixel and 65,536 gray levels. Image segmentation to identify areas of hybridization, normalization of the intensities between the two fluorophore images, and calculation of the normalized mean fluorescent values at each target are as described (Khan, J., Simon, R., Bittner, M., Chen, Y., Leighton, S. B., Pohida, T., Smith, P. D., Jiang, Y., Gooden, G. C., Trent, J. M. & Meltzer, P. S. (1998) Cancer Res. 58, 50095013. Chen, Y., Dougherty, E. R. & Bittner, M. L. (1997) Biomed. Optics 2, 364374). Normalization between the images is used to adjust for the different efficiencies in labeling and detection with the two different fluorophores. This is achieved by equilibrating to a value of (1) the signal intensity ratio of a set of internal control genes spotted on the array.

[0245] Following detection or visualization, the hybridization pattern is used to determine quantitative information about the genetic profile of the labeled probe polynucleotide sample that was contacted with the array to generate the hybridization pattern, as well as the physiological source from which the labeled probe polynucleotide sample was derived. By genetic profile is meant information regarding the types of polynucleotides present in the sample, e.g. in terms of the types of genes to which they are complementary, as well as the copy number of each particular polynucleotide in the sample. From this data, one can also derive information about the physiological source from which the target polynucleotide sample was derived, such as the types of genes expressed in the tissue or cell which is the physiological source, as well as the levels of expression of each gene, particularly in quantitative terms.

[0246] In a particularly preferred embodiment, where it is desired to quantify the transcription level (and thereby expression) of one or more polynucleotide sequences in a sample, the probe nucleic acid sample is one in which the concentration of the mRNA transcript(s) of the gene or genes, or the concentration of the polynucleotides derived from the mRNA transcript(s), is proportional to the transcription level (and therefore expression level) of that gene. Similarly, it is preferred that the hybridization signal intensity be proportional to the amount of hybridized polynucleotide. While it is preferred that the proportionality be relatively strict (e.g., a doubling in transcription rate results in a doubling in mRNA transcript in the sample polynucleotide pool and a doubling in hybridization signal), one of skill will appreciate that the proportionality is more relaxed and even non-linear. Thus, for example, an assay where a 5 fold difference in concentration of the probe mRNA results in a 3 to 6 fold difference in hybridization intensity is sufficient for most purposes. Where more precise quantification is required appropriate controls are run to correct for variations introduced in sample preparation and hybridization as described herein. In addition, serial dilutions of “standard” probe mRNAs are used to prepare calibration curves according to methods well known to those of skill in the art. Of course, where simple detection of the presence or absence of a transcript is desired, no elaborate control or calibration is required.

[0247] For example, if a microarray nucleic acid member is not labeled after hybridization, this indicates that the gene comprising that nucleic acid member is not expressed in either sample. If a nucleic acid member is labeled with a single color, it indicates that a labeled gene was expressed only in one sample. The labeling of a nucleic acid member comprising an array with both colors indicates that the gene was expressed in both samples. Even genes expressed once per cell are detected (1 part in 100,000 sensitivity). A 1.4-fold or greater difference in expression intensity in the two samples being compared is indicative of differential expression.

[0248] Verification of Differential Expression

[0249] The above methods result in the identification, using polynucleotide arrays comprising polynucleotides of known sequences, of nucleic acid molecules that are differentially expressed in an animal subjected to pain. Following the initial identification of such sequences using the microarrays, however, the differential expression is validated using techniques that are well known in the art.

[0250] In one embodiment, following identification of a 1.4 fold or greater difference in hybridization intensity in the sample obtained from an animal subjected to pain relative to a naïve animal, reverse transcription PCR (RT-PCR) is performed using primers specific for the hybridizing sequence. For example, given that the identity and sequence of each nucleic acid comprising the polynucleotide array is known, if probe nucleic acid hybridizes at a given position on the array, one of skill in the art can design primers based on the sequence of the nucleic acid known to be at that position, which can then be used to amplify the known sequence from the original nucleic acid sample obtained from the animal. The technique of designing primers for PCR amplification is well known in the art. Oligonucleotide primers and probes are 5 to 100 nucleotides in length, ideally from 17 to 40 nucleotides, although primers and probes of different length are of use. Primers for amplification are preferably about 17-25 nucleotides. Primers useful according to the invention are also designed to have a particular melting temperature (Tm) by the method of melting temperature estimation. Commercial programs, including Oligo™ (MBI, Cascade, Colo.), Primer Design and programs available on the internet, including Primer3 and Oligo Calculator can be used to calculate a Tm of a nucleic acid sequence useful according to the invention. Preferably, the Tm of an amplification primer useful according to the invention, as calculated for example by Oligo Calculator, is preferably between about 45 and 65° C. and more preferably between about 50 and 60° C. Preferably, the Tm of a probe useful according to the invention is 7° C. higher than the Tm of the corresponding amplification primers. It is preferred that, following generation of cDNA by RT-PCR, the cDNA fragment is cloned into an appropriate sequencing vector, such as a PCRII vector (TA cloning kit; Invitrogen). The identity of each cloned fragment is then confirmed by sequencing in both directions. It is expected that the sequence obtained from sequencing would be the same as the known sequence originally spotted on the polynucleotide array.

[0251] In one embodiment, following sequence confirmation of the identity of the differentially expressed polynucleotide, the differential expression of the polynucleotide in sensory neurons of an animal subjected to pain relative to a naïve animal is confirmed by Northern analysis. Sequence confirmed cDNAs are used to produce ³²P-labeled cDNA probes using techniques well known in the art (see, for example, Ausubel, supra), or commercially available kits (Prime-It Kit, Stratagene, La Jolla, Calif.). Northern analysis of total RNA obtained from naïve animals and animals subjected to pain is then performed using classically described techniques. For example, total RNA samples are denatured with formaldehyde/formamide and run for two hours in a 1% agarose, MOPS-acetate-EDTA gel. RNA is then transferred to nitrocellulose membrane by upward capillary action and fixed by UV cross-linkage. Membranes are pre-hybridized for at least 90 minutes and hybridized overnight at 42° C. Post hybridization washes are performed as known in the art (Ausubel, supra). The membrane is then exposed to x-ray film overnight with an intensifying screen at −80° C. Labeled membranes are then visualized after exposure to film. The signal produced on the x-ray film by the radiolabeled cDNA probes can then be quantified using any technique known in the art, such as scanning the film and quantifying the relative pixel intensity using a computer program such as NIH Image (National Institutes of Health, Bethesda, Md.), wherein at least a 2 fold, preferably a 1.4 fold increase or decrease in the hybridization intensity of the radiolabeled probe obtained from the animal subjected to pain relative to the naïve animal validates the differential expression observed using the polynucleotide microarray.

[0252] In an alternate embodiment, the differential expression of polynucleotide sequences, first identified using the polynucleotide microarrays is verified using the Taqman™ (Perkin-Elmer, Foster City, Calif.) techniques, which is performed with a transcript-specific antisense probe. This probe is specific for the PCR product (e.g. a nucleic acid sequence identified using the microarray as being differentially regulated) and is prepared with a quencher and fluorescent reporter probe complexed to the 5′ end of the oligonucleotide. Different fluorescent markers can be attached to different reporters, allowing for measurement of two products in one reaction. When Taq DNA polymerase is activated, it cleaves off the fluorescent reporters by its 5′-to-3′ nucleolytic activity. The reporters, now free of the quenchers, fluoresce. The color change is proportional to the amount of each specific product and is measured by fluorometer; therefore, the amount of each color can be measured and the RT-PCR product can be quantified. The PCR reactions can be performed in 96 well plates so that samples derived from many individuals can be processed and measured simultaneously. The Taqman™ system has the additional advantage of not requiring gel electrophoresis and allows for quantification when used with a standard curve. Quantitative analysis of the mRNA levels for a given gene present in the originally obtained sample from an animal subjected to pain permits a determination of the differential expression of the particular mRNA relative to that obtained from a naïve animal. A fold increase or decrease in expression of a nucleic acid sequence from an animal subjected to pain of at least 2 relative to a naïve animal is indicative of differential expression, and is sufficient to validate the differential expression first identified using the polynucleotide microarray.

[0253] In a still further embodiment, the differential expression of a polynucleotide identified using microarray analysis is verified by in situ hybridization. Given that the sequence of each of the nucleic acid molecules on the microarray used to identify differential expression is known, labeled cDNA or antisense RNA probes can be generated using techniques which are known in the art (Ausubel et al., supra). The probes are then hybridized to fixed (e.g., fixed in 4% paraformaldehyde) thin (5-50 μm) tissue sections of, for example, the dorsal root ganglion. Briefly, prior to hybridization, the tissue sections are incubated in acetic anhydride, dehydrated in graded ethanols, and de-lipidated in chloroform. Tissue sections are then hybridized with one or more labeled probes for 24 hours at 45° C. Hybridized probe may be subsequently detected using techniques which are compatible with the label incorporated in the probe. The level of hybridization may be quantitated using any technique known to those of skill in the art. For example, the hybridization signal may be photographed, and the photograph scanned into a computer and the hybridization signal quantitated using software such as NIH Image (NIH, Bethesda, Md.). The measured level of hybridization may then be correlated with the differential expression level measured using the microarray analysis.

[0254] In a further embodiment, differential expression of sequences, identified based on the 1.4 fold threshold criteria, described above, can be verified as being differentially expressed if they are differentially expressed by at least 1.2 fold, with a p-value of less than 0.05, in a statistical analysis of triplicate array data points using an appropriate statistical analysis, such as a student's t-test.

Differentially Expressed Polynucleotides

[0255] The present invention provides polynucleotides and genes which are differentially expressed in an animal which has been subjected to pain relative to an animal not subjected to pain, wherein the differential expression is determined using the methods described above. Using the above methods a number of polynucleotides have been identified which are differentially expressed in an animal subjected to pain. These polynucleotides and their respective human homologs, as well as the polypeptide molecules encoded thereby are shown in Tables 1, 2, 3, 4, or 5.

[0256] Table 1 shows a group of differentially expressed polynucleotides and genes, several of which demonstrate an at least 1.4 fold change in expression in an animal subjected to pain in both axotomy and SNI pain models relative to naïve animals; indicated by the Fold Change of Axotomy/Naïve or SNI/Naïve. Those polynucleotides that are not differentially expressed by at least +/−1.4 fold are not considered to be differentially expressed according to the invention. The polynucleotides of Table 1 have been previously suggested to be involved in the mechanisms of pain and neuronal injury. The present invention, however, distinguishes these polynucleotides by providing a threshold of differential expression which is less than that previously accepted for such analysis.

[0257] Table 2 shows polynucleotides of the present invention which have been established as being differentially expressed by at least 1.4 fold in an axotomy, SNI, or inflammation animal pain model, and which have been further analyzed by triplicate analysis as shown in Tables 6 and 7. The polynucleotide sequences shown in Table 2 have been established herein as being differentially expressed by at least 1.2 fold, with a level of statistical significance of p<0.05 as determined by a student's t-test over at least three replicate assays (the replicate assay schemes are shown in Tables 6 and 7), in several animal pain models measured at several post operative time points. The nerve injury pain models represented are the Spinal segmental nerve injury (Chung), Chronic Constriction Injury (CCI) and Spared Nerve Injury (SNI) models at time points 3, 7, 21 and 40 days. The inflammatory model represented is intraplantar Complete Freund's Adjuvant (CFA) injection in to the hind paw at 0.5, 1, and 5 days post injection. The tissue are lumbar DRGs and dorsal horn (i.e two tissues four models, 4 time points (3 for CFA)=30 different pain comparisons each in triplicate each compared against the appropriate control.

[0258] Table 3 shows polynucleotide sequences of the present invention which have been established as being differentially expressed by at least 1.4 fold, but which have not attained a statistical significance of p<0.05 according to the triplicate analysis scheme shown in Tables 6 and 7. The polynucleotide sequence shown in Table 3, however, are considered to be “differentially expressed” according to the present invention, despite the fact that the triplicate analysis has not established a significance of p<0.05.

[0259] Table 4 shows polynucleotides of the present invention which are upregulated by at least 1.4 fold in a rat inflammation pain model as indicated by either or both of the Intensity Ratio Naïve/SNI or Affymetrix Ratio data column, and which have not been previously suggested to be involved in the cellular response to pain.

[0260] Table 5 shows polynucleotides of the present invention which are downregulated by at least 1.4 fold in a rat inflammation pain model as indicated by either or both of the Intensity Ratio Naïve/SNI or Affymetrix Ratio data column, and which have not been previously suggested to be involved in the cellular response to pain. The data in tables 4 and 5 represents an average of the Intensity Ratios and Affymetrix Ratios obtained from inflammation pain models at 3 hours, 6 hours, 12 hours, 24 hours, 48 hours and 5 days following induction of inflammation.

[0261] Table 10 shows a subset of the polynucleotides and polypeptides of the Tables 1-5 above, which are differentially expressed in the DH and/or DRG in at least two of the neuropathic pain models selected from spared nerve injury (SNI), chronic constriction injury (CCI), and the CHUNG model. For inclusion in Table 10, the gene had to show two consecutive significant incidents of differential regulation, one of which had to reach the fold threshold. According to the invention, a gene which is differentially expressed in more than one pain model is much more likely to have a general role in pain.

[0262] Table 11 shows a subset of the genes of Table 10 which are highly regulated in pain. The genes of Table 10 were selected based on their coordinate regulation in either the DRG or DH and for which, based on the known or deduced function of the gene (e.g., as a transmembrane receptor), have been determined by the invention to have a role in the production or modulation of pain by changing the properties, excitability, structure and/or connectivity of neurons in pain pathways. Accordingly, reference to the genes (polynucleotides or polypeptides) of Tables 1-5 of the invention, necessarily encompasses the genes set forth in Tables 10 and 11. According to the invention, of the genes which are differentially expressed as described herein, the genes of Table 10 is a preferred set of differentially expressed genes useful for screening, treatment, and pain modulation as described below. More preferred for screening assays, treatment, and pain modulation according to the invention, is the set of genes indicated in Table 11.

[0263] As indicated in the tables of the invention, the column labeled “% homology” indicates the percent identity between the human and rat (or mouse if the rat sequence is not available) sequences. In some cases, the polynucleotide sequence indicated in Table 2, 3, 4, or 5 is an EST sequence. Accordingly, the column labeled “former identifier” indicates the accession number of the gene sequence having the closest homology, as determined by a BLAST search, to the EST sequence. The column labeled “identifier” in conjunction with the columns labeled “description” and “protein type” indicate the function of the proteins encoded by the polynucleotides of Tables 1, 2, 3, 4, or 5 and specifically indicated in Tables 2, 3, 4, or 5. The column labeled “subcellular localization” indicates the known location of the protein encoded by the polynucleotide sequences noted in the Table in specific compartments in the cell. Accordingly, those proteins which are indicated in the Table as being secreted may be useful, as described below, as protein drugs for modulating the activity of one or more proteins indicated in the table, or for treating pain as described herein. Similarly, proteins which are indicated as being integral membrane proteins may be cell surface receptors, and may be screened against candidate compounds to identify compounds which regulate their activity as described below. The columns labeled “rat gene SEQ ID No.”, “rat protein SEQ ID No.”, “human gene SEQ ID No.”, and “human protein SEQ ID No.” in Tables 2-3 indicates the SEQ ID No. corresponding to the sequence identified by the corresponding accession number.

[0264] In addition to the polynucleotides indicated in Tables 1, 2, 3, 4, or 5, the scope of the invention further includes variations, and/or mutations in the polynucleotide sequences, including SNPs and other conservative variants that do not alter the functionality of the encoded polypeptide, including sequences having at least 30% homology with the polynucleotide sequences shown in Tables 1, 2, 3, 4, or 5, but encoding a protein having the equivalent function to the protein encoded by the polynucleotide sequences shown in Tables 1, 2, 3, 4, or 5. The present invention further encompasses the human homologs to the polynucleotide sequences indicated in Tables 1, 2, 3, 4, or 5, and the polypeptide sequences encoded thereby. The invention still further encompasses the polypeptide sequences encoded by the polynucleotide sequences shown in Tables 1, 2, 3, 4, or 5. The Accession no. for the polypeptide sequence is shown in Tables 2, 3, 4, or 5 (the protein accession number is not indicated for Table 1, as all of these genes are known in the art). The present invention also encompasses a variant, domain, epitope, or fragment of the polypeptide molecules indicated in Tables 1, 2, 3, 4, or 5, provided that the variant, domain, epitope, or fragment has an equivalent function to that of the polypeptide indicated in Tables 1, 2, 3, 4, or 5 (i.e., the function for the proteins indicated in Tables).

LENGTHY TABLE REFERENCED HERE
US20070026409A1-20070201-T00001
Please refer to the end of the specification for access instructions.

LENGTHY TABLE REFERENCED HERE
US20070026409A1-20070201-T00002
Please refer to the end of the specification for access instructions.

LENGTHY TABLE REFERENCED HERE
US20070026409A1-20070201-T00003
Please refer to the end of the specification for access instructions.

LENGTHY TABLE REFERENCED HERE
US20070026409A1-20070201-T00004
Please refer to the end of the specification for access instructions.

LENGTHY TABLE REFERENCED HERE
US20070026409A1-20070201-T00005
Please refer to the end of the specification for access instructions.

LENGTHY TABLE REFERENCED HERE
US20070026409A1-20070201-T00006
Please refer to the end of the specification for access instructions.

LENGTHY TABLE REFERENCED HERE
US20070026409A1-20070201-T00007
Please refer to the end of the specification for access instructions.

LENGTHY TABLE REFERENCED HERE
US20070026409A1-20070201-T00008
Please refer to the end of the specification for access instructions.

LENGTHY TABLE REFERENCED HERE
US20070026409A1-20070201-T00009
Please refer to the end of the specification for access instructions.

Vectors and Host Cells

[0265] In addition to providing genes which are differentially expressed in animals which have been subjected to pain, the present invention further provides vectors and plasmids useful for directing the expression of differentially expressed genes, or therapeutic nucleic acid constructs, and further provides host cells which express the vectors and plasmids provided herein. Nucleic acid sequences useful for the expression from a vector or plasmid as described below include, but are not limited to any nucleic acid or gene sequence identified as being differentially regulated by the methods described above, and further include therapeutic nucleic acid molecules, such as antisense molecules. The host cell may be any prokaryotic or eukaryotic cell. Ligating the polynucleotide sequence into a gene construct, such as an expression vector, and transforming or transfecting into hosts, either eukaryotic (yeast, avian, insect or mammalian) or prokaryotic (bacterial cells), are standard procedures well known in the art.

[0266] Vectors

[0267] There is a wide array of vectors known and available in the art that are useful for the expression of differentially expressed nucleic acid molecules according to the invention. The selection of a particular vector clearly depends upon the intended use the polypeptide encoded by the differentially expressed nucleic acid. For example, the selected vector must be capable of driving expression of the polypeptide in the desired cell type, whether that cell type be prokaryotic or eukaryotic. Many vectors comprise sequences allowing both prokaryotic vector replication and eukaryotic expression of operably linked gene sequences.

[0268] Vectors useful according to the invention may be autonomously replicating, that is, the vector, for example, a plasmid, exists extrachromosomally and its replication is not necessarily directly linked to the replication of the host cell's genome. Alternatively, the replication of the vector may be linked to the replication of the host's chromosomal DNA, for example, the vector may be integrated into the chromosome of the host cell as achieved by retroviral vectors.

[0269] Vectors useful according to the invention preferably comprise sequences operably linked to the differentially expressed sequences that permit the transcription and translation of the sequence. Sequences that permit the transcription of the linked differentially expressed sequence include a promoter and optionally also include an enhancer element or elements permitting the strong expression of the linked sequences. The term “transcriptional regulatory sequences” refers to the combination of a promoter and any additional sequences conferring desired expression characteristics (e.g., high level expression, inducible expression, tissue- or cell-type-specific expression) on an operably linked nucleic acid sequence.

[0270] The selected promoter may be any DNA sequence that exhibits transcriptional activity in the selected host cell, and may be derived from a gene normally expressed in the host cell or from a gene normally expressed in other cells or organisms. Examples of promoters include, but are not limited to the following: A) prokaryotic promoters—E. coli lac, tac, or trp promoters, lambda phage P_{R} or P_{L} promoters, bacteriophage T7, T3, Sp6 promoters, B. subtilis alkaline protease promoter, and the B. stearothermophilus maltogenic amylase promoter, etc.; B) eukaryotic promoters—yeast promoters, such as GAL1, GAL4 and other glycolytic gene promoters (see for example, Hitzeman et al., 1980, J. Biol. Chem. 255: 12073-12080; Alber & Kawasaki, 1982, J. Mol. Appl. Gen. 1: 419-434), LEU2 promoter (Martinez-Garcia et al., 1989, Mol Gen Genet. 217: 464-470), alcohol dehydrogenase gene promoters (Young et al., 1982, in Genetic Engineering of Microorganisms for Chemicals, Hollaender et al., eds., Plenum Press, NY), or the TPI1 promoter (U.S. Pat. No. 4,599,311); insect promoters, such as the polyhedrin promoter (U.S. Pat. No. 4,745,051; Vasuvedan et al., 1992, FEBS Lett. 311: 7-11), the P10 promoter (Vlak et al., 1988, J. Gen. Virol. 69: 765-776), the Autographa californica polyhedrosis virus basic protein promoter (EP 397485), the baculovirus immediate-early gene promoter gene 1 promoter (U.S. Pat. Nos. 5,155,037 and 5,162,222), the baculovirus 39K delayed-early gene promoter (also U.S. Pat. Nos. 5,155,037 and 5,162,222) and the OpMNPV immediate early promoter 2; mammalian promoters—the SV40 promoter (Subramani et al., 1981, Mol. Cell. Biol. 1: 854-864), metallothionein promoter (MT-1; Palmiter et al., 1983, Science 222: 809-814), adenovirus 2 major late promoter (Yu et al., 1984, Nucl. Acids Res. 12: 9309-21), cytomegalovirus (CMV) or other viral promoter (Tong et al., 1998, Anticancer Res. 18: 719-725), or even the endogenous promoter of a gene of interest in a particular cell type.

[0271] A selected promoter may also be linked to sequences rendering it inducible or tissue-specific. For example, the addition of a tissue-specific enhancer element upstream of a selected promoter may render the promoter more active in a given tissue or cell type. Alternatively, or in addition, inducible expression may be achieved by linking the promoter to any of a number of sequence elements permitting induction by, for example, thermal changes (temperature sensitive), chemical treatment (for example, metal ion- or IPTG-inducible), or the addition of an antibiotic inducing agent (for example, tetracycline).

[0272] Regulatable expression is achieved using, for example, expression systems that are drug inducible (e.g., tetracycline, rapamycin or hormone-inducible). Drug-regulatable promoters that are particularly well suited for use in mammalian cells include the tetracycline regulatable promoters, and glucocorticoid steroid-, sex hormone steroid-, ecdysone-, lipopolysaccharide (LPS)- and isopropylthiogalactoside (IPTG)-regulatable promoters. A regulatable expression system for use in mammalian cells should ideally, but not necessarily, involve a transcriptional regulator that binds (or fails to bind) nonmammalian DNA motifs in response to a regulatory agent, and a regulatory sequence that is responsive only to this transcriptional regulator.

[0273] Tissue-specific promoters may also be used to advantage in differentially expressed sequence-encoding constructs of the invention. A wide variety of tissue-specific promoters is known. As used herein, the term “tissue-specific” means that a given promoter is transcriptionally active (i.e., directs the expression of linked sequences sufficient to permit detection of the polypeptide product of the promoter) in less than all cells or tissues of an organism. A tissue specific promoter is preferably active in only one cell type, but may, for example, be active in a particular class or lineage of cell types (e.g., hematopoietic cells). A tissue specific promoter useful according to the invention comprises those sequences necessary and sufficient for the expression of an operably linked nucleic acid sequence in a manner or pattern that is essentially the same as the manner or pattern of expression of the gene linked to that promoter in nature. The following is a non-exclusive list of tissue specific promoters and literature references containing the necessary sequences to achieve expression characteristic of those promoters in their respective tissues; the entire content of each of these literature references is incorporated herein by reference. Examples of tissue specific promoters useful in the present invention are as follows:

[0274] Bowman et al., 1995 Proc. Natl. Acad. Sci. USA 92, 12115-12119 describe a brain-specific transferrin promoter; the synapsin I promoter is neuron specific (Schoch et al., 1996 J. Biol. Chem. 271, 3317-3323); the nestin promoter is post-mitotic neuron specific (Uetsuki et al., 1996 J. Biol. Chem. 271, 918-924); the neurofilament light promoter is neuron specific (Charron et al., 1995 J. Biol. Chem. 270, 30604-30610); the acetylcholine receptor promoter is neuron specific (Wood et al., 1995 J. Biol. Chem. 270, 30933-30940); and the potassium channel promoter is high-frequency firing neuron specific (Gan et al., 1996 J. Biol. Chem 271, 5859-5865). Any tissue specific transcriptional regulatory sequence known in the art may be used to advantage with a vector encoding a differentially expressed nucleic acid sequence obtained from an animal subjected to pain.

[0275] In addition to promoter/enhancer elements, vectors useful according to the invention may further comprise a suitable terminator. Such terminators include, for example, the human growth hormone terminator (Palmiter et al., 1983, supra), or, for yeast or fungal hosts, the TPI1 (Alber & Kawasaki, 1982, supra) or ADH3 terminator (McKnight et al., 1985, EMBO J. 4: 2093-2099).

[0276] Vectors useful according to the invention may also comprise polyadenylation sequences (e.g., the SV40 or Ad5E1b poly(A) sequence), and translational enhancer sequences (e.g., those from Adenovirus VA RNAs). Further, a vector useful according to the invention may encode a signal sequence directing the recombinant polypeptide to a particular cellular compartment or, alternatively, may encode a signal directing secretion of the recombinant polypeptide.

[0277] a. Plasmid Vectors.

[0278] Any plasmid vector that allows expression of a differentially expressed coding sequence of the invention in a selected host cell type is acceptable for use according to the invention. A plasmid vector useful in the invention may have any or all of the above-noted characteristics of vectors useful according to the invention. Plasmid vectors useful according to the invention include, but are not limited to the following examples: Bacterial—pQE70, pQE60, pQE-9 (Qiagen) pBs, phagescript, psiX174, pBluescript SK, pBsKS, pNH8a, pNH16a, pNH18a, pNH46a (Stratagene); pTrc99A, pKK223-3, pKK233-3, pDR540, and pRIT5 (Pharmacia); Eukaryotic—pWLneo, pSV2cat, pOG44, pXT1, pSG (Stratagene) pSVK3, pBPV, pMSG, and pSVL (Pharmacia). However, any other plasmid or vector may be used as long as it is replicable and viable in the host.

[0279] b. Bacteriophage Vectors.

[0280] There are a number of well known bacteriophage-derived vectors useful according to the invention. Foremost among these are the lambda-based vectors, such as Lambda Zap II or Lambda-Zap Express vectors (Stratagene) that allow inducible expression of the polypeptide encoded by the insert. Others include filamentous bacteriophage such as the M13-based family of vectors.

[0281] c. Viral Vectors.

[0282] A number of different viral vectors are useful according to the invention, and any viral vector that permits the introduction and expression of one or more of the differentially expressed polynucleotides of the invention in cells is acceptable for use in the methods of the invention. Viral vectors that can be used to deliver foreign nucleic acid into cells include but are not limited to retroviral vectors, adenoviral vectors, adeno-associated viral vectors, herpesviral vectors, and Semliki forest viral (alphaviral) vectors. Defective retroviruses are well characterized for use in gene transfer (for a review see Miller, A. D. (1990) Blood 76:271). Protocols for producing recombinant retroviruses and for infecting cells in vitro or in vivo with such viruses can be found in Current Protocols in Molecular Biology, Ausubel, F. M. et al. (eds.) Greene Publishing Associates, (1989), Sections 9.10-9.14, and other standard laboratory manuals.

[0283] In addition to retroviral vectors, Adenovirus can be manipulated such that it encodes and expresses a gene product of interest but is inactivated in terms of its ability to replicate in a normal lytic viral life cycle (see for example Berkner et al., 1988, BioTechniques 6:616; Rosenfeld et al., 1991, Science 252:431-434; and Rosenfeld et al., 1992, Cell 68:143-155). Suitable adenoviral vectors derived from the adenovirus strain Ad type 5 dl324 or other strains of adenovirus (e.g., Ad2, Ad3, Ad7 etc.) are well known to those skilled in the art. Adeno-associated virus (AAV) is a naturally occurring defective virus that requires another virus, such as an adenovirus or a herpes virus, as a helper virus for efficient replication and a productive life cycle. (For a review see Muzyczka et al., 1992, Curr. Topics in Micro. and Immunol. 158:97-129). An AAV vector such as that described in Traschin et al. (1985, Mol. Cell. Biol. 5:3251-3260) can be used to introduce nucleic acid into cells. A variety of nucleic acids have been introduced into different cell types using AAV vectors (see, for example, Hermonat et al., 1984, Proc. Natl. Acad. Sci. USA 81: 6466-6470; and Traschin et al., 1985, Mol. Cell. Biol. 4: 2072-2081).

[0284] Host Cells

[0285] Any cell into which a recombinant vector carrying a gene encoding a nucleic acid sequence differentially expressed in an animal subjected to pain may be introduced and wherein the vector is permitted to drive the expression of the peptide encoded by the differentially expressed sequence is useful according to the invention. Any cell in which a differentially expressed molecule of the invention may be expressed and preferably detected is a suitable host, wherein the host cell is preferably a mammalian cell and more preferably a human cell. Vectors suitable for the introduction of differentially expressed nucleic acid sequences to host cells from a variety of different organisms, both prokaryotic and eukaryotic, are described herein above or known to those skilled in the art.

[0286] Host cells may be prokaryotic, such as any of a number of bacterial strains, or may be eukaryotic, such as yeast or other fungal cells, insect or amphibian cells, or mammalian cells including, for example, rodent, simian or human cells. Cells may be primary cultured cells, for example, primary human fibroblasts or keratinocytes, or may be an established cell line, such as NIH3T3, 293T or CHO cells. Further, mammalian cells useful in the present invention may be phenotypically normal or oncogenically transformed. It is assumed that one skilled in the art can readily establish and maintain a chosen host cell type in culture.

[0287] Introduction of Vectors to Host Cells.

[0288] Vectors useful in the present invention may be introduced to selected host cells by any of a number of suitable methods known to those skilled in the art. For example, vector constructs may be introduced to appropriate bacterial cells by infection, in the case of E. coli bacteriophage vector particles such as lambda or M13, or by any of a number of transformation methods for plasmid vectors or for bacteriophage DNA. For example, standard calcium-chloride-mediated bacterial transformation is still commonly used to introduce naked DNA to bacteria (Sambrook et al., 1989, Molecular Cloning, A Laboratory Manual, Cold Spring Harbor Laboratory Press, Cold Spring Harbor, N.Y.), but electroporation may also be used (Ausubel et al., 1988, Current Protocols in Molecular Biology, (John Wiley & Sons, Inc., NY, N.Y.)).

[0289] For the introduction of vector constructs to yeast or other fungal cells, chemical transformation methods are generally used (e.g. as described by Rose et al., 1990, Methods in Yeast Genetics, Cold Spring Harbor Laboratory Press, Cold Spring Harbor, N.Y.). For transformation of S. cerevisiae, for example, the cells are treated with lithium acetate to achieve transformation efficiencies of approximately 10⁴ colony-forming units (transformed cells)/μg of DNA. Transformed cells are then isolated on selective media appropriate to the selectable marker used. Alternatively, or in addition, plates or filters lifted from plates may be scanned for GFP fluorescence to identify transformed clones.

[0290] For the introduction of vectors comprising differentially expressed sequences to mammalian cells, the method used will depend upon the form of the vector. Plasmid vectors may be introduced by any of a number of transfection methods, including, for example, lipid-mediated transfection (“lipofection”), DEAE-dextran-mediated transfection, electroporation or calcium phosphate precipitation. These methods are detailed, for example, in Current Protocols in Molecular Biology (Ausubel et al., 1988, John Wiley & Sons, Inc., NY, N.Y.).

[0291] Lipofection reagents and methods suitable for transient transfection of a wide variety of transformed and non-transformed or primary cells are widely available, making lipofection an attractive method of introducing constructs to eukaryotic, and particularly mammalian cells in culture. For example, LipofectAMINE™ (Life Technologies) or LipoTaxi™(Stratagene) kits are available. Other companies offering reagents and methods for lipofection include Bio-Rad Laboratories, CLONTECH, Glen Research, InVitrogen, JBL Scientific, MBI Fermentas, PanVera, Promega, Quantum Biotechnologies, Sigma-Aldrich, and Wako Chemicals USA.

[0292] Following transfection with a vector of the invention, eukaryotic (e.g., human) cells successfully incorporating the construct (intra- or extrachromosomally) may be selected, as noted above, by either treatment of the transfected population with a selection agent, such as an antibiotic whose resistance gene is encoded by the vector, or by direct screening using, for example, FACS of the cell population or fluorescence scanning of adherent cultures. Frequently, both types of screening may be used, wherein a negative selection is used to enrich for cells taking up the construct and FACS or fluorescence scanning is used to further enrich for cells expressing differentially expressed polynucleotides or to identify specific clones of cells, respectively. For example, a negative selection with the neomycin analog G418 (Life Technologies, Inc.) may be used to identify cells that have received the vector, and fluorescence scanning may be used to identify those cells or clones of cells that express the vector construct to the greatest extent.

Polynucleotide Arrays Comprising Differentially Expressed Nucleic Acid Sequences

[0293] In one embodiment, the present invention provides a pain-specific polynucleotide array comprising nucleic acid sequences that are identified as being differentially expressed in an animal subjected to pain relative to a naïve animal stably associated at discrete predefined regions on a surface. In a preferred embodiment, a pain-specific microarray useful in the present invention comprises one or more polynucleotides shown in Tables 1, 2, 3, 4, or 5. At least one of the polynucleotides comprising a pain-specific array useful in the present invention must be selected from Table 2, 3, 4, or 5. A pain-specific microarray according to the invention preferably comprises between 10 and 20,000 nucleic acid members, and more preferably comprises at least 5000 nucleic acid members. The nucleic acid members are known or novel polynucleotide sequences which have been determined to be differentially expressed as described herein, or any combination thereof. A pain-specific microarray according to the invention may be used, for example, to test therapeutic compounds which may modulate the expression of the sequences comprising the array in an animal subjected to pain. For example, an animal subjected to pain may be treated with a potentially therapeutic compound as described below. Total RNA may then be extracted from, for example, primary sensory neurons, prepared according to the methods described above, and hybridized to the pain-specific microarray. The level of hybridization of samples to the pain-specific microarray may be compared to the level of hybridization of a nucleic acid sample obtained from an animal subjected to pain, but not administered the therapeutic compound. The pain-specific microarray may also be used, for example, to test the ability of an antisense nucleic acid to hybridize to the differentially expressed nucleic acid molecules comprising the pain-specific microarray. The antisense molecules may then be used to inhibit the expression of, for example, nucleic acid sequences which have been identified, using the above methods, as being upregulated (i.e., by at least 1.4 fold) in an animal subjected to pain.

[0294] The invention also provides for a pain-specific microarray comprising nucleic acids sequences which have been identified and verified as being differentially expressed in an animal subjected to pain, wherein the sequences stably associated with the array are obtained from at least two different species of animal. In a preferred embodiment, a pain-specific microarray useful in the present invention comprises at least one polynucleotide shown in Table 2, 3, 4, or 5, and may optionally further comprise one or more of the polynucleotides shown in Table 1. Such arrays may also be used for prognostic methods to monitor an animal's response to therapy. In one embodiment, the above pain-specific microarrays are used to identify a therapeutic agent that changes (e.g., increases or decreases) the level of expression of at least one polynucleotide sequence that is differentially expressed (i.e., by at least 1.4 fold, or at least 1.2 fold in combination with a p-value of less than 0.05 in triplicate analysis) in sensory neurons in an animal subjected to pain.

[0295] The nucleic acid samples that are hybridized to and analyzed with a pain-specific microarray of the invention are preferably derived from sensory neurons of an animal subjected to pain (or from a naïve control animal). More preferably, the nucleic acid samples are obtained from primary sensory neurons of the dorsal root ganglion. A limitation for this procedure lies in the amount of RNA available for use as a probe nucleic acid sample. Preferably, at least 1 microgram of total RNA is obtained for use according to this invention.

[0296] Construction of a Pain-Specific Microarray

[0297] An aspect of the present invention incorporates the previously identified differentially regulated nucleic acid sequences into a pain-specific polynucleotide microarray. In the present methods, an array of nucleic acid members stably associated with the surface of a substantially planar solid support is contacted with a sample comprising probe polynucleotides obtained from an animal subjected to pain, or from a naïve animal under hybridization conditions sufficient to produce a hybridization pattern of complementary nucleic acid members/probe complexes.

[0298] The nucleic acid members may be produced using established techniques such as polymerase chain reaction (PCR) and reverse transcription (RT). For example, once a nucleic acid sequence has been identified as being differentially expressed in an animal subjected to pain, the sequence may be amplified from the originally obtained RNA sample by RT-PCR, wherein the amplified product may be used to construct a pain-specific microarray. These methods are similar to those currently known in the art (see e.g. PCR Strategies, Michael A. Innis (Editor), et al. (1995) and PCR: Introduction to Biotechniques Series, C. R. Newton, A. Graham (1997)). Amplified polynucleotides are purified by methods well known in the art (e.g., column purification or alcohol precipitation). A polynucleotide is considered pure when it has been isolated so as to be substantially free of primers and incomplete products produced during the synthesis of the desired polynucleotide. Preferably, a purified polynucleotide will also be substantially free of contaminants which may hinder or otherwise mask the binding activity of the molecule.

[0299] A pain-specific microarray according to the invention comprises a plurality of unique polynucleotides attached to one surface of a solid support at a density exceeding 20 different polynucleotides/cm², wherein each of the polynucleotides is attached to the surface of the solid support in a non-identical preselected region. Each associated sample on the array comprises a polynucleotide composition, of known identity, usually of known sequence, as described in greater detail below. Any conceivable substrate may be employed in the invention. In one embodiment, the polynucleotide attached to the surface of the solid support is DNA. In a preferred embodiment, the polynucleotide attached to the surface of the solid support is cDNA or RNA. In another preferred embodiment, the polynucleotide attached to the surface of the solid support is cDNA synthesized by polymerase chain reaction (PCR). Preferably, a nucleic acid member comprising an array, according to the invention, is at least 25 nucleotides in length. In one embodiment, a nucleic acid member comprising an array is at least 150 nucleotides in length. Preferably, a nucleic acid member comprising an array is less than 1000 nucleotides in length. More preferably, a nucleic acid member comprising an array is less than 500 nucleotides in length. In one embodiment, an array comprises at least 10 different polynucleotides attached to one surface of the solid support. In another embodiment, the array comprises at least 100 different polynucleotides attached to one surface of the solid support. In yet another embodiment, the array comprises at least 10000 different polynucleotides attached to one surface of the solid support.

[0300] In the arrays of the invention, the polynucleotide compositions are stably associated with the surface of a solid support, wherein the support may be a flexible or rigid solid support. By “stably associated” is meant that each nucleic acid member maintains a unique position relative to the solid support under hybridization and washing conditions. As such, the samples are non-covalently or covalently stably associated with the support surface. Examples of non-covalent association include non-specific adsorption, binding based on electrostatic interactions (e.g., ion pair interactions), hydrophobic interactions, hydrogen bonding interactions, specific binding through a specific binding pair member covalently attached to the support surface, and the like. Examples of covalent binding include covalent bonds formed between the polynucleotides and a functional group present on the surface of the rigid support (e.g., —OH), where the functional group may be naturally occurring or present as a member of an introduced linking group, as described in greater detail below

[0301] The amount of differentially expressed polynucleotide present in each composition will be sufficient to provide for adequate hybridization and detection of probe polynucleotide sequences during the assay in which the array is employed. Generally, the amount of each nucleic acid member stably associated with the solid support of the array is at least about 0.1 ng, preferably at least about 0.5 ng and more preferably at least about 1 ng, where the amount may be as high as 1000 ng or higher, but will usually not exceed about 20 ng. Where the nucleic acid member is “spotted” onto the solid support in a spot comprising an overall circular dimension, the diameter of the “spot” will generally range from about 10 to 5,000 μm, usually from about 20 to 2,000 μm and more usually from about 50 to 1000 μm.

[0302] Control nucleic acid members may be present on the array including nucleic acid members comprising oligonucleotides or polynucleotides corresponding to genomic DNA, housekeeping genes, vector sequence, plant nucleic acid sequence, negative and positive control genes, and the like. Control nucleic acid members are calibrating or control genes whose function is not to tell whether a particular “key” gene of interest is expressed, but rather to provide other useful information, such as background or basal level of expression.

[0303] Other control polynucleotides are spotted on the array and used as probe expression control polynucleotides and mismatch control nucleotides to monitor non-specific binding or cross-hybridization to a polynucleotide in the sample other than the target to which the probe is directed. Mismatch probes thus indicate whether a hybridization is specific or not. For example, if the target is present, the perfectly matched probes should be consistently brighter than the mismatched probes.

[0304] Solid Substrate

[0305] An array according to the invention comprises either a flexible or rigid substrate. A flexible substrate is capable of being bent, folded or similarly manipulated without breakage. Examples of solid materials which are flexible solid supports with respect to the present invention include membranes, e.g., nylon, flexible plastic films, and the like. By “rigid” is meant that the support is solid and does not readily bend, i.e., the support is not flexible. As such, the rigid substrates of the subject arrays are sufficient to provide physical support and structure to the associated polynucleotides present thereon under the assay conditions in which the array is employed, particularly under high throughput handling conditions.

[0306] The substrate may be biological, non-biological, organic, inorganic, or a combination of any of these, existing as particles, strands, precipitates, gels, sheets, tubing, spheres, containers, capillaries, pads, slices, films, plates, slides, etc. The substrate may have any convenient shape, such as a disc, square, sphere, circle, etc. The substrate is preferably flat or planar but may take on a variety of alternative surface configurations. The substrate may be a polymerized Langmuir Blodgett film, functionalized glass, Si, Ge, GaAs, GaP, SiO₂, SIN₄, modified silicon, or any one of a wide variety of gels or polymers such as (poly)tetrafluoroethylene, (poly)vinylidenedifluoride, polystyrene, polycarbonate, or combinations thereof. Other substrate materials will be readily apparent to those of skill in the art upon review of this disclosure.

[0307] In a preferred embodiment the substrate is flat glass or single-crystal silicon. According to some embodiments, the surface of the substrate is etched using well known techniques to provide for desired surface features. For example, by way of the formation of trenches, v-grooves, mesa structures, or the like, the synthesis regions may be more closely placed within the focus point of impinging light, be provided with reflective “mirror” structures for maximization of light collection from fluorescent sources, etc.

[0308] Surfaces on the solid substrate will usually, though not always, be composed of the same material as the substrate. Alternatively, the surface may be composed of any of a wide variety of materials, for example, polymers, plastics, resins, polysaccharides, silica or silica-based materials, carbon, metals, inorganic glasses, membranes, or any of the above-listed substrate materials. In some embodiments the surface may provide for the use of caged binding members which are attached firmly to the surface of the substrate. Preferably, the surface will contain reactive groups, which are carboxyl, amino, hydroxyl, or the like. Most preferably, the surface will be optically transparent and will have surface Si—OH functionalities, such as are found on silica surfaces.

[0309] The surface of the substrate is preferably provided with a layer of linker molecules, although it will be understood that the linker molecules are not required elements of the invention. The linker molecules are preferably of sufficient length to permit polynucleotides of the invention and on a substrate to hybridize to other polynucleotide molecules and to interact freely with molecules exposed to the substrate.

[0310] Often, the substrate is a silicon or glass surface, (poly)tetrafluoroethylene, (poly)vinylidendifluoride, polystyrene, polycarbonate, a charged membrane, such as nylon 66 or nitrocellulose, or combinations thereof. In a preferred embodiment, the solid support is glass. Preferably, at least one surface of the substrate will be substantially flat. Preferably, the surface of the solid support will contain reactive groups, including, but not limited to, carboxyl, amino, hydroxyl, thiol, or the like. In one embodiment, the surface is optically transparent. In a preferred embodiment, the substrate is a poly-lysine coated slide or Gamma amino propyl silane-coated Corning Microarray Technolgy-GAPS.

[0311] Any solid support to which a nucleic acid member may be attached may be used in the invention. Examples of suitable solid support materials include, but are not limited to, silicates such as glass and silica gel, cellulose and nitrocellulose papers, nylon, polystyrene, polymethacrylate, latex, rubber, and fluorocarbon resins such as TEFLON™.

[0312] The solid support material may be used in a wide variety of shapes including, but not limited to slides and beads. Slides provide several functional advantages and thus are a preferred form of solid support. Due to their flat surface, probe and hybridization reagents are minimized using glass slides. Slides also enable the targeted application of reagents, are easy to keep at a constant temperature, are easy to wash and facilitate the direct visualization of RNA and/or DNA immobilized on the solid support. Removal of RNA and/or DNA immobilized on the solid support is also facilitated using slides.

[0313] The particular material selected as the solid support is not essential to the invention, as long as it provides the described function. Normally, those who make or use the invention will select the best commercially available material based upon the economics of cost and availability, the expected application requirements of the final product, and the demands of the overall manufacturing process.

[0314] Spotting Method

[0315] The invention provides for arrays wherein each nucleic acid member comprising the array is spotted onto a solid support.

[0316] Preferably, spotting is carried out as follows. PCR products (˜40 ul) of cDNA clones obtained from animals subjected to pain, in the same 96-well tubes used for amplification, are precipitated with 4 ul (1/10 volume) of 3M sodium acetate (pH 5.2) and 100 ul (2.5 volumes) of ethanol and stored overnight at −20° C. They are then centrifuged at 3,300 rpm at 4° C. for 1 hour. The obtained pellets are washed with 50 ul ice-cold 70% ethanol and centrifuged again for 30 minutes. The pellets are then air-dried and resuspended well in 20 ul 3×SSC overnight. The samples are then spotted, either singly or in duplicate, onto polylysine-coated slides (Sigma Cat. No. P0425) using a robotic GMS 417 arrayer (Affymetrix, CA).

[0317] The boundaries of the spots on the microarray are marked with a diamond scriber (note that the spots become invisible after post-processing). The arrays are rehydrated by suspending the slides over a dish of warm particle free ddH₂O for approximately one minute (the spots will swell slightly but will not run into each other) and snap-dried on a 70-80° C. inverted heating block for 3 seconds. Nucleic acid is then UV crosslinked to the slide (Stratagene, Stratalinker, 65 mJ—set display to “650” which is 650×100 uJ). The arrays are placed in a slide rack. An empty slide chamber is prepared and filled with the following solution: 3.0 grams of succinic anhydride (Aldrich) was dissolved in 189 ml of 1-methyl-2-pyrrolidinone (rapid addition of reagent is crucial); immediately after the last flake of succinic anhydride is dissolved, 21.0 ml of 0.2 M sodium borate is mixed in and the solution is poured into the slide chamber. The slide rack is plunged rapidly and evenly in the slide chamber and vigorously shaken up and down for a few seconds, making sure the slides never leave the solution, and then mixed on an orbital shaker for 15-20 minutes. The slide rack is then gently plunged in 95° C. ddH₂O for 2 minutes, followed by plunging five times in 95% ethanol. The slides are then air dried by allowing excess ethanol to drip onto paper towels. The arrays are then stored in the slide box at room temperature until use.

[0318] Numerous methods may be used for attachment of the nucleic acid members of the invention to the substrate (a process referred as spotting). For example, polynucleotides are attached using the techniques of, for example U.S. Pat. No. 5,807,522, which is incorporated herein by reference for teaching methods of polymer attachment.

[0319] Alternatively, spotting may be carried out using contact printing technology.

[0320] Kits

[0321] The invention provides for kits for performing expression assays using the pain-specific arrays of the present invention. Such kits according to the present invention will at least comprise the pain-specific arrays of the invention having associated differentially expressed nucleic acid members and packaging means therefore. The kits may further comprise one or more additional reagents employed in the various methods, such as: 1) primers for generating test polynucleotides; 2) dNTPs and/or rNTPs (either premixed or separate), optionally with one or more uniquely labeled dNTPs and/or rNTPs (e.g., biotinylated or Cy3 or Cy5 tagged dNTPs); 3) post synthesis labeling reagents, such as chemically active derivatives of fluorescent dyes; 4) enzymes, such as reverse transcriptases, DNA polymerases, and the like; 5) various buffer mediums, e.g., hybridization and washing buffers; 6) labeled probe purification reagents and components, like spin columns, etc.; and 7) signal generation and detection reagents, e.g., streptavidin-alkaline phosphatase conjugate, chemifluorescent or chemiluminescent substrate, and the like.

Therapeutic Agents and Screening Methods

[0322] The present invention provides a number of potentially therapeutic compounds which may be used to modulate the expression of genes which are differentially expressed in an animal subjected to pain, or which may be used to modulate the activity of a protein encoded by a differentially expressed polynucleotide sequence of the invention, or which may be used to modulate pain in an animal. Such therapeutic agents include, but are not limited to a chemical compound, a protein, an antibody, RNAi, and an antisense nucleic acid. In a further aspect, the invention provides a method for screening potentially therapeutic agents for the ability to modulate the expression of genes which are differentially expressed in an animal subjected to pain, and further provides pharmaceutical formulations comprising the therapeutic agents. In a still further embodiment, the present invention provides a method of screening potentially therapeutic agents for the ability to modulate the activity of one or more polypeptides encoded by one or more of the polynucleotide sequences indicated in Tables 1, 2, 3, 4, or 5, or Tables 10 and/or 11.

[0323] Therapeutic Agents

[0324] A therapeutic agent, useful in the present invention, changes (e.g., increases or decreases) the level of expression of at least one polynucleotide sequence that is differentially expressed in an animal subjected to pain. Preferably, a therapeutic agent causes a change in the level of expression of a polynucleotide sequence, that is, to increase or decrease the expression of a polynucleotide sequence that is differentially expressed in an animal subjected to pain, wherein the change results in the differentially expressed sequence being no longer differentially expressed by at least 1.4 fold (or differentially expressed by 1.2 fold in combination with a statistical significance of p<0.05 in at least three replicate assays) relative to the expression of the same sequence in a naïve animal.

[0325] In another embodiment, a therapeutic agent according to the invention can modulate the activity of one or more of the polypeptides specifically indicated in Tables 1, 2, 3, 4, or 5, or encoded by one or more of the polynucleotide sequences of Tables 1, 2, 3, 4, or 5.

[0326] In another embodiment, a therapeutic agent according to the invention can ameliorate at least one of the symptoms and/or physiological changes associated with pain including, but not limited to mechanical allodynia and hyperalgesia, and temperature allodynia and hyperalgesia.

[0327] The candidate therapeutic agent may be a synthetic compound, or a mixture of compounds, or may be a natural product (e.g. a plant extract or culture supernatant). According to the invention, a therapeutic agent or compound can be a candidate or test compound. Similarly, according to the invention, a candidate or test compound can be a therapeutic agent.

[0328] Suitable test compounds for use in the screening assays of the invention can be obtained from any suitable source, e.g., conventional compound libraries. The test compounds can also be obtained using any of the numerous approaches in combinatorial library methods known in the art, including: biological libraries; spatially addressable parallel solid phase or solution phase libraries; synthetic library methods requiring deconvolution; the “one-bead one-compound” library method; and synthetic library methods using affinity chromatography selection. The biological library approach is limited to peptide libraries, while the other four approaches are applicable to peptide, non-peptide oligomer or small molecule libraries of compounds [Lam, (1997)]. Examples of methods for the synthesis of molecular libraries can be found in the art. Libraries of compounds may be presented in solution or on beads, bacteria, spores, plasmids or phage.

[0329] Candidate therapeutic agents or compounds from large libraries of synthetic or natural compounds may be screened as described below. Numerous means are currently used for random and directed synthesis of saccharide, peptide, and nucleic acid based compounds. Synthetic compound libraries are commercially available from a number of companies including Maybridge Chemical Co. (Trevillet, Cornwall, UK), Comgenex (Princeton, N.J.), Brandon Associates (Merrimack, NH), and Microsource (New Milford, Conn.). A rare chemical library is available from Aldrich (Milwaukee, Wis.). Combinatorial libraries are available and are prepared. Alternatively, libraries of natural compounds in the form of bacterial, fungal, plant and animal extracts are available from e.g., Pan Laboratories (Bothell, Wash.) or MycoSearch (NC), or are readily produced by methods well known in the art. Additionally, natural and synthetically produced libraries and compounds are readily modified through conventional chemical, physical, and biochemical means.

[0330] Small Molecules

[0331] Useful compounds may be found within numerous chemical classes. Useful compounds may be organic compounds, or small organic compounds. Small organic compounds, or “small molecules” have a molecular weight of more than 50 yet less than about 2,500 daltons, preferably less than about 750, more preferably less than about 350 daltons. Exemplary classes include heterocycles, peptides, saccharides, steroids, and the like. Small molecules can be nucleic acids, peptides, polypeptides, peptidomimetics, carbohydrates, lipids or other organic (carbon-containing) or inorganic molecules. The compounds may be modified to enhance efficacy, stability, pharmaceutical compatibility, and the like. Structural identification of an agent may be used to identify, generate, or screen additional agents. For example, where peptide agents are identified, they may be modified in a variety of ways to enhance their stability, such as using an unnatural amino acid, such as a D-amino acid, particularly D-alanine, by functionalizing the amino or carboxylic terminus, e.g. for the amino group, acylation or alkylation, and for the carboxyl group, esterification or amidification, or the like.

[0332] Antisense Therapy

[0333] In one embodiment, a therapeutic agent, according to the invention, can be a differentially expressed nucleic acid or a sequence complementary thereto, useful in antisense therapy. The antisense sequence of a polynucletoide which is differentially expressed in an animal subjected to pain may be determined using the either the sequence indicated by accession number in tables 4-5, or the sequence of the rat and/or human differentially expressed sequences shown in Table 2-3 as set forth in the corresponding SEQ ID No. As used herein, antisense therapy refers to administration or in situ generation of oligonucleotide molecules or their derivatives which specifically hybridize (e.g., bind) under cellular conditions with the cellular mRNA and/or genomic DNA, thereby inhibiting transcription and/or translation of that gene. The binding may be by conventional base pair complementarity, or, for example, in the case of binding to DNA duplexes, through specific interactions in the major groove of the double helix. In general, antisense therapy refers to the range of techniques generally employed in the art, and includes any therapy which relies on specific binding to oligonucleotide sequences.

[0334] An antisense construct of the present invention can be delivered, for example, as an expression plasmid which, when transcribed in the cell, produces RNA which is complementary to at least a unique portion of the cellular mRNA identified as being differentially expressed in an animal subjected to pain. The construction and use of expression plasmids is described above and may be adapted by one of skill in the art to include expression plasmids or vectors comprising anitsense oligonucleotides. Alternatively, the antisense construct is an oligonucleotide probe which is generated ex vivo and which, when introduced into the cell, causes inhibition of expression by hybridizing with the mRNA and/or genomic sequences of a differentially expressed nucleic acid. Such oligonucleotide probes are preferably modified oligonucleotides which are resistant to endogenous nucleases, e.g., exonucleases and/or endonucleases, and are therefore stable in vivo. Exemplary nucleic acid molecules for use as antisense oligonucleotides are phosphoramidate, phosphorothioate and methylphosphonate analogs of DNA (see also U.S. Pat. Nos. 5,176,996; 5,264,564; and 5,256,775). Additionally, general approaches to constructing oligomers useful in antisense therapy have been reviewed, for example, by Van der Krol et al. (1988) BioTechniques 6:958-976; and Stein et al. (1988) Cancer Res 48:2659-2668. With respect to antisense DNA, oligodeoxyribonucleotides derived from the translation initiation site, e.g., between the −10 and +10 regions of the nucleotide sequence of interest, are preferred.

[0335] Antisense approaches involve the design of oligonucleotides (either DNA or RNA) that are complementary to mRNA (i.e., differentially expressed mRNA). The antisense oligonucleotides will bind to the mRNA transcripts and prevent translation. Absolute complementarity, although preferred, is not required. In the case of double-stranded antisense nucleic acids, a single strand of the duplex DNA may thus be tested, or triplex formation may be assayed. The ability to hybridize will depend on both the degree of complementarity and the length of the antisense nucleic acid. Generally, the longer the hybridizing nucleic acid, the more base mismatches with an RNA it may contain and still form a stable duplex (or triplex, as the case may be). One skilled in the art can ascertain a tolerable degree of mismatch by use of standard procedures to determine the melting point of the hybridized complex.

[0336] Oligonucleotides that are complementary to the 5′ end of the differentially expressed mRNA, e.g., the 5′ untranslated sequence up to and including the AUG initiation codon, should work most efficiently at inhibiting translation. However, sequences complementary to the 3′ untranslated sequences of mRNAs have recently been shown to be effective at inhibiting translation of mRNAs as well. (Wagner, R. 1994. Nature 372:333). Therefore, oligonucleotides complementary to either the 5′ or 3′ untranslated, non-coding regions of a gene could be used in an antisense approach to inhibit translation of endogenous mRNA. Oligonucleotides complementary to the 5′ untranslated region of the mRNA should include the complement of the AUG start codon. Antisense oligonucleotides complementary to mRNA coding regions are typically less efficient inhibitors of translation but could also be used in accordance with the invention. Whether designed to hybridize to the 5′, 3′, or coding region of subject mRNA, antisense nucleic acids should be at least six nucleotides in length, and are preferably less than about 100 and more preferably less than about 50, 25, 17 or 10 nucleotides in length.

[0337] The oligonucleotides can be DNA or RNA or chimeric mixtures or derivatives or modified versions thereof, single-stranded or double-stranded. The oligonucleotide can be modified at the base moiety, sugar moiety, or phosphate backbone, for example, to improve stability of the molecule, hybridization, etc. The oligonucleotide may include other appended groups such as peptides (e.g., for targeting host cell receptors), or agents facilitating transport across the cell membrane (see, e.g., Letsinger et al., 1989, Proc. Natl. Acad. Sci. U.S.A. 86:6553-6556; Lemaitre et al., 1987, Proc. Natl. Acad. Sci. 84:648-652; PCT Publication No. WO 88/098 10, published Dec. 15, 1988) or the blood-brain barrier (see, e.g., PCT Publication No. WO 89/10 134, published Apr. 25, 1988), hybridization-triggered cleavage agents (See, e.g., Krol et al., 1988, BioTechniques 6:958-976), or intercalating agents (See, e.g., Zon, 1988, Pharm. Res. 5:539-549). To this end, the oligonucleotide may be conjugated to another molecule, e.g., a peptide, hybridization triggered cross-linking agent, transport agent, hybridization-triggered cleavage agent, etc.

[0338] The antisense oligonucleotide may comprise at least one modified base moiety which is selected from the group including but not limited to 5-fluorouracil, 5-bromouracil, 5-chlorouracil, 5-iodouracil, hypoxanthine, xantine, 4-acetylcytosine, 5-(carboxyhydroxytriethyl) uracil, 5-carboxymethylaminomethyl-2-thiouridine, 5-carboxymethylaminomethyluracil, dihydrouracil, beta-D-galactosylqueosine, inosine, N6-isopentenyladenine, 1-methylguanine, 1-methylinosine, 2,2-dimethylguanine, 2-methyladenine, 2-methylguanine, 3-methylcytosine, 5-methylcytosine, N6-adenine, 7-methylguanine, 5-methylaminomethyluracil, 5-methoxyaminomethyl-2-thiouracil, beta-D-mannosylqueosine, 5-methoxycarboxymethyluracil, 5-methoxyuracil, 2-methylthio-N-6-isopentenyladenine, uracil-5-oxyacetic acid (v), wybutoxosine, pseudouracil, queosine, 2-thiocytosine, 5-methyl-2-thiouracil, 2-thiouracil, 4-thiouracil, 5-methyluracil, uracil-5-oxyacetic acid methylester, uracil-5-oxyacetic acid (v), 5-methyl-2-thiouracil, 3-(3-amino-3-N-2-carboxypropyl) uracil, (acp3)w, and 2,6-diaminopurine.

[0339] The antisense oligonucleotide may also comprise at least one modified sugar moiety selected from the group including but not limited to arabinose, 2-fluoroarabinose, xylulose, and hexose.

[0340] The antisense oligonucleotide can also contain a neutral peptide-like backbone. Such molecules are termed peptide nucleic acid (PNA)-oligomers and are described, e.g., in Peny-O'Keefe et al. (1996) Proc. Natl. Acad. Sci. U.S.A. 93:14670 and in Eglom et al. (1993) Nature 365:566. One advantage of PNA oligomers is their capability to bind to complementary DNA essentially independently from the ionic strength of the medium due to the neutral backbone of the DNA. In yet another embodiment, the antisense oligonucleotide comprises at least one modified phosphate backbone selected from the group consisting of a phosphorothioate, a phosphorodithioate, a phosphoramidothioate, a phosphoramidate, a phosphordiamidate, a methylphosphonate, an alkyl phosphotriester, and a formacetal or analog thereof.

[0341] In yet a further embodiment, the antisense oligonucleotide is an α-anomeric oligonucleotide. An α-anomeric oligonucleotide forms specific double-stranded hybrids with complementary RNA in which, contrary to the usual n-units, the strands run parallel to each other (Gautier et al, 1987, Nucl. Acids Res. 15:6625-6641). The oligonucleotide is a 2′-O-methylribonucleotide (Inoue et al., 1987, Nucl. Acids Res. 15:6131-12148), or a chimeric RNA-DNA analogue (Jnoue et al., 1987, FEBS Lett. 215:327-330).

[0342] Oligonucleotides of the invention may be synthesized by standard methods known in the art, e.g., by use of an automated DNA synthesizer (such as are commercially available from Biosearch, Applied Biosystems, etc.) based on the known sequence of the differentially expressed nucleic acid sequences. As examples, phosphorothioate oligonucleotides may be synthesized by the method of Stein et al. (1988, Nucl. Acids Res. 16:3209), methylphosphonate olgonucleotides can be prepared by use of controlled pore glass polymer supports (Sarin et al., 1988, Proc. Natl. Acad. Sci. U.S.A. 85:7448-7451), etc.

[0343] While antisense nucleotides complementary to a coding region sequence can be used, those complementary to the transcribed untranslated region and to the region comprising the initiating methionine are most preferred.

[0344] The antisense molecules can be delivered to cells which express the target nucleic acid in vivo. A number of methods have been developed for delivering antisense DNA or RNA to cells; e.g., antisense molecules can be injected directly into the tissue site, or modified antisense molecules, designed to target the desired cells (e.g., antisense linked to peptides or antibodies that specifically bind receptors or antigens expressed on the target cell surface) can be administered systemically.

[0345] However, it is often difficult to achieve intracellular concentrations of the antisense sufficient to suppress translation on endogenous mRNAs. Therefore, a preferred approach utilizes a recombinant DNA construct in which the antisense oligonucleotide is placed under the control of a strong pol III or pol II promoter. The use of such a construct to transfect target cells in an animal will result in the transcription of sufficient amounts of single stranded RNAs that will form complementary base pairs with the endogenous transcripts and thereby prevent translation of the target mRNA. For example, a vector can be introduced in vivo such that it is taken up by a cell and directs the transcription of an antisense RNA. Such a vector can remain episomal or become chromosomally integrated, as long as it can be transcribed to produce the desired antisense RNA. Such vectors can be constructed by recombinant DNA technology methods standard in the art, combined with those described above. Vectors can be plasmid, viral, or others known in the art for replication and expression in mammalian cells. Expression of the sequence encoding the antisense RNA can be by any promoter known in the art to act in animal, preferably mammalian cells. Such promoters can be inducible or constitutive. Such promoters include but are not limited to: the SV40 early promoter region (Bemoist and Chambon, 1981, Nature 290:304-3 10), the promoter contained in the 3′ long terminal repeat of Rous sarcoma virus (Yamamoto et al., 1980, Cell 22:787-797), the herpes thymidine kinase promoter (Wagner et al., 1981, Proc. Natl. Acad. Sci. U.S.A. 78:1441-1445), the regulatory sequences of the metallothionein gene (Brinster et al, 1982, Nature 296:39-42), etc. Any type of plasmid, cosmid, YAC or viral vector can be used to prepare the recombinant DNA construct which can be introduced directly into the tissue site; e.g., the spinal cord, or dorsal root ganglion. Alternatively, viral vectors can be used which selectively infect the desired tissue (e.g., for brain, herpesvirus vectors may be used), in which case administration may be accomplished by another route (e.g., systemically).

[0346] Ribozymes

[0347] In another aspect of the invention, ribozyme molecules designed to catalytically cleave target mRNA transcripts can be used to prevent translation of target mRNA and expression of a target protein (See, e.g., PCT International Publication WO90/11364, published Oct. 4, 1990; Sarver et al., 1990, Science 247:1222-1225 and U.S. Pat. No. 5,093,246). While ribozymes that cleave mRNA at site specific recognition sequences can be used to destroy target mRNAs, the use of hammerhead ribozymes is preferred. Hammerhead ribozymes cleave mRNAs at locations dictated by flanking regions that form complementary base pairs with the target mRNA. The sole requirement is that the target mRNA have the following sequence of two bases: 5′-UG-3′. Ribozymes, useful in the present invention may be designed based on the known sequence of the nucleic acid sequence identified as being differentially expressed in an animal subjected to pain as described above. The construction and production of hammerhead ribozymes is well known in the art and is described more fully in Haseloff and Gerlach, 1988, Nature, 334:585-591. Preferably the ribozyme is engineered so that the cleavage recognition site is located near the 5′ end of the target mRNA; i.e., to increase efficiency and minimize the intracellular accumulation of non-functional mRNA transcripts.

[0348] The ribozymes of the present invention also include RNA endoribonucleases (hereinafter “Cech-type ribozymes”) such as the one which occurs naturally in Tetrahymena thermophila (known as the IVS, or L-19IVS RNA) and which has been extensively described by Thomas Cech and collaborators (Zaug, et al., 1984, Science, 224:574-578; Zaug and Cech, 1986, Science, 231:470-475; Zaug, et al., 1986, Nature, 324:429-433; published International patent application No. WO88/04300 by University Patents Inc.; Been and Cech, 1986, Cell, 47:207-216). The Cech-type ribozymes have an eight base pair active site which hybridizes to a target RNA sequence whereafter cleavage of the target RNA takes place. The invention encompasses those Cech-type ribozymes which target eight base-pair active site sequences that are present in a target gene.

[0349] As in the antisense approach, the ribozymes can be composed of modified oligonucleotides (e.g., for improved stability, targeting, etc.) and should be delivered to cells which express the target gene in vivo. A preferred method of delivery involves using a DNA construct “encoding” the ribozyme under the control of a strong constitutive pol III or pol II promoter, so that transfected cells will produce sufficient quantities of the ribozyme to destroy endogenous messages and inhibit translation. Because ribozymes, unlike antisense molecules, are catalytic, a lower intracellular concentration is required for efficiency.

[0350] Antisense RNA, DNA, and ribozyme molecules of the invention may be prepared by any method known in the art for the synthesis of DNA and RNA molecules. These include techniques for chemically synthesizing oligodeoxyribonucleotides and oligoribonucleotides well known in the art such as for example solid phase phosphoramidite chemical synthesis. The sequences of the antisense and ribozyme molecules will be based on the known sequence of the differentially expressed nucleic acid molecules. Alternatively, RNA molecules may be generated by in vitro and in vivo transcription of DNA sequences encoding the antisense RNA molecule. Such DNA sequences may be incorporated into a wide variety of vectors which incorporate suitable RNA polymerase promoters such as the T7 or SP6 polymerase promoters. Alternatively, antisense cDNA constructs that synthesize antisense RNA constitutively or inducibly, depending on the promoter used, can be introduced stably into cell lines.

[0351] Moreover, various well-known modifications to nucleic acid molecules may be introduced as a means of increasing intracellular stability and half-life. Possible modifications include but are not limited to the addition of flanking sequences of ribonucleotides or deoxyribonucleotides to the 5′ and/or 3′ ends of the molecule or the use of phosphorothioate or 2′ O-methyl rather than phosphodiesterase linkages within the oligodeoxyribonucleotide backbone.

[0352] RNAi Therapy

[0353] In another embodiment, a therapeutic agent according to the invention can be a double stranded RNAi molecule that is specifically targeted to one or more of the polynucleotide sequences which are differentially expressed in an animal subjected to pain relative to an animal that is not subjected to pain (see Tables 1, 2, 3, 4, or 5). As used herein, RNAi or RNA interference refers to the gene-specific, double stranded RNA (dsRNA) mediated, post-transcriptional silencing of gene expression as described in the review by Hannon, G., (2002) Nature 418, 244-250, which is herein incorporated in its entirety. Current experimental evidence indicates that RNAis specific for a target RNA are recognized and processed into 21 and 23 nucleotide small interfering RNAs (siRNAs) by the Dicer RNase III endonuclease. SiRNAs are then incorporated into a RNA induced silencing complex (RISC) which becomes activated by unwinding of the duplex siRNA. Activated RISC complexes then promote RNA degradation and translation inhibition of the target RNA.

[0354] In mammals, RNAi therapy, according to the invention, refers to gene-specific suppression that can be achieved by generating siRNA (Elbashir, S. M. et al. (2001) Nature (London) 411, 494-498). In vitro synthesized siRNAs can be prepared by any method known in the art for the synthesis of RNA molecules. These include techniques for chemically synthesizing oligoribonucleotides that are well known in the art, for example, solid phase phosphoramidite chemical synthesis. The sequences of the siRNA molecules are based on the known sequence of the differentially expressed nucleic acid molecules. Alternatively, siRNA molecules can be generated by the T7 or SP6 polymerase promoter driven in vitro transcription of DNA sequences encoding the siRNA molecule. In vitro synthesized siRNAs can be delivered to cells either by direct injection of in vitro synthesized siRNAs into the tissue site. Alternatively, modified siRNAs, designed to target the desired cells (via linkage to peptides or antibodies that specifically bind to cell surface receptors or antigens), can be administered systemically.

[0355] In a preferred embodiment, the siRNAs of the invention are delivered to a target cell as an expression plasmid under the control of a RNA polymerase II or III promoter. When transcribed in the cell, siRNA is generated which is complementary to a cellular mRNA identified as being differentially expressed in an animal subjected to pain. The construction and use of expression plasmids is described above and may be adapted by one of skill in the art to include siRNA expression plasmids. Such vectors can be constructed by recombinant DNA technology methods standard in the art, combined with those described above. Vectors can be plasmid, viral, or others known in the art for replication and expression in mammalian cells. Expression of the sequence encoding the siRNA can be by any promoter known in the art to act in an animal, preferably mammalian cells. Such promoters can be inducible or constitutive. Such promoters include but are not limited to: the SV40 early promoter region (Bernoist and Chambon, 1981, Nature 290:304-3 10), the promoter contained in the 3′ long terminal repeat of Rous sarcoma virus (Yamamoto et al., 1980, Cell 22:787-797), the herpes thymidine kinase promoter (Wagner et al., 1981, Proc. Natl. Acad. Sci. U.S.A. 78:1441-1445), the regulatory sequences of the metallothionein gene (Brinster et al, 1982, Nature 296:39-42), etc as well as neural specific promoters, for example the nestin promoter. Any plasmid, cosmid, YAC or viral vector can be used to prepare the recombinant DNA construct which can be introduced directly into the tissue site; e.g., the spinal cord, or dorsal root ganglion. Alternatively, viral vectors can be used which selectively infect the desired tissue (e.g., for brain, herpes virus vectors may be used), in which case administration may be accomplished by another route (e.g., systemically).

[0356] In a preferred embodiment, the siRNA expression vectors of the invention are synthesized from a DNA template under the control of an RNA polymerase III (Pol III) promoter in transfected cells or transgenic animals (see below). Pol III directs the synthesis of small, noncoding transcripts whose 3′ ends are defined by termination within a stretch of 4-5 thymidines (Ts) (Sui et al. PNAS (2002) vol. 99, 5515-5520). Addition of 3′ overhangs contributes to the activity of siRNA synthesized in vitro (Elbashir, S. M et al. (2001) Genes Dev. 15, 188-200). Transfection of such a construct into target cells results in the transcription of sufficient amounts of siRNAs to base pair with the endogenous transcripts, promote its degradation and thereby prevent translation of the target mRNA. The vector can remain episomal or become chromosomally integrated. Alternatively the construct may be incorporated into a viral vector such as herpes virus vectors as described supra.

[0357] An example of mouse U6 pol III transcribed siRNA expression plasmid is shown below where the 21 nucleotide sequence is specific for one or more of the differentially expressed sequences shown in Tables 1, 2, 3, 4, or 5 (see Sui et al. PNAS (2002) vol. 99, 5515-5520):

[chemical structure]

[0358] Supplemental Therapy

[0359] The differentially expressed nucleic acid sequences described herein may exhibit either increased or decreased expression. The antisense methods described above are directed primarily at inhibiting the expression of a differentially overexpressed sequence. Alternatively, in the situation where differential expression is manifested in a decrease in sequence expression, the underexpressed sequence may be supplied to the animal in an expression vector as described above. If for example, through the process of identifying and verifying the differential expression of nucleic acid sequences obtained from an animal subjected to pain, a sequence is identified which is expressed at a level at least 1.2 fold less than in a naïve animal in at least three replicate analyses with a significance of p<0.05 (or, alternatively, at least 1.4 fold less), the sequence may be cloned into a suitable expression vector for expression of the sequence in the animal subjected to pain. Either viral or non-viral gene delivery methods may be used to introduce the construct into the animal cells as described above. Briefly, the deficient sequence may be cloned into any expression vector known in the art which is compatible with the animal cell into which it is intended to be introduced, and which is capable of supporting expression of the recombinant sequence. The vector used may be chosen to replicate episomaly or may integrate in the cell chromosome, provided that either mode of replication permits the expression of the deficient nucleic acid sequence. Further, any promoter sequence which is sufficient to direct expression of the recombinant sequence may be used in the vector to direct expression of the sequence. In a preferred embodiment, the promoter is constitutively active in the animal, given that the goal is to attain a level of gene expression sufficient to replace the deficiently expressed sequence. In a further preferred embodiment, the promoter is a neuron-specific promoter. Vectors comprising the deficient sequence may be introduced into cells of the animal subjected to pain using any technique known to those of skill in the art including, but not limited to microinjection and viral delivery.

[0360] Similarly, those proteins which are encoded by polynucleotide sequences which are differentially expressed as indicated in Tables 1, 2, 3, 4, or 5, and which are also indicated in the column labeled “subcellular localization” (i.e., in Table 2) as being a secreted protein, may be screened for their ability to modulate the activity of one or more of the proteins indicated in Tables 1, 2, 3, 4, or 5, or screened for their ability to modulate pain in an animal.

[0361] Once a therapeutic gene is defined, whether it be an antisense molecule, ribozyme, or supplemental sequence, the gene sequence is subcloned into a vector suitable for the purpose of gene therapy. Murine leukemia virus (MLV)-based retroviral vectors are one of the most widely used gene delivery vehicles in gene therapy clinical trials and have been employed in almost 70% of approved protocols (Ali, M. et al., Gene Ther., 1:367-384, 1994; Marshall, E., Science, 269:1050-1055, 1995). Other useful vectors are also known in the art (e.g., Carter and Samulski, 2000, Int. J. Mol. Med. 6:17-27; Lever et al., 1999, Biochem. Soc. Trans. 27: 841-7). Methods for gene therapy of human diseases are described in U.S. Pat. Nos. 6,190,907; 6,187,305; 6,140,087; and 6,129,705.

[0362] Screening Assays

[0363] Protein Activity Regulators

[0364] Regulators as used herein, refer to compounds that affect the activity of a “differentially expressed protein” in vivo and/or in vitro. As used herein, the term “differentially expressed protein (or polypeptide)” will refer to the proteins of Table 1, 2, 3, 4, or 5 that are encoded by sequences that are differentially expressed in pain. Regulators can be agonists and antagonists of a differentially expressed polypeptide and can be compounds that exert their effect on the differentially expressed protein activity via the enzymatic activity, expression, post-translational modifications or by other means. Agonists of a differentially expressed protein are molecules which, when bound to a differentially expressed protein, increase or prolong the activity of a differentially expressed protein. Agonists of a differentially expressed protein include proteins, nucleic acids, carbohydrates, small molecules, or any other molecule which activate a differentially expressed protein. Antagonists of a differentially expressed protein are molecules which, when bound to a differentially expressed protein, decrease the amount or the duration of the activity of a differentially expressed protein. Antagonists include proteins, nucleic acids, carbohydrates, antibodies, small molecules, or any other molecule which decrease the activity of a “differentially expressed protein”. The activity of a differentially expressed protein, useful in the present invention is indicated in Table 2, 3, 4, or 5 either directly in columns labeled “identifier”, “description” and/or “protein type”, or may be inferred from the information provided in the column labeled “subcellular localization” (Table 2). For example, if a protein is localized to the cell membrane, then one of skill in the art would be able to determine that the activity of such a protein would be that of a receptor, for example, or an ion channel, and screen candidate compounds against this protein activity accordingly.

[0365] The term “modulate”, as it appears herein, refers to a change in the activity of a differentially expressed protein. For example, modulation may cause an increase or a decrease in enzymatic activity, binding characteristics, or any other biological, functional, or immunological properties of a differentially expressed protein.

[0366] As used herein, the terms “specific binding” or “specifically binding” refer to that interaction between a protein or peptide and an agonist, an antibody, or an antagonist. The interaction is dependent upon the presence of a particular structure of the protein recognized by the binding molecule (i.e., the antigenic determinant or epitope). For example, if an antibody is specific for epitope “A” the presence of a polypeptide containing the epitope A, or the presence of free unlabeled A, in a reaction containing free labeled A and the antibody will reduce the amount of labeled A that binds to the antibody.

[0367] The invention provides methods (also referred to herein as “screening assays”) for identifying compounds which can be used for the treatment of pain. The methods entail the identification of candidate or test compounds or agents (e.g., peptides, peptidomimetics, small molecules or other molecules) which bind to a differentially expressed protein and/or have a stimulatory or inhibitory effect on the biological activity of a differentially expressed protein or its expression and then determining which of these compounds have an effect on pain symptoms in an in vivo assay.

[0368] Candidate or test compounds or agents which bind to a differentially expressed protein and/or have a stimulatory or inhibitory effect on the activity or the expression of a differentially expressed protein are identified either in assays that employ cells which express a differentially expressed protein (cell-based assays) or in assays with an isolated differentially expressed protein (cell-free assays). The various assays can employ a variety of variants of a differentially expressed protein (e.g., full-length differentially expressed protein, a biologically active fragment of a differentially expressed protein, or a fusion protein which includes all or a portion of a differentially expressed protein). Moreover, a differentially expressed protein can be derived from any suitable mammalian species (e.g., human differentially expressed protein, rat differentially expressed protein or murine differentially expressed protein). The assay can be a binding assay entailing direct or indirect measurement of the binding of a test compound or a known differentially expressed protein ligand to a differentially expressed protein. The assay can also be an activity assay entailing direct or indirect measurement of the activity of a differentially expressed protein. The assay can also be an expression assay entailing direct or indirect measurement of the expression of a differentially expressed protein mRNA or a differentially expressed protein. The various screening assays are combined with an in vivo assay entailing measuring the effect of the test compound on the pain symptoms.

[0369] In one embodiment, the invention provides assays for screening candidate or test compounds which bind to or modulate the activity of a membrane-bound (cell surface expressed) form of the differentially expressed protein. Such assays can employ the full-length differentially expressed protein, a biologically active fragment of the differentially expressed protein, or a fusion protein which includes all or a portion of the differentially expressed protein. As described in greater detail below, the test compound can be obtained by any suitable means, e.g., from conventional compound libraries. Determining the ability of the test compound to bind to a membrane-bound form of the differentially expressed protein can be accomplished, for example, by coupling the test compound with a radioisotope or enzymatic label such that binding of the test compound to the differentially expressed protein-expressing cell can be measured by detecting the labelled compound in a complex. For example, the test compound can be labelled with ¹²⁵I, ³⁵S, ¹⁴C, or ³H, either directly or indirectly, and the radioisotope detected by direct counting of radioemmission or by scintillation counting. Alternatively, the test compound can be enzymatically labelled with, for example, horseradish peroxidase, alkaline phosphatase, or luciferase, and the enzymatic label detected by determination of conversion of an appropriate substrate to product.

[0370] In a competitive binding format, the assay comprises contacting the differentially expressed protein-expressing cell with a known compound which binds to the differentially expressed protein to form an assay mixture, contacting the assay mixture with a test compound, and determining the ability of the test compound to interact with the differentially expressed protein-expressing cell, wherein determining the ability of the test compound to interact with the differentially expressed protein-expressing cell comprises determining the ability of the test compound to preferentially bind the differentially expressed protein expressing cell as compared to the known compound.

[0371] In another embodiment, the assay is a cell-based assay comprising contacting a cell expressing a membrane-bound form of the differentially expressed protein (e.g., full-length differentially expressed protein, a biologically active fragment of the differentially expressed protein, or a fusion protein which includes all or a portion of the differentially expressed protein) expressed on the cell surface with a test compound and determining the ability of the test compound to modulate (e.g., stimulate or inhibit) the activity of the membrane-bound form of the differentially expressed protein. Determining the ability of the test compound to modulate the activity of the membrane-bound form of the differentially expressed protein can be accomplished by any method suitable for measuring the activity of the differentially expressed protein, e.g., any method suitable for measuring the activity of a G-protein coupled receptor or other seven-transmembrane receptor (described in greater detail below). The activity of a seven-transmembrane receptor can be measured in a number of ways, not all of which are suitable for any given receptor. Among the measures of activity are: alteration in intracellular Ca2+ concentration, activation of phospholipase C, alteration in intracellular inositol triphosphate (IP3) concentration, alteration in intracellular diacylglycerol (DAG) concentration, and alteration in intracellular adenosine cyclic 3′,5′-monophosphate (cAMP) concentration.

[0372] The present invention includes biochemical, cell free assays that allow the identification of inhibitors and agonists of phosphodiesterases (PDEs) suitable as lead structures for pharmacological drug development. Such assays involve contacting a form of a differentially expressed protein (e.g., full-length differentially expressed protein, a biologically active fragment of a differentially expressed protein, or a fusion protein comprising all or a portion of a differentially expressed protein) with a test compound and determining the ability of the test compound to act as an antagonist (preferably) or an agonist of the enzymatic activity of a differentially expressed protein. In one embodiment, the assay includes monitoring the PDE activity of a differentially expressed protein by measuring the conversion of either cAMP or cGMP to its nucleoside monophosphate after contacting a differentially expressed protein with a test compound.

[0373] For example, cAMP and cGMP levels can be measured by the use of the tritium containing compounds 3HcAMP and 3HcGMP as described in [Hansen, R. S., and Beavo, J. A., PNAS USA1982;79: 2788-92]. To screen a compound pool comprised of a large number of compounds, the microtiter plate-based scintillation proximity assay (SPA) as described in [Bardelle, C. et al. (1999) Anal. Biochem. 275: 148-155] can be applied.

[0374] Alternatively, the phosphodiesterase activity of the recombinant protein can be assayed using a commercially available SPA kit (Amersham Pharmacia). The PDE enzyme hydrolyzes cyclic nucleotides, e.g. cAMP and cGMP to their linear counterparts. The SPA assay utilizes the tritiated cyclic nucleotides [3H]cAMP or [3H]cGMP, and is based upon the selective interaction of the tritiated non cyclic product with the SPA beads whereas the cyclic substrates are not effectively binding. Radiolabelled product bound to the scintillation beads generates light that can be analyzed in a scintillation counter.

[0375] The cell-free assays of the present invention are amenable to use of either a membrane-bound form of the differentially expressed protein or a soluble fragment thereof. In the case of cell-free assays comprising the membrane-bound form of the polypeptide, it may be desirable to utilize a solubilizing agent such that the membrane-bound form of the polypeptide is maintained in solution. Examples of such solubilizing agents include, but are not limited to, non-ionic detergents such as n-octylglucoside, n-dodecylglucoside, n-dodecylmaltoside, octanoyl-N-methyl-glucamide, decanoyl-N-methylglucamide, Triton X-100, Triton X-114, Thesit, Iso-tri-decy-poly-(ethylene glycol ether)n, 3-[(3-cholamidopropyl)dimethylamminio]-1-propane sulfonate (CHAPS), 3-[(3-cholamidopropyl)dimethylamminio]-2-hydroxy-1-propane sulfonate (CHAPSO), or N-dodecyl=N,N-dimethyl-3-ammonio-1-propane sulfonate.

[0376] In one embodiment, the invention provides assays for screening candidate or test compounds which bind to or modulate the activity of a differentially expressed protein. Such assays can employ full-length differentially expressed protein, a biologically active fragment of a differentially expressed protein, or a fusion protein which includes all or a portion of a differentially expressed protein. As described in greater detail below, the test compound can be obtained by any suitable means, e.g., from conventional compound libraries.

[0377] Determining the ability of the test compound to modulate the activity of a differentially expressed protein can be accomplished, for example, by determining the ability of a differentially expressed protein to bind to or interact with a target molecule. The target molecule can be a molecule with which a differentially expressed protein binds or interacts with in nature. The target molecule can be a component of a signal transduction pathway which facilitates transduction of an extracellular signal. The target differentially expressed protein molecule can be, for example, a second intracellular protein which has catalytic activity or a protein which facilitates the association of downstream signaling molecules with a differentially expressed protein.

[0378] Determining the ability of a differentially expressed protein to bind to or interact with a target molecule can be accomplished by one of the methods described above for determining direct binding. In one embodiment, determining the ability of a polypeptide of the invention to bind to or interact with a target molecule can be accomplished by determining the activity of the target molecule. For example, the activity of the target molecule can be determined by detecting induction of a cellular second messenger of the target (e.g., intracellular Ca2+, diacylglycerol, IP3, etc.), detecting catalytic/enzymatic activity of the target on an appropriate substrate, detecting the induction of a reporter gene (e.g., a regulatory element that is responsive to a polypeptide of the invention operably linked to a nucleic acid encoding a detectable marker, e.g., luciferase), or detecting a cellular response.

[0379] In various embodiments of the above assay methods of the present invention, it may be desirable to immobilize a differentially expressed protein (or a differentially expressed protein target molecule) to facilitate separation of complexed from uncomplexed forms of one or both of the proteins, as well as to accommodate automation of the assay. Binding of a test compound to a differentially expressed protein, or interaction of a differentially expressed protein with a target molecule in the presence and absence of a candidate compound, can be accomplished in any vessel suitable for containing the reactants. Examples of such vessels include microtitre plates, test tubes, and micro-centrifuge tubes. In one embodiment, a fusion protein can be provided which adds a domain that allows one or both of the proteins to be bound to a matrix. For example, glutathione-5-transferase (GST) fusion proteins or glutathione-5-transferase fusion proteins can be adsorbed onto glutathione sepharose beads (Sigma Chemical; St. Louis, Mo.) or glutathione derivatized microtitre plates, which are then combined with the test compound or the test compound and either the non-adsorbed target protein or a differentially expressed protein, and the mixture incubated under conditions conducive to complex formation (e.g., at physiological conditions for salt and pH). Following incubation, the beads or microtitre plate wells are washed to remove any unbound components and complex formation is measured either directly or indirectly, for example, as described above. Alternatively, the complexes can be dissociated from the matrix, and the level of binding or activity of a differentially expressed protein can be determined using standard techniques.

[0380] Other techniques for immobilizing proteins on matrices can also be used in the screening assays of the invention. For example, either a differentially expressed protein or its target molecule can be immobilized utilizing conjugation of biotin and streptavidin. Biotinylated polypeptide of the invention or target molecules can be prepared from biotin-NHS(N-hydroxy-succinimide) using techniques well known in the art (e.g., biotinylation kit, Pierce Chemicals; Rockford, Ill.), and immobilized in the wells of streptavidin-coated plates (Pierce Chemical). Alternatively, antibodies reactive with a differentially expressed protein or target molecules but which do not interfere with binding of the polypeptide of the invention to its target molecule can be derivatized to the wells of the plate, and unbound target or polypeptide of the invention trapped in the wells by antibody conjugation. Methods for detecting such complexes, in addition to those described above for the GST-immobilized complexes, include immuno-detection of complexes using antibodies reactive with a differentially expressed protein or target molecule, as well as enzyme-linked assays which rely on detecting an enzymatic activity associated with a differentially expressed protein or target molecule.

[0381] Another technique for drug screening which may be used provides for high throughput screening of compounds having suitable binding affinity to the protein of interest as described in published PCT application WO84/03564. In this method, large numbers of different small test compounds are synthesized on a solid substrate, such as plastic pins or some other surface. The test compounds are reacted with a differentially expressed protein, or fragments thereof, and washed. Bound differentially expressed protein is then detected by methods well known in the art. Purified differentially expressed protein can also be coated directly onto plates for use in the afore-mentioned drug screening techniques. Alternatively, non-neutralizing antibodies can be used to capture the peptide and immobilize it on a solid support.

[0382] In another embodiment, one may use competitive drug screening assays in which neutralizing antibodies capable of binding differentially expressed protein specifically compete with a test compound for binding a differentially expressed protein. In this manner, antibodies can be used to detect the presence of any peptide which shares one or more antigenic determinants with a differentially expressed protein.

[0383] The screening assay can also involve monitoring the expression of a differentially expressed protein. For example, regulators of expression of a differentially expressed protein can be identified in a method in which a cell is contacted with a candidate compound and the expression of a differentially expressed protein or mRNA in the cell is determined. The level of expression of a differentially expressed protein or mRNA the presence of the candidate compound is compared to the level of expression of a differentially expressed protein or mRNA in the absence of the candidate compound. The candidate compound can then be identified as a regulator of expression of a differentially expressed protein based on this comparison. For example, when expression of a differentially expressed protein or mRNA protein is greater (statistically significantly greater) in the presence of the candidate compound than in its absence, the candidate compound is identified as a stimulator of a differentially expressed protein or mRNA expression. Alternatively, when expression of a differentially expressed protein or mRNA is less (statistically significantly less) in the presence of the candidate compound than in its absence, the candidate compound is identified as an inhibitor of a differentially expressed protein or mRNA expression. The level of a differentially expressed protein or mRNA expression in the cells can be determined by methods described below.

[0384] Screening for Therapeutic Agents Using Binding Assays

[0385] For binding assays, the test compound is preferably a small molecule which binds to and occupies the active site of a differentially expressed protein polypeptide, thereby making the ligand binding site inaccessible to substrate such that normal biological activity is prevented. Examples of such small molecules include, but are not limited to, small peptides or peptide-like molecules. Potential ligands which bind to a polypeptide of the invention include, but are not limited to, the natural ligands of known differentially expressed protein PDEs and analogues or derivatives thereof.

[0386] In binding assays, either the test compound or the differentially expressed polypeptide can comprise a detectable label, such as a fluorescent, radioisotopic, chemiluminescent, or enzymatic label, such as horseradish peroxidase, alkaline phosphatase, or luciferase. Detection of a test compound which is bound to differentially expressed polypeptide can then be accomplished, for example, by direct counting of radioemmission, by scintillation counting, or by determining conversion of an appropriate substrate to a detectable product. Alternatively, binding of a test compound to a differentially expressed polypeptide can be determined without labeling either of the interactants. For example, a microphysiometer can be used to detect binding of a test compound with a differentially expressed polypeptide. A microphysiometer (e.g., Cytosensor™) is an analytical instrument that measures the rate at which a cell acidifies its environment using a light-addressable potentiometric sensor (LAPS). Changes in this acidification rate can be used as an indicator of the interaction between a test compound and a differentially expressed protein [Haseloff, (1988)].

[0387] Determining the ability of a test compound to bind to differentially expressed protein also can be accomplished using a technology such as real-time Bimolecular Interaction Analysis (BIA) [McConnell, (1992); Sjolander, (1991)]. BIA is a technology for studying biospecific interactions in real time, without labeling any of the interactants (e.g., BIAcore™). Changes in the optical phenomenon surface plasmon resonance (SPR) can be used as an indication of real-time reactions between biological molecules.

[0388] In yet another aspect of the invention, a differentially expressed protein-like polypeptide can be used as a “bait protein” in a two-hybrid assay or three-hybrid assay [Szabo, (1995); U.S. Pat. No. 5,283,317), to identify other proteins which bind to or interact with a differentially expressed protein and modulate its activity.

[0389] The two-hybrid system is based on the modular nature of most transcription factors, which consist of separable DNA-binding and activation domains. Briefly, the assay utilizes two different DNA constructs. For example, in one construct, polynucleotide encoding a differentially expressed protein can be fused to a polynucleotide encoding the DNA binding domain of a known transcription factor (e.g., GAL-4). In the other construct a DNA sequence that encodes an unidentified protein (“prey” or “sample”) can be fused to a polynucleotide that codes for the activation domain of the known transcription factor. If the “bait” and the “prey” proteins are able to interact in vivo to form an protein-dependent complex, the DNA-binding and activation domains of the transcription factor are brought into close proximity. This proximity allows transcription of a reporter gene (e.g., LacZ), which is operably linked to a transcriptional regulatory site responsive to the transcription factor. Expression of the reporter gene can be detected, and cell colonies containing the functional transcription factor can be isolated and used to obtain the DNA sequence encoding the protein which interacts with a differentially expressed protein.

[0390] It may be desirable to immobilize either the differentially expressed protein (or polynucleotide) or the test compound to facilitate separation of the bound form from unbound forms of one or both of the interactants, as well as to accommodate automation of the assay. Thus, either the differentially expressed protein-like polypeptide (or polynucleotide) or the test compound can be bound to a solid support. Suitable solid supports include, but are not limited to, glass or plastic slides, tissue culture plates, microtiter wells, tubes, silicon chips, or particles such as beads (including, but not limited to, latex, polystyrene, or glass beads). Any method known in the art can be used to attach the differentially expressed protein-like polypeptide (or polynucleotide) or test compound to a solid support, including use of covalent and non-covalent linkages, passive absorption, or pairs of binding moieties attached respectively to the polypeptide (or polynucleotide) or test compound and the solid support. Test compounds are preferably bound to the solid support in an array, so that the location of individual test compounds can be tracked. Binding of a test compound to the differentially expressed protein (or a polynucleotide encoding for the differentially expressed protein) can be accomplished in any vessel suitable for containing the reactants. Examples of such vessels include microtiter plates, test tubes, and microcentrifuge tubes.

[0391] In one embodiment, the differentially expressed protein is a fusion protein comprising a domain that allows binding of the differentially expressed protein to a solid support. For example, glutathione-5-transferase fusion proteins can be adsorbed onto glutathione sepharose beads (Sigma Chemical, St. Louis, Mo.) or glutathione derivatized microtiter plates, which are then combined with the test compound or the test compound and the non-adsorbed differentially expressed protein; the mixture is then incubated under conditions conducive to complex formation (e.g., at physiological conditions for salt and pH). Following incubation, the beads or microtiter plate wells are washed to remove any unbound components. Binding of the interactants can be determined either directly or indirectly, as described above. Alternatively, the complexes can be dissociated from the solid support before binding is determined.

[0392] Other techniques for immobilizing proteins or polynucleotides on a solid support also can be used in the screening assays of the invention. For example, either the differentially expressed protein (or a polynucleotide encoding the differentially expressed protein) or a test com-pound can be immobilized utilizing conjugation of biotin and streptavidin. Biotinylated differentially expressed protein (or a polynucleotide encoding biotinylated differentially expressed protein) or test compounds can be prepared from biotin-NHS(N-hydroxysuccinimide) using techniques well known in the art (e.g., biotinylation kit, Pierce Chemicals, Rockford, Ill.) and immobilized in the wells of streptavidin-coated plates (Pierce Chemical). Alternatively, antibodies which specifically bind to the differentially expressed protein, polynucleotide, or a test compound, but which do not interfere with a desired binding site, such as the active site of the differentially expressed protein, can be derivatized to the wells of the plate. Unbound target or protein can be trapped in the wells by antibody conjugation.

[0393] Methods for detecting such complexes, in addition to those described above for the GST-immobilized complexes, include immunodetection of complexes using antibodies which specifically bind to the differentially expressed protein or test compound, enzyme-linked assays which rely on detecting an activity of the differentially expressed protein, and SDS gel electrophoresis under non-reducing conditions.

[0394] Screening for test compounds which bind to the differentially expressed protein or poly-nucleotide also can be carried out in an intact cell. Any cell which comprises the differentially expressed polypeptide or polynucleotide can be used in a cell-based assay system. A differentially expressed protein polynucleotide can be naturally occurring in the cell or can be introduced using techniques such as those described above. Binding of the test compound to the differentially expressed protein or a polynucleotide encoding the differentially expressed protein is determined as described above.

Functional Assays

[0395] Test compounds can be tested for the ability to increase or decrease activity of a differentially expressed polypeptide. The differentially expressed protein activity can be measured, for example, using methods described in the specific examples, below. differentially expressed protein activity can be measured after contacting either a purified differentially expressed protein or an intact cell with a test compound. A test compound which decreases the differentially expressed protein activity by at least about 10, preferably about 50, more preferably about 75, 90, or 100% is identified as a potential agent for decreasing the differentially expressed protein activity. A test compound which increases the differentially expressed protein activity by at least about 10, preferably about 50, more preferably about 75, 90, or 100% is identified as a potential agent for increasing the differentially expressed protein activity.

Gene Expression

[0396] In another embodiment, test compounds which increase or decrease the differentially expressed protein gene expression are identified (i.e., test compounds which increase or decrease the expression of a differentially expressed polynucleotide sequence of the invention). As used herein, the term “correlates with expression of a poly-nucleotide” indicates that the detection of the presence of nucleic acids, the same or related to a nucleic acid sequence encoding the differentially expressed protein, by northern analysis or realtime PCR is indicative of the presence of nucleic acids encoding the differentially expressed protein in a sample, and thereby correlates with expression of the transcript from the polynucleotide encoding the differentially expressed protein. The term “microarray”, as used herein, refers to an array of distinct polynucleotides or oligonucleotides arrayed on a substrate, such as paper, nylon or any other type of membrane, filter, chip, glass slide, or any other suitable solid support. A differentially expressed protein polynucleotide is contacted with a test compound, and the expression of an RNA or polypeptide product of the differentially expressed protein polynucleotide is determined. The level of expression of appropriate mRNA or polypeptide in the presence of the test compound is compared to the level of expression of mRNA or polypeptide in the absence of the test compound. The test compound can then be identified as a regulator of expression based on this comparison. For example, when expression of mRNA or polypeptide is greater in the presence of the test compound than in its absence, the test compound is identified as a stimulator or enhancer of the mRNA or polypeptide expression. Alternatively, when expression of the mRNA or polypeptide is less in the presence of the test compound than in its absence, the test compound is identified as an inhibitor of the mRNA or polypeptide expression.

[0397] The level of the differentially expressed protein mRNA or polypeptide expression in the cells can be determined by methods well known in the art for detecting mRNA or polypeptide. Either qualitative or quantitative methods can be used. The presence of polypeptide products of the differentially expressed protein polynucleotide can be determined, for example, using a variety of techniques known in the art, including immunochemical methods such as radioimmunoassay, Western blotting, and immunohistochemistry. Alternatively, polypeptide synthesis can be determined in vivo, in a cell culture, or in an in vitro translation system by detecting incorporation of labeled amino acids into the differentially expressed protein.

[0398] Such screening can be carried out either in a cell-free assay system or in an intact cell. Any cell which expresses the differentially expressed protein polynucleotide can be used in a cell-based assay system. The differentially expressed protein polynucleotide can be naturally occurring in the cell or can be introduced using techniques such as those described above. Either a primary culture or an established cell line can be used.

[0399] Screening of Therapeutic Agents Against Pain-Specific Array

[0400] In one embodiment the present invention provides a method for screening agents for their ability to regulate the expression of genes which are differentially expressed in an animal subjected to pain. In brief, the method comprises administering to an animal subjected to pain, such as an animal pain model, a potentially therapeutic agent, isolating nucleic acid from sensory neurons of the animal, preparing the nucleic acid for hybridization to a microarray as described above, and hybridizing the nucleic acid to a pain-specific microarray. The hybridization level is then compared to the hybridization of a nucleic acid sample contacted with the pain-specific microarray obtained from an animal subjected to pain, but not administered the potentially therapeutic agent. In one embodiment, the potentially therapeutic agent is deemed to be therapeutic if the expression level of the nucleic acid sequence obtained from the animal subjected to pain and treated with the agent is no longer differentially expressed by at least 1.4 fold, and wherein the expression of the nucleic acid sequence obtained from the animal subjected to pain but not treated with the agent remains differentially regulated. The nucleic acid sequences analyzed to determine therapeutic efficacy can include any of the sequences previously identified (see above) as being differentially expressed in an animal subjected to pain.

[0401] Animals may be administered any potentially therapeutic agent known in the art, including antisense molecules, ribozymes, and supplemental nucleic acid sequences as described above. Additional therapeutic agents include any agent known in the art which is routinely administered for the amelioration of pain including, but not limited to aspirin, ibuprofen, narcotics, steroidial and non-steroidial anti-inflammatories, and the like. These agents are administered according to dosing protocols well known in the art.

[0402] Screening of Therapeutic Agents Against Individual Genes that are Differentially Expressed in Pain

[0403] Candidate therapeutic agents of the invention are screened for their ability to regulate the expression of one or more isolated polynucleotide sequences which have been identified herein as differentially regulated in an animal which has been subjected to pain relative to an animal that is not subjected to pain. In one embodiment, the screen consists of administering a candidate therapeutic agent, as defined herein, or a placebo, to an animal that is subjected to pain and hybridizing a nucleic acid sample, corresponding to RNA obtained from such a treated or non treated animal, to a probe specific for a polynucleotide sequence selected from the group of isolated polynucleotide sequences of Tables 1, 2, 3, 4, or 5. In another embodiment, the screen consists of administering a candidate therapeutic agent, as defined herein, or a placebo, to an in vitro cell culture of primary cells for example, primary neurons, that naturally express polynucleotide sequences selected from the group of isolated polynucleotide sequences of Tables 1, 2, 3, 4, or 5. In a further embodiment, the screen consists of administering a candidate therapeutic agent, as defined herein, or a placebo, to cell lines that have been transfected with vectors that direct the expression of polynucleotide sequences selected from the group of isolated polynucleotide sequences of Tables 1, 2, 3, 4, or 5. In a further embodiment, the screen consists of administering a candidate therapeutic agent, as defined herein, or a placebo, to a transgenic animal in which a neural specific promoter drives the expression of a polynucleotide sequence selected from the group of isolated polynucleotide sequences of Tables 1, 2, 3, 4, or 5. In all instances, a 10% increase or decrease in the differential expression of a gene in response to a therapeutic compound is indicative of a therapeutic agent that can modulate the differential expression of a gene that is differentially regulated in an animal which has been subjected to pain relative to an animal that is not subjected to pain. In a preferred embodiment, nucleic acid samples obtained from treated and non-treated animals or in vitro cell cultures are hybridized to 1 or more, 2 or more, 5 or more, 50 or more, 100 or more, 500 or more, 1000 or more probes, each probe being specific to a polynucleotide sequence selected from the group of differentially expressed polynucleotide sequences of Tables 1, 2, 3, 4, or 5.

[0404] Methods for measuring the differential expression of one or more of the polynucleotides sequences of Tables 1, 2, 3, 4, or 5 in nucleic acid samples from treated animals relative to non-treated animals, are well known in the art and include, but are not limited to, reverse transcription PCR (RT-PCR; described in U.S. Pat. No. 5,4078,00), Taqman (as disclosed in U.S. Pat. Nos. 5,210,015 and 5,487,972), Molecular Beacon assays (as disclosed in WO 95/13399), Northern blot hybridization, S1 nuclease mapping, RNAse protection assays which are described in the literature. See, e.g., Sambrook, Fritsch & Maniatis, 1989, Molecular Cloning: A Laboratory Manual, Second Edition; Oligonucleotide Synthesis (M. J. Gait, ed., 1984); Nucleic Acid Hybridization (B. D. Harnes & S. J. Higgins, eds., 1984); A Practical Guide to Molecular Cloning (B. Perbal, 1984); and a series, Methods in Enzymology (Academic Press, Inc.); Short Protocols In Molecular Biology, (Ausubel et al., ed., 1995). References to patents and literature are by incorporated in their entirety.

[0405] Compounds identified as positives based on this screen can be further tested for activity in the in vitro cell culture assay, in vivo protein activity assay or analgesic assays, described herein, to determine if these compounds are effective at modulating differential gene expression in response to pain and ultimately attenuating pain itself.

Polypeptide Activity

[0406] In one embodiment, the present invention provides a method for screening potentially therapeutic agents which modulate the activity of one or more polypeptides encoded by one or more of the polynucleotide sequences in Tables 1, 2, 3, 4, or 5, such that if the activity of the polypeptide is increased in an animal subjected to pain, the therapeutic substance will decrease the activity of the polypeptide relative to the activity of the same polypeptide in an animal subjected to pain, but not treated with the therapeutic agent. Likewise, if the activity of the polypeptide is decreased in an animal subjected to pain, the therapeutic substance will increase the activity of the polypeptide relative to the activity of the same polypeptide in an animal subjected to the same pain, but not treated with the therapeutic agent.

[0407] The activity of the polypeptide molecules encoded by the polynucleotides indicated in Tables 1, 2, 3, 4, or 5 may be measured by any means known to those of skill in the art, and which are particular for the type of activity performed by the particular polypeptide. Examples of specific assays which may be used to measure the activity of particular polynucleotide products are shown below.

[0408] (a) G-protein Coupled Receptors

[0409] In one embodiment, the one or more of the differentially regulated polynucleotides of Tables 1, 2, 3, 4, or 5 may encode a G-protein coupled receptor. In one embodiment, the present invention provides a method of screening potential agonists and antagonists of the family of G-protein coupled receptors, including Gₛ, Gᵢ, and G_{q}, encoded by the differentially expressed polynucleotides of the present invention by measuring changes in the activity of these receptors in the presence of a candidate agonist or antagonist.

[0410] 1. Gᵢ-Coupled Receptor Screening

[0411] Cells (such as CHO cells, or primary cells) are stably transfected with the relevant receptor and with an inducible CRE-luciferase construct. Cells are grown in 50% Dulbecco's modified Eagle medium/50% F12 (DMEM/F12) supplemented with 10% FBS, at 37° C. in a humidified atmosphere with 10% CO₂ and are routinely split at a ratio of 1:10 every 2 or 3 days. Test cultures are seeded into 384-well plates at an appropriate density (e.g. 2000 cells/well in 35 μl cell culture medium) in DMEM/FI2 with FBS, and are grown for 48 hours (range: ˜24-60 hours, depending on cell line). Growth medium is then exchanged against serum free medium (SFM; e.g. Ultra-CHO), containing 0,1% BSA. Test compounds dissolved in DMSO are diluted in SFM and transferred to the test cultures (maximal final concentration 10 μmolar), followed by addition of forskolin (˜1 molar, final conc.) in SFM+0,1% BSA 10 minutes later. In case of antagonist screening both, an appropriate concentration of agonist, and forskolin are added. The plates are incubated at 37° C. in 10% CO₂ for 3 hours. Then the supernatant is removed, cells are lysed with lysis reagent (25 mmolar phosphate-buffer, pH 7,8, containing 2 mmolar DDT, 10% glycerol and 3% Triton X100). The luciferase reaction is started by addition of substrate-buffer (e.g. luciferase assay reagent, Promega) and luminescence is immediately determined (e.g. Berthold luminometer or Hamamatzu camera system).

[0412] 2. Gₛ-Coupled Receptor Screening

[0413] Cells (such as CHO, or primary cells) are stably transfected with the relevant receptor and with an inducible CRE-luciferase construct. Cells are grown in 50% Dulbecco's modified Eagle medium/50% F12 (DMEM/F12) supplemented with 10% FBS, at 37° C. in a humidified atmosphere with 10% CO₂ and are routinely split at a ratio of 1:10 every 2 or 3 days. Test cultures are seeded into 384-well plates at an appropriate density (e.g. 1000 or 2000 cells/well in 35 μl cell culture medium) in DMEM/F12 with FBS, and are grown for 48 hours (range: ˜24-60 hours, depending on cell line). The assay is started by addition of test-compounds in serum free medium (SFM; e.g. Ultra-CHO) containing 0,1% BSA: Test compounds are dissolved in DMSO, diluted in SFM and transferred to the test cultures (maximal final concentration 10 μmolar, DMSO conc. <0,6%). In case of antagonist screening an appropriate concentration of agonist is added 5-10 minutes later. The plates are incubated at 37° C. in 10% CO₂ for 3 hours. Then the cells are lysed with 10 μl lysis reagent per well (25 mmolar phosphate-buffer, pH 7,8, containing 2 mmolar DDT, 10% glycerol and 3% Triton X100) and the luciferase reaction is started by addition of 20 μl substrate-buffer per well (e.g. luciferase assay reagent, Promega). Measurement of luminescence is started immediately (e.g. Berthold luminometer or Hamamatzu camera system).

[0414] 3. G_{q}-Coupled Receptor Screening

[0415] Cells (such as CHO, or primary cells) are stably transfected with the relevant receptor. Cells expressing functional receptor protein are grown in 50% Dulbecco's modified Eagle medium/50% F12 (DMEM/F12) supplemented with 10% FBS, at 37° C. in a humidified atmosphere with 5% CO₂ and are routinely split at a cell line dependent ratio every 3 or 4 days. Test cultures are seeded into 384-well plates at an appropriate density (e.g. 2000 cells/well in 35 μl cell culture medium) in DMEM/F12 with FBS, and are grown for 48 hours (range: ˜24-60 hours, depending on cell line). Growth medium is then exchanged against physiological salt solution (e.g. Tyrode solution). Test compounds dissolved in DMSO are diluted in Tyrode solution containing 0.1% BSA and transferred to the test cultures (maximal final concentration 10 μmolar). After addition of the receptor specific agonist the resulting Gq-mediated intracellular calcium increase is measured using appropriate read-out systems (e.g. calcium-sensitive dyes).

[0416] (b) Ion Channels

[0417] Ion channels are integral membrane proteins involved in electrical signaling, transmembrane signal transduction, and electrolyte and solute transport. By forming macromolecular pores through the membrane lipid bilayer, ion channels account for the flow of specific ion species driven by the electrochemical potential gradient for the permeating ion. At the single molecule level, individual channels undergo conformational transitions (“gating”) between the ‘open’ (ion conducting) and ‘closed’ (non conducting) state. Typical single channel openings last for a few milliseconds and result in elementary transmembrane currents in the range of 10-9-10-12 Ampere. Channel gating is controlled by various chemical and/or biophysical parameters, such as neurotransmitters and intracellular second messengers (‘ligand-gated’ channels) or membrane potential (‘voltage-gated’ channels). Ion channels are functionally characterized by their ion selectivity, gating properties, and regulation by hormones and pharmacological agents. Because of their central role in signaling and transport processes, ion channels present ideal targets for pharmacological therapeutics in various pathophysiological settings.

[0418] In one embodiment, the one or more of the differentially regulated polynucleotides of Tables 1, 2, 3, 4, or 5 may encode an ion channel. In one embodiment, the present invention provides a method of screening potential activators or inhibitors of channel activity encoded by the differentially expressed polynucleotides of the present invention. Screening for compounds interacting with ion channels to either inhibit or promote their activity can be based on (1.) binding and (2.) functional assays in living cells (see for example, Hille, 1992, Ion Channels of Excitable Membranes Sunderland, Mass., Sinauer Associates, Inc.; incorporated herein by reference in its entirety).

[0419] 1. For ligand-gated channels, e.g. ionotropic neurotransmitter/hormone receptors, assays can be designed detecting binding to the target by competition between the compound and a labeled ligand.

[0420] 2. Ion channel function can be tested functionally in living cells. Target proteins are either expressed endogenously in appropriate reporter cells or are introduced recombinantly. Channel activity can be monitored by (2.1) concentration changes of the permeating ion (most prominently Ca2+ ions), (2.2) by changes in the transmembrane electrical potential gradient, and (2.3) by measuring a cellular response (e.g. expression of a reporter gene, secretion of a neurotransmitter) triggered or modulated by the target activity.
[0421] 2.1. Channel activity results in transmembrane ion fluxes. Thus activation of ionic channels can be monitored by the resulting changes in intracellular ion concentrations using luminescent or fluorescent indicators. Because of its wide dynamic range and availability of suitable indicators this applies particularly to changes in intracellular Ca2+ ion concentration ([Ca2+]i). [Ca2+]i can be measured, for example, by aequorin luminescence or fluorescence dye technology (e.g. using Fluo-3, Indo-1, Fura-2). Cellular assays can be designed where either the Ca2+ flux through the target channel itself is measured directly or where modulation of the target channel affects membrane potential and thereby the activity of co-expressed voltage-gated Ca2+ channels.
[0422] 2.2. Ion channel currents result in changes of electrical membrane potential (Vm) which can be monitored directly using potentiometric fluorescent probes. These electrically charged indicators (e.g. the anionic oxonol dye DiBAC4(3)) redistribute between extra- and intracellular compartment in response to voltage changes. The equilibrium distribution is governed by the Nernst-equation. Thus changes in membrane potential results in concomitant changes in cellular fluorescence. Again, changes in Vm might be caused directly by the activity of the target ion channel or through amplification and/or prolongation of the signal by channels co-expressed in the same cell.
[0423] 2.3. Target channel activity can cause cellular Ca2+ entry either directly or through activation of additional Ca2+ channel (see 2.1). The resulting intracellular Ca2+ signals regulate a variety of cellular responses, e.g. secretion or gene transcription. Therefore modulation of the target channel can be detected by monitoring secretion of a known hormone/transmitter from the target-expressing cell or through expression of a reporter gene (e.g. luciferase) controlled by an Ca2+-responsive promoter element (e.g. cyclic AMP/Ca2+-responsive elements; CRE).

[0424] (c) Transcription Factors

[0425] In one embodiment, one or more of the differentially expressed polynucleotide sequences of Tables 1, 2, 3, 4, or 5 may encode a transcription factor. The activity of such a transcription factor may be measured, for example, by a promotor assay which measures the ability of the transcription factor to initiate transcription of a test sequence linked to a particular promotor. In one embodiment, the present invention provides a method for screening a test compound for its ability to modulate the activity of such a transcription factor by measuring the changes in the expression of a test gene which is regulated by a promoter which is responsive to the transcription factor.

[0426] A promoter assay can be set up with a human hepatocellular carcinoma cell HepG2 that is stably transfected with a luciferase gene under the control of a X (e.g. thyroid hormone) regulated promoter. The vector 2xIROluc, which can be used for transfection, carries a thyroid hormone responsive element (TRE) of two 12 bp inverted palindromes separated by an 8 bp spacer in front of a tk minimal promoter and the luciferase gene.

[0427] Test cultures are seeded in 96 well plates in serum—free Eagle's Minimal Essential Medium supplemented with glutamine, tricine, sodium pyruvate, non-essential amino acids, insulin, selen, transferrin, and are cultivated in a humidified atmosphere at 10% CO₂ at 37° C. After 48 hours of incubation serial dilutions of test compounds or reference compounds (L-T3, L-T4 e.g.) and costimulator if appropriate (final concentration 1 nM) are added to the cell cultures and incubation is continued for the optimal time (e.g. another 4-72 hours). The cells are then lysed by addition of buffer containing Triton X100 and luciferin and the luminescence of luciferase induced by T3 or other compounds is measured in a luminometer. For each concentration of a test compound replicates of 4 can be tested. EC50—values for each test compound can be calculated by use of, for example, the Graph Pad Prism Scientific software.

Screening of Therapeutic Agents that Modulate the In Vivo Activity of Proteins Encoded by Genes That are Differentially Expressed in Pain

[0428] The invention further provides for a screen of therapeutic compounds that modulate the in vivo activity of proteins encoded by genes that are differentially expressed in an animal subjected to pain (see Tables 1, 2, 3, 4, or 5). Methods for measuring changes in the in vivo activity of the proteins of the invention are well known in the art and include, but are not limited to, testing for changes in enzymatic activity, G coupled receptor activity or ion channel activity (as described herein under Polypeptide Activity); transcription factor function or the activity of signal tranduction pathway intermediates. Generally, these methods involve administering a candidate compound, as defined herein, or a placebo, to an animal that has been subjected to pain, preparing protein extracts from neural tissues and testing for a modulation in the protein activity in the extract in response to the candidate compound. In one embodiment, “protein activity” refers to the activity of a protein that is encoded by a gene that has been identified as a gene that is differentially expressed in an animal subjected to pain. In another embodiment, “protein activity” refers to the activity of one or more proteins whose activity is modulated by a protein that is encoded by a gene that has been identified as a gene that is differentially expressed in an animal subjected to pain.

[0429] In one embodiment, the “protein activity”, according to the invention, refers to the ability of one or more ligands to bind to cell surface receptors that are differentially expressed in animals subjected to pain. For example, WO0102566A1 describes a screen for compounds that modulate the binding of glutamate to glutamate binding receptors.

[0430] In another embodiment, the “protein activity”, according to the invention, is controlled by post-translational protein modification, e.g. phosphorylation or dephosphorylation. For example the protein, identified as being encoded by a gene that is differentially expressed in animals subjected to pain, may be a kinase, whose activity is modulated in response to a candidate compound either by direct phosphorylation or dephosphorylation. Alternatively, the activity of the kinase can be determined by assaying the phosphorylation of one or more substrates of the kinase. Methods for measuring the phosphorylation state of a protein are well known to a person skilled in the art. Typically radioactive phosphate is administered to a test animal that is then subjected to pain in the presence or absence of a therapeutic compound. Protein extracts are then prepared from neurological tissues and the protein of interest is isolated by immunoprecipitation and analyzed by SDS polyacrylamide electrophoresis. A 10% or more increase or decrease in the level of phosphorylation of the protein of interest in the presence of a compound relative to the level of phosphorylation in the absence of the compound is indicative of a compound that modulates the “protein activity”.

[0431] More generally, a gene, that is differentially expressed in animals subjected to pain, may encode a kinase or phosphatase that is part of a signal transduction pathway known in the art. If so, modulation of the activity of the kinase or phosphatase in response to a candidate compound can be determined by assaying the activity of pathway intermediates that are found downstream of the kinase or phosphatase in the pathway. For example, the activity of a kinase or phosphatase can be determined by measuring effects on gene expression or transcription factor activity. Methods for measuring differential gene expression or transcription factor function are well known in the art and are described supra. For example, the binding activity of a transcription factor to its cognate DNA binding site can be tested in protein extracts derived from treated animals using a mobility shift type analysis (see, e.g., Sambrook, Fritsch & Maniatis, 1989, Molecular Cloning: A Laboratory Manual, Second Edition; Short Protocols In Molecular Biology, (Ausubel et al., ed., 1995)). In addition, the ability of a transcription factor to activate transcription from a promoter containing one or more cognate DNA binding sites can also be tested using standard reporter type assays (GFP, CAT, lacZ) that are also well known in the art (See Ausubel et al; supra).

Modeling of Regulators

[0432] Computer modeling and searching technologies permit identification of compounds, or the improvement of already identified compounds, that can modulate the differentially expressed protein expression or activity. Having identified such a compound or composition, the active sites or regions are identified. Such sites might typically be the enzymatic active site, regulator binding sites, or ligand binding sites. The active site can be identified using methods known in the art including, for example, from the amino acid sequences of peptides, from the nucleotide sequences of nucleic acids, or from study of complexes of the relevant compound or composition with its natural ligand. In the latter case, chemical or X-ray crystallographic methods can be used to find the active site by finding where on the factor the complexed ligand is found.

[0433] Next, the three dimensional geometric structure of the active site is determined. This can be done by known methods, including X-ray crystallography, which can determine a complete molecular structure. On the other hand, solid or liquid phase NMR can be used to determine certain intramolecular distances. Any other experimental method of structure determination can be used to obtain partial or complete geometric structures. The geometric structures may be measured with a complexed ligand, natural or artificial, which may increase the accuracy of the active site structure determined.

[0434] If an incomplete or insufficiently accurate structure is determined, the methods of computer based numerical modeling can be used to complete the structure or improve its accuracy. Any recognized modeling method may be used, including parameterized models specific to particular biopolymers such as proteins or nucleic acids, molecular dynamics models based on computing molecular motions, statistical mechanics models based on thermal ensembles, or combined models. For most types of models, standard molecular force fields, representing the forces between constituent atoms and groups, are necessary, and can be selected from force fields known in physical chemistry. The incomplete or less accurate experimental structures can serve as constraints on the complete and more accurate structures computed by these modeling methods.

[0435] Finally, having determined the structure of the active site, either experimentally, by modeling, or by a combination, candidate modulating compounds can be identified by searching databases containing compounds along with information on their molecular structure. Such a search seeks compounds having structures that match the determined active site structure and that interact with the groups defining the active site. Such a search can be manual, but is preferably computer assisted. These compounds found from this search are potential the differentially expressed protein modulating compounds.

[0436] Alternatively, these methods can be used to identify improved modulating compounds from an already known modulating compound or ligand. The composition of the known compound can be modified and the structural effects of modification can be determined using the experimental and computer modeling methods described above applied to the new composition. The altered structure is then compared to the active site structure of the compound to determine if an improved fit or interaction results. In this manner systematic variations in composition, such as by varying side groups, can be quickly evaluated to obtain modified modulating compounds or ligands of improved specificity or activity.

Diagnostic Assays

[0437] The present invention provides a method for detecting pain in an animal suspected of having pain, wherein the amount of one or more polynucleotide and/or polypeptide sequences described herein, particularly in Table 11, is measured in the animal and compared with the amount measured in an animal which is not suspected of having pain. If an increase or decrease in the amount of the polynucleotide and/or polypeptide sequence of at least 1.2 fold and statistically significant at P<0.05 is measured, then the animal suspected of having pain is identified as having pain. Preferably the amount of a polynucleotide and/or polypeptide sequence measured in an animal suspected of having pain will be increased or decreased by 1.4 fold relative to the amount measured in an animal not suspected of having pain.

[0438] The amount of a polynucleotide and/or polypeptide sequence described herein may be measured from any tissue/fluid in an animal, but is preferably measured in a sensory neuron such as a DH neuron or DRG neuron. In one embodiment, a polynucleotide/polypeptide sequence of the invention is expressed in a sensory neuron and then secreted into the blood, lymph, or CSF, wherein it is subsequently detected. Alternatively, or in addition, a polypeptide and/or polynucleotide sequence can be measured in a “patient sample” which includes, but is not limited to blood, serum, plasma, and cerebrospinal fluid.

[0439] Sensory neuron and/or patient samples may be obtained and utilized according to methods which are well known in the art, and screened, according to the invention, to detect the presence of one or more of the sequences of Tables 1-11 by methods which are well known in the art. “Detecting” as used herein refers to the identification of the presence or absence of a molecule in a sample. Where the molecule to be detected is a polypeptide, the step of detecting can be performed by binding the polypeptide with an antibody that is detectably labeled. A detectable label is a molecule which is capable of generating, either independently, or in response to a stimulus, an observable signal. A detectable label can be, but is not limited to a fluorescent label, a chromogenic label, a luminescent label, or a radioactive label. Methods for “detecting” a label include quantitative and qualitative methods adapted for standard or confocal microscopy, FACS analysis, and those adapted for high throughput methods involving multiwell plates, arrays or microarrays. One of skill in the art can select appropriate filter sets and excitation energy sources for the detection of fluorescent emission from a given fluorescent polypeptide or dye. “Detecting” as used herein can also include the use of multiple antibodies to a polypeptide to be detected, wherein the multiple antibodies bind to different epitopes on the polypeptide to be detected. Antibodies used in this manner can employ two or more detectable labels, and can include, for example a FRET pair. A polypeptide molecule, such as the a polypeptide of Table 11, is “detected” according to the present invention when the level of detectable signal is at all greater than the background level of the detectable label, or where the level of measured nucleic acid is at all greater than the level measured in a control sample.

[0440] As used herein, “detecting” as it refers to detecting the presence of a target nucleic acid molecule (e.g., a nucleic acid molecule shown in Table 11) refers to a process wherein the signal generated by a directly or indirectly labeled probe nucleic acid molecule (capable of hybridizing to a target, e.g., a sequence of Table 11, in a serum sample) is measured or observed. Thus, detection of the probe nucleic acid is directly indicative of the presence, and thus the detection, of a target nucleic acid. For example, if the detectable label is a fluorescent label, the target nucleic acid is detected by observing or measuring the light emitted by the fluorescent label on the probe nucleic acid when it is excited by the appropriate wavelength, or if the detectable label is a fluorescence/quencher pair, the target nucleic acid is detected by observing or measuring the light emitted upon association or dissociation of the fluorescence/quencher pair present on the probe nucleic acid, wherein detection of the probe nucleic acid indicates detection of the target nucleic acid. If the detectable label is a radioactive label, the target nucleic acid, following hybridization with a radioactively labeled probe is detected by, for example, autoradiography. Methods and techniques for detecting fluorescent, radioactive, and other chemical labels may be found in Ausubel et al. (1995, Short Protocols in Molecular Biology, 3^{rd} Ed. John Wiley and Sons, Inc.). Alternatively, a nucleic acid may be indirectly detected wherein a moiety is attached to a probe nucleic acid which will hybridize with the target, such as an enzyme activity, allowing detection in the presence of an appropriate substrate, or a specific antigen or other marker allowing detection by addition of an antibody or other specific indicator. Alternatively, a target nucleic acid molecule can be detected by amplifying a nucleic acid sample prepared from a patient clinical sample, using oligonucleotide primers which are specifically designed to hybridize with a portion of the target nucleic acid sequence. Quantative amplification methods, such as, but not limited to TaqMan, may also be used to detect a target nucleic acid according to the invention. A nucleic acid molecule is detected as used herein where the level of nucleic acid measured (such as by quantitative PCR), or the level of detectable signal provided by the detectable label is at all above the background level.

[0441] In clinical applications, animal tissue samples, preferably serum, can be screened for the presence and/or absence of one or more of the sequences of the invention, and in particular, of Table 11. Such samples may comprise tissue samples, whole cells, cell lysates, or isolated nucleic acids, including, for example, needle biopsy cores, surgical resection samples, lymph node tissue, cerebrospinal fluid, or serum. A sample for analysis as described herein is preferably a serum sample. A serum sample may be obtained from an animal using methods which are well known to those of skill in the art. Briefly, a whole venous or arterial blood sample from an animal is collected into a test tube. The whole blood sample is permitted to incubate at room temperature for approximately 15-30 to allow the blood to clot. Once clotted, the sample is centrifuged at approximately 1500 to 3000 rpm for 5-30 minutes to completely separate the serum from the cellular components. This centrifugation may be repeated if necessary to achieve complete separation. The resulting serum sample may be subsequently screened for the presence of one or more of the nucleic acid or amino acid sequences described herein.

Analgesia Assays: In Vivo Testing of Compounds/Target Validation for Pain Treatment

[0442] Acute Pain

[0443] Acute pain is measured on a hot plate mainly in rats. Two variants of hot plate testing are used: In the classical variant animals are put on a hot surface (52 to 56° C.) and the latency time is measured until the animals show nocifensive behavior, such as stepping or foot licking. The other variant is an increasing temperature hot plate where the experimental animals are put on a surface of neutral temperature. Subsequently this surface is slowly but constantly heated until the animals begin to lick a hind paw. The temperature which is reached when hind paw licking begins is a measure for pain threshold.

[0444] Compounds are tested against a vehicle treated control group. Substance application is performed at different time points via different application routes (intravenous (i.v.), intra-peritoneal (i.p.), by mouth (p.o.), by inhalation (i.t.), Intracerebroventricular (i.c.v.), subcutaneous (s.c.), intradermal, or transdermal) prior to pain testing.

[0445] According to the invention, a candidate compound, may be administered to an animal which is subjected to an acute pain assay. Acute pain, measured according to the above assay, decreased by at least 10%, and preferably 20%, 40%, 60%, and up to 100% is then indicative of a candidate compound that decreases pain.

[0446] Persistent Pain

[0447] Persistent pain is measured with the formalin or capsaicin test, mainly in rats. A solution of 1 to 5% formalin or 10 to 100 μg capsaicin is injected into one hind paw of the experimental animal. After formalin or capsaicin application the animals show nocifensive reactions like flinching, licking and biting of the affected paw. The number of nocifensive reactions within a time frame of up to 90 minutes is a measure for intensity of pain.

[0448] Compounds are tested against a vehicle treated control group. Substance application is performed at different time points via different application routes (i.v., i.p., p.o., i.t., i.c.v., s.c., intradermal, transdermal) prior to formalin or capsaicin administration.

[0449] According to the invention, a candidate compound, may be administered to an animal which is subjected to an persistent pain assay. Persistent pain, measured according to the above assay, decreased by at least 10% and preferably 20%, 40%, 60%, and up to 100% is then indicative of a candidate compound that decreases pain.

[0450] Neuropathic Pain

[0451] Neuropathic pain is induced by different variants of unilateral sciatic nerve injury mainly in rats. The operation is performed under anesthesia. The first variant of sciatic nerve injury is produced by placing loosely constrictive ligatures around the common sciatic nerve (Bennett and Xie, Pain 33 (1988): 87-107). The second variant is the tight ligation of about the half of the diameter of the common sciatic nerve (Seltzer et al., Pain 43 (1990): 205-218). In the next variant, a group of models is used in which tight ligations or transections are made of either the L5 and L6 spinal nerves, or the L5 spinal nerve only (Kim S H; Chung Jm, An experimental-model for peripheral neuropathy produced by segmental spinal nerve ligation in the rat, Pain 50 (3) (1992): 355-363). The fourth variant involves an axotomy of two of the three terminal branches of the sciatic nerve (tibial and common peroneal nerves) leaving the remaining sural nerve intact whereas the last variant comprises the axotomy of only the tibial branch leaving the sural and common nerves uninjured. Control animals are treated with a sham operation.

[0452] Postoperatively, the nerve injured animals develop a chronic mechanical allodynia, cold allodynioa, as well as a thermal hyperalgesia. Mechanical allodynia is measured by means of a pressure transducer (electronic von Frey Anesthesiometer, IITC Inc.-Life Science Instruments, Woodland Hills, SA, USA; Electronic von Frey System, Somedic Sales AB, Horby, Sweden). Thermal hyperalgesia is measured by means of a radiant heat source (Plantar Test, Ugo Basile, Comerio, Italy), or by means of a cold plate of 5 to 10° C. where the nocifensive reactions of the affected hind paw are counted as a measure of pain intensity. A further test for cold induced pain is the counting of nocifensive reactions, or duration of nocifensive responses after plantar administration of acetone to the affected hind limb. Chronic pain in general is assessed by registering the circadanian rhytms in activity (Surjo and Arndt, Universitat zu Koln, Cologne, Germany), and by scoring differences in gait (foot print patterns; FOOTPRINTS program, Klapdor et al., 1997. A low cost method to analyze footprint patterns. J. Neurosci. Methods 75, 49-54).

[0453] Compounds are tested against sham operated and vehicle treated control groups. Substance application is performed at different time points via different application routes (i.v.,

[0454] i.p., p.o., i.t., i.c.v., s.c., intradermal, transdermal) prior to pain testing.

[0455] According to the invention, a candidate compound, may be administered to an animal, which is subjected to an neuropathic pain assay. Neuropathic pain, measured according to the above assay, decreased by at least 10% and preferably 20%, 40%, 60%, and up to 100% is then indicative of a candidate compound that decreases pain.

[0456] Inflammatory Pain

[0457] Inflammatory pain is induced mainly in rats by injection of 0.75 mg carrageenan or complete Freund's adjuvant into one hind paw. The animals develop an edema with mechanical allodynia as well as thermal hyperalgesia. Mechanical allodynia is measured by means of a pressure transducer (electronic von Frey Anesthesiometer, IITC Inc.-Life Science Instruments, Woodland Hills, SA, USA). Thermal hyperalgesia is measured by means of a radiant heat source (Plantar Test, Ugo Basile, Comerio, Italy, Paw thermal stimulator, G. Ozaki, University of California, USA). For edema measurement two methods are being used. In the first method, the animals are sacrificed and the affected hindpaws sectioned and weighed. The second method comprises differences in paw volume by measuring water displacement in a plethysmometer (Ugo Basile, Comerio, Italy).

[0458] Compounds are tested against uninflamed as well as vehicle treated control groups. Substance application is performed at different time points via different application routes (i.v., i.p., p.o., i.t., i.c.v., s.c., intradermal, transdermal) prior to pain testing.

[0459] According to the invention, a candidate compound, may be administered to an animal which is subjected to an inflammatory pain assay. Inflammatory pain, measured according to the above assay, decreased by at least 10% and preferably 20%, 40%, 60%, and up to 100% is then indicative of a candidate compound that decreases pain.

[0460] Diabetic Neuropathic Pain

[0461] Rats treated with a single intraperitoneal injection of 50 to 80 mg/kg streptozotocin develop a profound hyperglycemia and mechanical allodynia within 1 to 3 weeks. Mechanical allodynia is measured by means of a pressure transducer (electronic von Frey Anesthesiometer, IITC Inc.-Life Science Instruments, Woodland Hills, SA, USA).

[0462] Compounds are tested against diabetic and non-diabetic vehicle treated control groups. Substance application is performed at different time points via different application routes (i.v.,

[0463] i.p., p.o., i.t., i.c.v., s.c., intradermal, transdermal) prior to pain testing.

[0464] According to the invention, a candidate compound, may be administered to an animal which is subjected to an Diabetic Neuropathic pain assay. Diabetic Neuropathic pain, measured according to the above assay, decreased by at least 10% and preferably 20%, 40%, 60%, and up to 100% is then indicative of a candidate compound that decreases pain.

[0465] In one embodiment, the candidate compounds which are administered to an animal subjected to one or more of the above pain stimuli, can be a candidate compound which had been previously determined to regulate the expression of one or more of the differentially expressed polynucleotide sequences indicated in Tables 1, 2, 3, 4, or 5, and/or previously determined to regulate the activity of a protein encoded by one or more of the differentially expressed polynucleotides indicated in Table 1, 2, 3, 4, or 5.

[0466] Dosage and Administration

[0467] Therapeutic agents of the invention are administered to an animal, preferably in a biologically compatible solution or a pharmaceutically acceptable delivery vehicle, by ingestion, injection, inhalation or any number of other methods. For embodiments where the therapeutic agent is a vector comprising an antisense sequence, a sequence encoding a ribozyme, or a sequence designed to supplement a down regulated sequence in an animal subjected to pain, the vectors may be administered as a pharmaceutical formulation, or may be administered using any method known in the art including microinjection, transfection, transduction, and ex vivo delivery. The dosages administered will vary from patient to patient; a “therapeutically effective dose” is determined, for example but not limited to, by the level of enhancement of function (e.g., for a nucleic acid sequence which is overexpressed by at least 1.4 fold in an animal subjected to pain relative to a naïve animal, a therapeutically effective dose is one which reduces the level of overexpression of the sequence to less than 1.4 fold. The converse would define a therapeutically effective dose for increasing the expression of an under-expressed sequence).

[0468] A therapeutic agent according to the invention is preferably administered in a single dose. This dosage may be repeated daily, weekly, monthly, yearly, or until the nucleic acid sequence is no longer differentially expressed.

[0469] Pharmaceutical Compositions

[0470] The invention provides for compositions comprising a therapeutic agent according to the invention admixed with a physiologically compatible carrier. As used herein, “physiologically compatible carrier” refers to a physiologically acceptable diluent such as water, phosphate buffered saline, or saline, and further may include an adjuvant. Adjuvants such as incomplete Freund's adjuvant, aluminum phosphate, aluminum hydroxide, or alum are materials well known in the art.

[0471] The invention also provides for pharmaceutical compositions. In addition to the active ingredients, these pharmaceutical compositions may contain suitable pharmaceutically acceptable carrier preparations which is used pharmaceutically.

[0472] Pharmaceutical compositions for oral administration are formulated using pharmaceutically acceptable carriers well known in the art in dosages suitable for oral administration. Such carriers enable the pharmaceutical compositions to be formulated as tablets, pills, dragees, capsules, liquids, gels, syrups, slurries, suspensions and the like, for ingestion by the patient.

[0473] Pharmaceutical preparations for oral use are obtained through a combination of active compounds with solid excipient, optionally grinding a resulting mixture, and processing the mixture of granules, after adding suitable auxiliaries, if desired, to obtain tablets or dragee cores. Suitable excipients are carbohydrate or protein fillers such as sugars, including lactose, sucrose, mannitol, or sorbitol; starch from corn, wheat, rice, potato, or other plants; cellulose such as methyl cellulose, hydroxypropylmethyl-cellulose, or sodium carboxymethyl cellulose; and gums including arabic and tragacanth; and proteins such as gelatin and collagen. If desired, disintegrating or solubilizing agents may be added, such as the cross-linked polyvinyl pyrrolidone, agar, alginic acid, or a salt thereof, such as sodium alginate.

[0474] Dragee cores are provided with suitable coatings such as concentrated sugar solutions, which may also contain gum arabic, talc, polyvinylpyrrolidone, carbopol gel, polyethylene glycol, and/or titanium dioxide, lacquer solutions, and suitable organic solvents or solvent mixtures. Dyestuffs or pigments may be added to the tablets or dragee coatings for product identification or to characterize the quantity of active compound, i.e., dosage.

[0475] Pharmaceutical preparations which are used orally include push-fit capsules made of gelatin, as well as soft, sealed capsules made of gelatin and a coating such as glycerol or sorbitol. Push-fit capsules can contain active ingredients mixed with a filler or binders such as lactose or starches, lubricants such as talc or magnesium stearate, and, optionally, stabilizers. In soft capsules, the active compounds may be dissolved or suspended in suitable liquids, such as fatty oils, liquid paraffin, or liquid polyethylene glycol with or without stabilizers.

[0476] Pharmaceutical formulations for parenteral administration include aqueous solutions of active compounds. For injection, the pharmaceutical compositions of the invention may be formulated in aqueous solutions, preferably in physiologically compatible buffers such as Hank's solution, Ringer solution, or physiologically buffered saline. Aqueous injection suspensions may contain substances which increase the viscosity of the suspension, such as sodium carboxymethyl cellulose, sorbitol, or dextran. Additionally, suspensions of the active solvents or vehicles include fatty oils such as sesame oil, or synthetic fatty acid esters, such as ethyl oleate or triglycerides, or liposomes. Optionally, the suspension may also contain suitable stabilizers or agents which increase the solubility of the compounds to allow for the preparation of highly concentrated solutions.

[0477] For nasal administration, penetrants appropriate to the particular barrier to be permeated are used in the formulation. Such penetrants are generally known in the art.

[0478] The pharmaceutical compositions of the present invention may be manufactured in a manner known in the art, e.g. by means of conventional mixing, dissolving, granulating, dragee-making, levitating, emulsifying, encapsulating, entrapping or lyophilizing processes.

[0479] The pharmaceutical composition may be provided as a salt and are formed with many acids, including but not limited to hydrochloric, sulfuric, acetic, lactic, tartaric, malic, succinic, etc. . . . Salts tend to be more soluble in aqueous or other protonic solvents that are the corresponding free base forms. In other cases, the preferred preparation may be a lyophilized powder in 1 mM-50 mM histidine, 0.1%-2% sucrose, 2%-7% mannitol at a pH range of 4.5 to 5.5 that is combined with buffer prior to use.

[0480] After pharmaceutical compositions comprising a therapeutic agent of the invention formulated in a acceptable carrier have been prepared, they are placed in an appropriate container and labeled for treatment of an indicated condition with information including amount, frequency and method of administration.

### EXAMPLES

[0481] The examples below are non-limiting and are merely representative of various aspects and features of the present invention.

### Example 1

### Identification of Differentially Expressed Nucleic Acid Sequences

[0482] The present invention relates to a method for the identification of nucleic acid sequences and/or genes which are differentially expressed in an animal which has been subjected to pain. In one embodiment, the animal is a pain model, that is, the animal has been artificially manipulated such that it meets the criteria for a state of pain as described above. In one embodiment the animal pain model is produced by transection of the sciatic nerve (axotomy). In an alternate embodiment, the animal pain model is the spared nerve injury model (SNI; Decosterd and Woolf, 2000 Pain 87: 149) in which one of the terminal branches of the sciatic nerve is spared from axotomy. In a further alternate embodiment, the animal pain model is an inflammation model (Stein et al., (1988) Pharmacol Biochem Behav 31: 445-451; Woolf et al., (1994) Neurosci. 62, 327-331) in which an irritant such as CFA is injected into an animal to induce inflammation.

[0483] Animal Pain Models

[0484] Axotomy of the sciatic nerve was performed on adult (200-250 g) male Sprague-Dawley rats. Under halothane (2%) anesthesia, the skin on the lateral surface of the thigh was incised and an incision made directly through the biceps femoris muscle exposing the sciatic nerve. The axotomy procedure involves transecting the sciatic nerve following ligation. The sciatic nerve was tight-ligated with 5.0 silk and sectioned distal to the ligation, removing 2-4 mm of the distal nerve stump. Great care was taken to avoid any contact with or transection of any collateral branches of the sciatic nerve proximal to the transection site, or any cutaneous nerve branches. Muscle and skin were closed in two layers, and animals were allowed to recover for 3-5 days prior to testing for signs of pain including mechanical allodynia, mechanical hyperalgesia, cold allodynia, and heat hyperalgesia using the criteria described above. Sham control animals (naïve) involved exposure of the sciatic nerve and its branched without any lesion.

[0485] The SNI nerve injury model was performed on adult (200-250 g) male Sprague-Dawley rats. Under halothane (2%) anesthesia, the skin on the lateral surface of the thigh was incised and a section made directly through the biceps femoris muscle exposing the sciatic nerve and its three terminal branches: the sural, common peroneal and tibial nerves.

[0486] The SNI procedure comprises an axotomy and ligation of the tibial and common peroneal nerves leaving the sural nerve intact. The common peroneal and the tibial nerves were tight-ligated with 5.0 silk and sectioned distal to the ligation, removing 2-4 mm of the distal nerve stump. Great care was taken to avoid any contact with or stretching of the intact sural nerve. Muscle and skin were closed in two layers and animals were allowed to recover for at least one week prior to testing for signs of pain including mechanical allodynia, mechanical hyperalgesia, cold allodynia, and heat hyperalgesia using the criteria described above. Sham control animals (naïve) involved exposure of the sciatic nerve and its branched without any lesion.

[0487] The inflammation animal pain model was performed on adult male Sprague-Dawley rats (10-11 weeks old, 300-350 g). Inflammation was induced by an intra-plantar injection of complete Freund's adjuvant (CFA, Sigma, 1 μ-1 ml) into the left hind paw of rats under halothane (2.5%) anesthesia, producing an area of erythema, edema and tenderness restricted to the hindpaw (Stein et al., (1988) Pharmacol Biochem Behav 31: 445-451; Woolf et al., (1994) Neurosci. 62, 327-331). Animals were subsequently tested for signs of pain including mechanical allodynia, mechanical hyperalgesia, cold allodynia, and heat hyperalgesia using the criteria described above.

[0488] Total RNA Isolation

[0489] Following the surgical procedures described above and testing to insure that the axotomy and SNI model animals met the pain criteria described, control and pain model animals were rapidly killed by decapitation. Axotomy model animals were killed 3 days following axotomy, and SNI model animals were killed 10-15 days following surgery.

[0490] The dorsal root ganglia (DRG) from spinal levels L4-L5 were removed from the SNI, axotomy, and control animals and snap-frozen in a dry ice/ethanol slurry. DRGs from the two spinal levels were pooled for each animal and total RNA was extracted using Trizol (Invitrogen) according to the manufacturers instructions. Briefly, tissue samples were homogenized in a ground glass homogenizer in 1 ml of Trizol reagent per 50-100 mg of tissue. The samples were incubated for 5 min. at 15-30° C. to permit the complete dissociation of nucleoprotein complexes. Subsequently, 0.2 ml of chloroform was added per 1 ml of Trizol reagent. Samples were agitated and incubated at 15-30° C. for 2 to 3 minutes. Samples were then centrifuged at no more than 12,000×g for 15 minutes at 2-8° C. The aqueous phase was then transferred to a fresh tube and the RNA was precipitated by mixing with 0.5 ml of isopropyl alcohol per 1 ml Trizol reagent used for the initial homogenization. Samples were incubated at 15-30° C. for 10 minutes and centrifuged at 12,000×g for 10 minutes. The supernatant is then removed, and the RNA pellet was washed with 75% ethanol. The RNA pellet is then air dries and resuspended in either RNase-free water or 0.5% SDS solution. The integrity of the RNA samples was verified on a 1% agarose gel, and the RNA was quantified by measuring absorbance at 260/280 mm. cRNA was then prepared from 10 μg of total RNA using techniques that are well known in the art. Briefly, total RNA (7 to 10 μg) was isolated and reverse transcribed using a primer consisting of oligo-dT coupled to a T7 RNA polymerase binding site. The cDNA was made double stranded and biotinylated cRNA was synthesized using T7 polymerase. Unincorporated nucleotides were removed, and the cRNA was quantitated using methods known to those of skill in the art; a yield of cRNA between 25 and 80 μg was typical.

[0491] Array Hybridization

[0492] The cRNA samples from axotomy, SNI and naïve animals were randomly sheared to an approximate length of 50 nucleotides and subsequently hybridized to an Affymetrix rat genome U34 gene chip set. Briefly, labeled nucleic acid is denatured by heating for 2 minutes at 100° C., and incubated at 37° C. of 20-30 minutes before being placed on a nucleic acid array under a 22 mm×22 mm glass cover slip. Hybridization is carried out at 65° C. for 14 to 18 hours in a custom slide chamber with humidity maintained by a small reservoir of 3×SSC. The array is washed by submersion and agitation for 2-5 min in 2×SSC with 0.1% SDS, followed by 1×SSC, and 0.1×SSC. Finally, the array is dried by centrifugation for 2 minutes in a slide rack in a Beckman GS-6 tabletop centrifuge in Microplus carriers at 650 RPM for 2 min.

[0493] External standards were included in each hybridization to control for hybridization efficiency, to test for sensitivity and assist in the comparisons between data sets from different experiments. These external standards are cRNA transcribed from the bacterial genes bio b, bio c, bio d, cre, thr, and phe. The first hybridization was against a Test Chip, which contains probes against human, mouse and yeast mRNAs as well as probes against the exogenously added control RNA. The Test Chips are designed to determine the quality of the cRNA mixture. Stringent washing in the fluidics station reduces non-specific hybridization and the hybridized biotinylated cRNA was detected by incubation with phycoerythrin-streptavidin and was quantitated by scanning using the Hewlett-Packard GeneArray laser scanner. Following positive analysis of the Test Chip, the same hybridization mixture was then added to the Rat Genome U34 gene chip set which monitors the expression of >24,000 genes and EST clusters. The sequences include all rat sequence clusters from Build #34 of the UniGene Datablse (created from GenBank 107/dbEST Nov. 18, 1998) and supplemented with additional annoteted gene sequences from GenBank 110. The chips were hybridized, reacted with phycoerythrin-streptavidin, washed and then incubated with a polyclonal anti-streptavidin antibody coupled to phycoerythrin as an amplification step to aid in the detection of lower abundance transcripts. Following further washing, the expression chip was scanned as above. Analysis of the scanned data was performed using GeneChip software.

[0494] Gene Selection

[0495] Known or EST gene sequences were first selected as being potentially differentially expressed based on the fold change in hybridization between the naïve animals and either the axotomy or SNI pain models. This was measured as the ratio of the expression level, measured as the intensity of the hybridization signal of the cRNA probe on the microarray for a specific gene, of either SNI or axotomy to naïve. Based on previous studies which demonstrate that the expression of the heat shock protein Hsp27 in increased 1.5 fold after axotomy, a 1.4 fold change in expression in either the axotomy or SNI models relative to naïve was chosen as a numerical cutoff for differential expression. Genes identified as being differentially expressed based on the measurement of an at least 1.4 fold change in expression are shown in tables 1, 2, 3, 4, or 5. Table 1 shows a group of genes which have been previously suggested to exhibit regulated expression in pain models, but which have been evaluated for purposes of the present invention as being differentially expressed by at least 1.4 fold in both a rat axotomy pain model and a SNI pain model relative to the expression level in an animal not subjected to pain. Thus, from the genes and polynucleotides shown in Table 1, only those showing a axotomy/naïve or SNI/naïve ratio of +/−1.4 or greater were identified as being differentially expressed. Tables 2-3 show a number of genes which were identified by the methods of the present invention as being differentially expressed by at least 1.4 fold in an animal subjected to a nerve injury or inflammatory pain model. In addition, the polynucleotides indicated in Table 2, have been further confirmed as being differentially expressed based on triplicate expression analysis (i.e., samples from three different animals hybridized to three different microarrays, wherein samples are obtained from several different animal pain models, and wherein the polynucleotide sequences are differentially expressed by at least 1.2 fold, with a significance of p<0.05 in at least one pain model). Table 4 shows a group of genes which exhibit an at least 1.4 fold increase in expression in the inflammation pain model. Table 5 shows a group of genes which exhibit an at least 1.4 fold decrease in expression in the inflammation pain model. The data in Tables 1, 3, 4, and 5 represent the average hybridization measurements obtained from at least two rat gene chips.

[0496] Genes identified as being differentially expressed based on an at least 1.4 fold change in expression were then screened by Northern analysis to verify differential expression.

[0497] Northern Analysis

[0498] For each gene suggested to be differentially expressed based on the microarray data, RT-PCR was performed on DRG total RNA obtained from the axotomy, SNI and naïve animal groups as described above. RT-PCR was performed according to techniques known in the art. The cDNA fragments generated in this manner were subsequently cloned into a PCRII vector using the TA cloning kit (Invitrogen). The identity of each fragment was verified by sequencing in each direction from the T3 and T7 polymerase sites present in the cloning vector. The cDNA molecules produced in this manner were then used to produce ³²P-labeled cDNA probes using the Prime-It kit from Stratagene. Subsequently, 5 to 10 μg of total RNA isolated from axotomy, SNI and naïve DRGs were separated on an agarose/formaldehyde gel in 1× MOPS buffer. Following staining with ethidium bromide and visualization under ultra violet light to determine the integrity of the RNA, the RNA is hydrolyzed by treatment with 0.05M NaOH/1.5MNaCl followed by incubation with 0.5M Tris-Cl (pH 7.4)/1.5M NaCl. The RNA is transferred to a commercially available nylon or nitrocellulose membrane (e.g. Hybond-N membrane, Amersham, Arlington Heights, Ill.) by methods well known in the art (Ausubel et al., supra, Sambrook et al., supra). Following transfer and UV cross linking, the membrane is hybridized with a ³²P-labeled cDNA probe, having a sequence complementary to the mRNA sequences identified as being differentially expressed by microarray analysis, in hybridization solution (e.g. in 50% formamide/2.5% Denhardt's/100-200 mg denatured salmon sperm DNA/0.1% SDS/5×SSPE) overnight at 65° C. The hybridization conditions can be varied as necessary as described in Ausubel et al., supra and Sambrook et al., supra. Following hybridization, the membrane is washed at room temperature in 2×SSC/0.1% SDS, at 42° C. in 1×SSC/0.1% SDS, at 65° C. in 0.2×SSC/0.1% SDS, and exposed to film overnight with an intensifying screen at −80° C. The stringency of the wash buffers can also be varied depending on the amount of background signal (Ausubel et al., supra). The film was subsequently developed and the intensity bands corresponding to the radiolabeled probe hybridized to RNA were quantified using methods known to those of skill in the art, for example, by digitizing the film and analyzing the band intensity with a computer software program such as NIH Image (NIH, Bethesda, Md.).

[0499] FIG. 1 shows an example of Northern data which confirms the differential expression, or lack thereof, of 22 genes which were initially screened by microarray analysis of cRNA samples obtained from animals subjected to the axotomy pain model. Table 8 shows the correlation of the data obtained from the microarray analysis for these 22 genes and the data obtained by Northern analysis.

### Example 2

### Verification by In Situ Hybridization

[0500] In addition to verification of differential expression using Northern analysis, the present invention provides that the differential expression of genes in an animal subjected to pain may be confirmed using in situ hybridization.

[0501] In situ hybridization is carried out on fresh frozen, 5 μm thick sections of the dorsal root ganglia from spinal levels L4-L5 obtained from animals subjected to pain, using isotopically-labeled probes. Forty-eight base pair oligonucleotide probes are designed to have 50% G-C content and be complementary to and selective for the desired mRNA. Probes are 3′-end labeled with ³⁵S or ³³P-dATP using a terminal transferase reaction and purified through a spin column. Hybridization is carried out such that homologies greater than 90% are required for detection of transcripts (Dagerlind et al., '92 Histochemistry 98:39). Generally, slides are brought to room-temperature and covered with a hybridization solution (50% formamide, 1× Dendhardt's solution, 1% sarcosyl, 10% dextran sulphate, 0.02M phosphate buffer, 4×SSC, 200 nM DTT, 500 mg/ml salmon sperm DNA) containing 107 cmp/ml of labeled probe. Slides are incubated in a humidified chamber at 43° C. for 14-18 hours, then washed 4×15 min in 1×SSC at 55° C. In the final rinse, slides are brought to room temperature, washed in dH2O, dehydrated in ethanol and air dried.

[0502] Autoradiograms are generated by dipping slides in NTB2 nuclear track emulsion and storing the dark at 4° C. Prior to conventional developing and fixation, sections are allowed to expose for 1-12 weeks, depending on the abundance of transcript. Unstained tissue is viewed under darkfield conditions using a fiber-optic darkfield stage adapter (MVI), while stained tissue is examined under brightfield conditions. Control experiments are conducted to confirm the specificity of the oligonucleotide probes. Sections are hybridized with labeled probe, labeled probe with a 1,000-fold excess of cold probe, or labeled probe with a 1,000-fold excess of another, dissimilar cold probe of the same length and similar G-C content.

[0503] The use of serial, thin sections permits the identification of the same cells in adjacent sections, allowing for comparisons to be made with other markers by in situ hybridization or immunohistochemistry. The technique unlike non-isotopic in situ using digoxygenin labeled riboprobes is suited to screening more than detailed analysis of co-expression of multiple markers. FIGS. 2 and 3 show the results of in situ hybridization verification of the differential expression of five genes (GTPcyclo, IES-JE, CCHL2A, VGF, SNAP, c-jun, and TrkA) in the dorsal root ganglia of a rat axotomy pain model and a rat spared nerve injury pain model.

### Example 3

### Verification of Differential Expression by Real-Time PCR

[0504] In addition to verification of differential expression by Northern analysis or in situ hybridization, the differential expression of genes in an animal subjected to pain may be verified using real-time PCR and TaqMan® probes. The technique of real-time PCR is well known in the art (see, for example, U.S. Pat. Nos. 5,691,146; 5,779,977; 5,866,336; and 5,914,230). cDNA samples obtained from a rat axotomy pain model were amplified using primers specific for 19 genes which had previously been examined by microarray analysis and SYBR Green I as the double stranded DNA binding dye. PCR products were generated using an ABI 7700 sequence detection system (Applied Biosystems, Foster City, Calif.). A comparison of the expression level measured by microarray analysis and that obtained by real-time PCR is shown in Table 9. A close correlation can be seen between the differential expression, or lack thereof, of genes examined by microarray analysis and using the Taqman® technique.

### Example 4

### Triplicate Analysis

[0505] As described above, a polynucleotide sequence is identified as being differentially regulated in an animal subjected to pain relative to an animal not subjected to the same pain if the sequence is differentially expressed by at least 1.4 fold, and additionally, if the differential expression attains a statistical significance over at least three replicate screens, in at least on pain model, with a p-value of less than 0.05. This example describes how to perform such a statistical analysis, using the axotomy and SNI pain models.

[0506] Surgical Procedures.

[0507] Adult male Sprague Dawley rats (200-300 g) are anesthetized with halothane. For the sciatic nerve transection (axotomy), the left sciatic nerve is exposed at the mid thigh level, ligated with 3/0 silk and sectioned distally. The wound is sutured in two layers, and the animals were allowed to recover.

[0508] Tissue and RNA Preparation.

[0509] Animals are terminally anesthetized with CO₂, the L4 and L5 DRGs rapidly removed, and stored at −80° C. Total RNA is extracted from homogenized DRG samples using acid phenol extraction (TRIzol reagent, Gibco-BRL). RNA concentration is evaluated by A₂₆₀ measurement and quality assessed by electrophoresis on a 1.5% agarose gel. Each RNA sample used for hybridization of each array can be extracted, for example, from rat L4 and L5 DRGs (10 ganglia pooled from 5 animals, per sample).

[0510] Microarray Analysis

[0511] Affymetrix rat genome U34A oligonucleotide microarrays, representing 8799 known transcripts and expressed sequence tags (ESTs), can be used (Affymetrix, Santa Clara, Calif.). Oligonucleotides are arranged in pairs corresponding to different regions of the target mRNA with multiple probe pairs. Each probe pair consists of a 25 nucleotide perfect match (PM) to the target region coupled with a 25-mer with a single mismatch (MM) at the 13^{th} nucleotide. Transcript abundance is estimated by analysis of signal intensity of the PM/MM pairs. The arrays are hybridized with biotin-labeled CRNA, prepared as per standard Affymetrix protocol. Briefly, total RNA (8 μg) from DRGs was reverse transcribed using an oligo-dT primer coupled to a T7 RNA polymerase binding site. Double-stranded cDNA can be made and biotinylated-cRNA synthesized using T7 polymerase. The cRNA is then hybridized for about 16 hours to an array, followed by binding with a streptavidin-conjugated fluorescent marker, and then incubated with a polyclonal anti-streptavidin antibody coupled to phycoerythrin as an amplification step. Following washing, the chips are scanned with a Hewlett-Packard GeneArray laser scanner and data analyzed using GeneChip software. External standards can be included to control for hybridization efficiency and sensitivity.

[0512] Hybridization levels for each species of mRNA detected on the arrays are expressed by intensity (signal) and as present (P), marginal (M) or absent (A) calls, calculated by Affymetrix software (MAS 5.0, α1=0.04 α2=0.06). For calculation of signal values, each array is scaled to a target signal of 2500 across all probe sets, to allow comparison between arrays.

[0513] The arrays are grouped for two comparisons: two triplicate sets of naïve data compared with one another, and one triplicate naïve set compared with one triplicate post-axotomy set. The individual naïve arrays included in each triplicate set are picked randomly. A probe set is determined undetected if it received an A call in all of the six arrays involved in the comparison. Detected are Present or Marginal by MAS5.0 in at least one array for each analysis. Mean signal and standard deviation are calculated for each detected probe set. The p-value for rejecting the null hypothesis that the mean signals were equal between the two triplicate sets is calculated using an unpaired, two-tailed t-test for independent samples with unequal variance (Satterthwaite's method). Fold-differences between the mean signals (A and B) in the two triplicate sets is calculated as max(A, B)/min(A, B) with down regulation relative to naïve expressed as negative.

[0514] As noted above, a polynucleotide sequence is considered to be differentially expressed according to the present invention if it is differentially expressed by at least 1.4 fold in an animal subjected to pain relative to an animal not subjected to the same pain, and optionally, is also statistically significantly differentially expressed with a p-value of less than 0.05 across at least three replicate expression screens.

### Example 5

### Pain-specific Microarray Construction

[0515] A microarray according to the invention was constructed as follows.

[0516] cDNA samples obtained from the dorsal root ganglia of either naïve animals or animals which have been subjected to pain are amplified using primers specific for the genes which have been identified as being differentially expressed using the methods described above. PCR products (˜40 ul) in the same 96-well tubes used for amplification, are precipitated with 4 ul (1/10 volume) of 3M sodium acetate (pH 5.2) and 100 ul (2.5 volumes) of ethanol and stored overnight at −20° C. They are then centrifuged at 3,300 rpm at 4° C. for 1 hour. The obtained pellets were washed with 50 ul ice-cold 70% ethanol and centrifuged again for 30 minutes. The pellets are then air-dried and resuspended well in 20 ul 3×SSC overnight. The samples are then deposited either singly or in duplicate onto polylysine-coated slides (Sigma Cat. No. P0425) using a robotic GMS 417 arrayer (Genetic MicroSystems, MA). The boundaries of the DNA spots on the microarray are marked with a diamond scriber. The invention provides for arrays wherein 10-20,000 PCR products are spotted onto a solid support to prepare an array.

[0517] The arrays are rehydrated by suspending the slides over a dish of warm particle free ddH₂O for approximately one minute (the spots will swell slightly but not run into each other) and snap-dried on a 70-80° C. inverted heating block for 3 seconds. DNA is then UV crosslinked to the slide (Stratagene, Stratalinker, 65 mJ—set display to “650” which is 650×100 UJ). The arrays are placed in a slide rack. An empty slide chamber is prepared and filled with the following solution: 3.0 grams of succinic anhydride (Aldrich) is dissolved in 189 ml of 1-methyl-2-pyrrolidinone (rapid addition of reagent is crucial); immediately after the last flake of succinic anhydride dissolved, 21.0 ml of 0.2 M sodium borate is mixed in and the solution is poured into the slide chamber. The slide rack is plunged rapidly and evenly in the slide chamber and vigorously shaken up and down for a few seconds, making sure the slides never leave the solution, and then mixed on an orbital shaker for 15-20 minutes. The slide rack is then gently plunged in 95° C. ddH₂O for 2 minutes, followed by plunging five times in 95% ethanol. The slides are then air dried by allowing excess ethanol to drip onto paper towels. The arrays are then stored in the slide box at room temperature until use.

### Example 6

### Therapeutic Agent Screening

[0518] A candidate agent that increases or decreases the expression of a polynucleotide sequence that is differentially expressed in the sensory neurons of an animal subjected to pain is screened according to the following method.

[0519] An animal that has been subjected to pain is treated with a candidate agent for varying amounts of time. Typically an animal is treated by systemic administration of a candidate agent, such as by intravenous administration, on a hourly, daily, or weekly dosing schedule. Following administration, the animals are killed, and the dorsal root gangila are removed and used to prepare cRNA samples as described above. The cRNA samples are then hybridized to a pain-specific microarray, constructed according to the method described above. The hybridization of the cRNA samples to the microarray can be used to determine the level of expression of the genes in the animal subjected to pain which correspond to the differentially expressed genes comprising the microarray. Thus any changes in the predicted differential expression of a gene in an animal treated with a candidate agent is indicative of that agent being capable of increasing or decreasing the expression of a gene which is known to be differentially expressed in an animal subjected to pain.

### Example 7

### In Vivo Protein Activity Screening

[0520] Microarrays can be used to screen in vivo for genes that are regulated in pain as a result of the activity of specific protein signaling molecules. To do this, the changes in gene expression produced in the pain models are compared with the changes in gene expression produced in the same models when a particular signaling molecule is neutralized or inhibited by preventing its synthesis, release, transport, binding to a receptor or activation of a cellular response. Any resultant difference in gene expression profile will represent the contribution of the signaling molecule. Further confirmation can be produced by the administration of the signaling molecule in vivo to see if it induces a change in gene regulation.

[0521] Such an analysis has been performed looking at the contribution of the neurotrophin nerve growth factor (NGF) to inflammatory pain. Inflammation is known to produce an increase in NGF at the site of the inflammation and this acts on its high affinity receptor TrkA expressed on sensory neurons to change transcription of NGF-regulated genes in the sensory neuron cell body in the DRG. The pattern of expression of genes after inflammation induced in vivo by intraplantar CFA (at 3, 12 24 hrs and 5 days) was compared with naïve non-inflamed animals to detect inflammation-induced genes. This gene expression profile was then compared with arrays produced from RNA from inflamed animals treated with a neutralizing anti-NGF antibody. One example of a gene that was upregulated by CFA, but whose level did not increase in CFA animals treated with antiNGF was the NF-kappaB inhibitor alpha (I kappa B). I kappa B alpha was also upregulated 12 and 24 hrs after intraplantar NGF injection showing that it is an NGF regulated inflammatory-induced gene.

| | |
|---|---|
| Affymetrix accession | X63594cds RRRLIF1 |
| #X63594cds_g_at | R.rattus RL/IF-1 mRNA |

| | CFA | NGF | CFA + anti-NGF |
|---|---|---|---|
| Ni | Fold | Fold | Fold |
| 3 h | −1 | | |
| 6 h | 8.5 | | |
| 12 h | 2.1 | 3.5 | −1.8 |
| 24 h | 3.4 | 1.5 | 1.4 |
| 2 d | 1.1 | | |
| 5 d | 1.6 | | |

Affymetrix accession numbers #X63594cds_g_at and X63594cds RRRLIF1 refer to sequences depicted in Table 2.

### Other Embodiments

[0522] Other embodiments will be evident to those of skill in the art. It should be understood that the foregoing detailed description is provided for clarity only and is merely exemplary. The spirit and scope of the present invention are not limited to the above examples, but are encompassed by the following claims.

LENGTHY TABLE
The patent application contains a lengthy table section. A copy of the table is available in electronic form from the USPTO web site (http://seqdata.uspto.gov/?pageRequest=docDetail&DocID=US20070026409A1) An electronic copy of the table will also be available from the USPTO upon request and payment of the fee set forth in 37 CFR 1.19(b)(3).

The application's sequence listing, which the Patent Office published only in electronic form, follows.

SEQUENCE LISTING (2605 sequences)

SEQ ID NO: 1 - DNA, 424 bp, Rattus norvegicus
agccagcgaagtacatggagtttgatctgaatggcaatggagatatcgatattatgtccttgaagcgaatgctggagaaacttggggttcccaagacccatctagagctgaagaaattaattagagaggtgtccagtggctccgaggagacgttcagttactctgactttctcagaatgatgctgggcaagagatctgccatcttgagaatgattctgatgtatgaggagaaaaacaaagaacaacagaagccaactggtcccccagccaagaaagctatttctgagttggcctaatggaggtggatataacacggtgggaccgaggaccttcgtgtcagcagcatgggaagagaagaatcagttgcgagccagactgtcaatgctcaataaataatgctccctagtgcctgaaaaaaaaaaaa

SEQ ID NO: 2 - DNA, 5066 bp, Rattus norvegicus
  ref <308>: DATABASE ACCESSION NUMBER: Refseq / NM_016994
  ref <309>: DATABASE ENTRY DATE: 2003-01-14
ctaccccttacccctcactccttccacctttgtcctttaccatgggacccacgtcagggtcccagctactagtgctactgctgctgttggccagctccctgctagctctggggagccccatgtactccatcattactcccaatgtcctgcggctggagagtgaagagactttcatactagaggcccatgatgctcagggtgacgtcccagtcactgtcactgtgcaagacttcctaaagaagcaagtgctgaccagtgagaagacagtgttgacaggagccactggacatctgaacagggtcttcatcaagattccagccagtaaggaattcaatgcagataaggggcacaagtacgtgacagtggtggcaaacttcggggcaacagtggtggagaaagcggtgctagtaagctttcagagtggttacctcttcatccagacagacaagaccatctacaccccaggctccactgttttctatcggatcttcactgtggacaacaacctattgcctgtgggcaagacagtcgtcatcgtcattgagaccccggacggcgttcccatcaagagagacattctatcttcccacaaccaatatggcatcttgcctttgtcttggaacattccagaactggtcaacatggggcagtggaagatccgagccttctatgaacatgcaccaaagcagaccttctctgcagagtttgaggtgaaggaatacgtgctgcccagtttcgaagtcctggtggagcctacagagaaattttattacatccatggaccaaagggcctggaagtttccatcacagccagattcctgtatgggaagaacgtggacgggacagctttcgtgatctttggggtccaggatgaggataagaagatttctctggccctgtccctcacccgcgtgctgatcgaggatggttcaggggaggcagtgctcagccgaaaagtgctgatggacggggtacggccctccagcccagaagccctagtggggaagtccctgtacgtctctgtcactgttatcctgcactcaggtagcgacatggtagaggcagagcgcagtgggatcccaattgtcacttccccgtaccagatccacttcaccaagacacccaaattcttcaagccagccatgcctttcgacctcatggtgtttgtgaccaaccctgatggctctccagcccgaagagtgccagtagtcactcagggatccgacgcgcaggctctcacccaggatgacggtgtggccaagctgagcgtcaacacacccaacaaccgccaacccctgactatcacggtaagcaccaagaaggagggtatcccggacgcgcggcaggccaccaggacgatgcaggcccagccctacagcactatgcacaattccaacaactacctgcacttgtcagtgtctcgggtggagctcaagcctggggacaacctcaatgtcaacttccacctgcgcacggacgctggccaagaggccaagatccgatactacacctatctggttatgaacaaggggaagttactgaaggcaggccgtcaggttcgggagcctggccaggacctggtggtcttgtcactgcccatcactccagaatttataccttccttccgcctggtggcttactacaccctgattggagctaatggccaaagggaggtggtggccgactcagtgtgggtggatgtgaaggactcctgtgtaggcacgctggtggtgaaaggtgacccaagagataaccgacagcccgcgcctgggcatcaaacgacactaaggatcgaggggaaccagggggcccgagtggggctagtggctgtggacaagggggtgtttgtgctgaacaagaagaacaaactcacacagagcaagatctgggatgtagtagagaaggcagacattggctgcaccccaggcagtgggaagaactatgcgggtgtcttcatggatgctggcctgaccttcaagacaaaccaaggcctgcagactgatcagagagaagatcctgagtgcgccaagccagctgcccgccgccgtcgctcagtgcagttgatggaaaggaggatggacaaagctggtcagtacaccgacaagggtctgcggaagtgttgtgaggatggcatgcgtgatatccctatgccgtacagctgccagcgccgggctcgcctcatcacccagggcgagagctgcctgaaggccttcatggactgctgcaactatatcaccaagcttcgtgagcagcacagaagagaccatgtgctgggcctggccaggagtgatgtggatgaagacataatcccagaagaagatattatctctagaagccacttcccagagagctggttgtggaccatagaagagttgaaagaaccagagaaaaatggaatctctacgaaggtcatgaacatctttctcaaagattccatcaccacctgggagattctggcagtgagcttgtccgacaagaaagggatttgtgtggcagacccctatgagatcacagtgatgcaggacttcttcattgacctgcgactgccctactctgtggtgcgcaatgaacaggtggagatcagagctgtgctcttcaattaccgtgaacaggagaaacttaaggtaagggtggaactgttgcataacccagccttctgcagcatggccactgccaagaagcggtactaccagaccatcgaaatccctcccaagtcctctgtggctgtgccttatgtcattgtccccttgaagatcggcctccaggaggtggaggtcaaggccgccgtcttcaaccacttcatcagtgatggtgtcaagaagatactgaaggtcgtgccagaaggaatgagagtcaacaaaactgtggctgtccgtacactggatccagaacacctcaatcaagggggagtgcagagggaggatgtgaatgcagcagacctcagtgaccaagtgccagacacagattctgagaccagaattctcctgcaagggaccccggtggctcagatggccgaggacgctgtggacggggagcggctgaaacacctgatcgtgaccccctctggctgtggggagcagaacatgattggcatgacacccacggtcattgcagtacactatctggatcagaccgaacagtgggagaaattcggcctagagaagaggcaagaagctctggagctcatcaagaaagggtacacccagcagctggctttcaaacagcccatctctgcctatgctgccttcaacaaccggcctcccagcacctggctgacagctatgtggtcaaggtctttctctctggctgccaacctcatcgccatcgactctcaggtcctgtgtggggctgtcaaatggctgattctggagaaacagaagccagatggtgtctttcaggaggacggaccagtgattcaccaagaaatgattggtggcttccggaacaccaaggaggcagatgtgtcgcttacagcctttgtcctcatcgcactgcaggaagccagagatatctgtgaggggcaggtcaacagccttcccgggagcatcaacaaggcaggggagtatcttgaagccagttacctgaacctgcagagaccatacacagtagccattgctgggtatgccctggccctgatgaacaaactggaggaaccttacctcaccaagtttctgaacacagccaaagatcggaaccgctgggaggagcctggccagcagctctacaatgtggaggccacctcctacgccctcctggccctgctgctgctgaaagactttgactctgtgcctcctgtggtgcgctggctcaacgacgaaagatactacggaggtggctatggctccacgcaggctaccttcatggtattccaagccttggctcaataccgggcagatgtccctgaccacaaggacttgaacatggatgtgtccctccacctccccagccgcagctccccaactgtgtttcgcctgctatgggaaagtggcagtctcctgagatcagaagagaccaagcagaatgagggcttttctctgacagccaaaggaaaaggccaaggcacactgtcggtggtgacagtgtatcacgccaaagtcaaaggcaaaaccacctgcaagaagtttgacctcagggtcaccataaaaccagcccctgagacagccaagaagccccaggatgccaagagttcgatgatccttgacatctgcaccaggtacttgggagacgtggatgctactatgtccatcctggacatctccatgatgactggctttattccagacacaaacgacctggaactgctgagctctggagtagacagatacatttccaagtatgagatggacaaagccttctccaacaagaacaccctcatcatctacctagaaaagatctcacactccgaagaagactgcctgtccttcaaagtccaccagttctttaacgtgggacttatccagccggggtcggtcaaggtctactcctactacaatctagaggagtcatgcacccggttctatcatccggagaaggacgatggaatgctgagcaagctgtgccacaatgaaatgtgccgctgtgccgaggagaactgcttcatgcatcagtcacaggatcaggtcagcctgaatgaacgactagacaaggcttgtgagcctggagtggactacgtgtacaagaccaagctaacgacgatagagctgtcggatgattttgatgagtacatcatgaccatcgagcaggtcatcaagtcaggctcagatgaggtgcaggcaggtcaggaacgaaggttcatcagccacgtcaagtgcagaaacgccctaaagctgcagaaagggaagcagtacctcatgtggggcctctcctccgacctctggggagaaaagcccaataccagctacatcattgggaaggacacgtgggtggagcactggcccgaggcagaggaacgtcaggatcagaagaaccagaaacagtgcgaagacctcggggcattcacagaaacaatggtggttttcggctgccccaactgaccaccacctccaataaagcttcagttgtatttt

SEQ ID NO: 3 - protein, 1663 aa, Rattus norvegicus
  ref <308>: DATABASE ACCESSION NUMBER: Refseq / NP_058690
  ref <309>: DATABASE ENTRY DATE: 2003-01-14
MGPTSGSQLLVLLLLLASSLLALGSPMYSIITPNVLRLESEETFILEAHDAQGDVPVTVTVQDFLKKQVLTSEKTVLTGATGHLNRVFIKIPASKEFNADKGHKYVTVVANFGATVVEKAVLVSFQSGYLFIQTDKTIYTPGSTVFYRIFTVDNNLLPVGKTVVIVIETPDGVPIKRDILSSHNQYGILPLSWNIPELVNMGQWKIRAFYEHAPKQTFSAEFEVKEYVLPSFEVLVEPTEKFYYIHGPKGLEVSITARFLYGKNVDGTAFVIFGVQDEDKKISLALSLTRVLIEDGSGEAVLSRKVLMDGVRPSSPEALVGKSLYVSVTVILHSGSDMVEAERSGIPIVTSPYQIHFTKTPKFFKPAMPFDLMVFVTNPDGSPARRVPVVTQGSDAQALTQDDGVAKLSVNTPNNRQPLTITVSTKKEGIPDARQATRTMQAQPYSTMHNSNNYLHLSVSRVELKPGDNLNVNFHLRTDAGQEAKIRYYTYLVMNKGKLLKAGRQVREPGQDLVVLSLPITPEFIPSFRLVAYYTLIGANGQREVVADSVWVDVKDSCVGTLVVKGDPRDNRQPAPGHQTTLRIEGNQGARVGLVAVDKGVFVLNKKNKLTQSKIWDVVEKADIGCTPGSGKNYAGVFMDAGLTFKTNQGLQTDQREDPECAKPAARRRRSVQLMERRMDKAGQYTDKGLRKCCEDGMRDIPMPYSCQRRARLITQGESCLKAFMDCCNYITKLREQHRRDHVLGLARSDVDEDIIPEEDIISRSHFPESWLWTIEELKEPEKNGISTKVMNIFLKDSITTWEILAVSLSDKKGICVADPYEITVMQDFFIDLRLPYSVVRNEQVEIRAVLFNYREQEKLKVRVELLHNPAFCSMATAKKRYYQTIEIPPKSSVAVPYVIVPLKIGLQEVEVKAAVFNHFISDGVKKILKVVPEGMRVNKTVAVRTLDPEHLNQGGVQREDVNAADLSDQVPDTDSETRILLQGTPVAQMAEDAVDGERLKHLIVTPSGCGEQNMIGMTPTVIAVHYLDQTEQWEKFGLEKRQEALELIKKGYTQQLAFKQPISAYAAFNNRPPSTWLTAMWSRSFSLAANLIAIDSQVLCGAVKWLILEKQKPDGVFQEDGPVIHQEMIGGFRNTKEADVSLTAFVLIALQEARDICEGQVNSLPGSINKAGEYLEASYLNLQRPYTVAIAGYALALMNKLEEPYLTKFLNTAKDRNRWEEPGQQLYNVEATSYALLALLLLKDFDSVPPVVRWLNDERYYGGGYGSTQATFMVFQALAQYRADVPDHKDLNMDVSLHLPSRSSPTVFRLLWESGSLLRSEETKQNEGFSLTAKGKGQGTLSVVTVYHAKVKGKTTCKKFDLRVTIKPAPETAKKPQDAKSSMILDICTRYLGDVDATMSILDISMMTGFIPDTNDLELLSSGVDRYISKYEMDKAFSNKNTLIIYLEKISHSEEDCLSFKVHQFFNVGLIQPGSVKVYSYYNLEESCTRFYHPEKDDGMLSKLCHNEMCRCAEENCFMHQSQDQVSLNERLDKACEPGVDYVYKTKLTTIELSDDFDEYIMTIEQVIKSGSDEVQAGQERRFISHVKCRNALKLQKGKQYLMWGLSSDLWGEKPNTSYIIGKDTWVEHWPEAEERQDQKNQKQCEDLGAFTETMVVFGCPN

SEQ ID NO: 4 - DNA, 5066 bp, Rattus norvegicus; identical to SEQ ID NO: 2
  ref <308>: DATABASE ACCESSION NUMBER: Refseq / NM_016994
  ref <309>: DATABASE ENTRY DATE: 2003-01-14

SEQ ID NO: 5 - protein, 1663 aa, Rattus norvegicus; identical to SEQ ID NO: 3
  ref <308>: DATABASE ACCESSION NUMBER: Refseq / NP_058690
  ref <309>: DATABASE ENTRY DATE: 2003-01-14

SEQ ID NO: 6 - DNA, 1200 bp, Rattus norvegicus
  ref <308>: DATABASE ACCESSION NUMBER: Refseq / NM_013154
  ref <309>: DATABASE ENTRY DATE: 2000-11-01
catgagcgccgctcttttcagcctagacagcccagcacgcggcgcaccctggcccacagagcccgcggccttctacgagccaggcagggtgggcaagccaggacgagggccggagcctggggatctgggggagccgggctccacgacccctgccatgtatgacgacgagagcgccatcgacttcagcgcctacattgattccatggctgccgtgcccaccctagagttgtgccacgacgagatcttcgccgacctcttcaacagcaatcacaaagcggccggcgcgggcagcctggagctgctgcagggcggccctacgcgacccccgggtgtggggtcaatcgccaggggcccgctgaagcgcgaacccgactggggcgacggcgacgcgccgggctccctgctgccggcgcaagtggcagtgtgcgcgcagacagtggtgagcttggcggccgcggcacagcccacaccacccacttcgcccgagcctcctcgaggcagccctggaccgagccttgcgcctggccccgtccgagagaagggcgccggcaagaggggtccggaccggggcagccctgagtaccggcagcgacgcgagcgcaacaacatcgctgtgcgcaagagccgggacaaggccaagcgccgcaaccaggagatgcagcagaagctggtggagctgtcggccgagaacgagaagctgcatcagcgtgtggagcagctcacccgggacctggccagcctccggcagttcttcaaagagctgcccagcccgcctttcctgccgcccaccggcaccgactgccggtaacgcgcggtgtgggccttagagactccgaacgaccgatacctcagaccccgacggcggggagcagacgccgcccgaattgctacagtttcttgggcactggactgcgagagaagctatatgaatcccccttaaattatttttttataatggtagcgttttctacgtcttattaccattgcagctaaggtacattgtagaaaagacttttccgacagacttttgtagataagaggaagagactgcgcatgctttttatattcatttttacagtatttgtaagaataaagaagcatttaaattgcaaaaaaaaagaggcaccagctctgactggcctctttctaggctacggtgatcctgagcatcttttgttacctgctggtagaaatgatcct

SEQ ID NO: 7 - protein, 268 aa, Rattus norvegicus
  ref <308>: DATABASE ACCESSION NUMBER: Refseq / NP_037286
  ref <309>: DATABASE ENTRY DATE: 2000-11-01
MSAALFSLDSPARGAPWPTEPAAFYEPGRVGKPGRGPEPGDLGEPGSTTPAMYDDESAIDFSAYIDSMAAVPTLELCHDEIFADLFNSNHKAAGAGSLELLQGGPTRPPGVGSIARGPLKREPDWGDGDAPGSLLPAQVAVCAQTVVSLAAAAQPTPPTSPEPPRGSPGPSLAPGPVREKGAGKRGPDRGSPEYRQRRERNNIAVRKSRDKAKRRNQEMQQKLVELSAENEKLHQRVEQLTRDLASLRQFFKELPSPPFLPPTGTDCR

SEQ ID NO: 8 - DNA, 573 bp, Rattus norvegicus
gtgcttgaagcttctccccaggcgtggtgggatgagtcgcagaaccacacattccgtcacactctgttctgccaggatgggtttcccaacatagggctctccgagacctacgacgaggacgcactcttctccttcgacttctcccagaacaccagagtgccccggctgcctgagtttgctgagtgggctcaggaacagggagatgcctctgccattgcgtttgacaaaggcttctgcgacatgttgatgcagaatgtgagcccgcggcttgaaggtcaaatcccagtgtccagaggtttgccttcggctgaggtgttcaccctgaagcccctggagtttggcaagcccaacacgctggtctgtttcatcagcaacctctttccaccgactttgacggtgacctggcagcatcatttcgtccccgtggagggagccagccccacatccgtttcagccatcgatgggctcaccttccaggccttctcttatttaaacttcacaccggaacccttcgacctttactcctgcactgtgacgcacgagattgaccgctacacggcgattgcctattgg

SEQ ID NO: 9 - DNA, 370 bp, Rattus norvegicus
  ref <308>: DATABASE ACCESSION NUMBER: EMBL / AI176456
  ref <309>: DATABASE ENTRY DATE: 2000-03-03
ggcacgaggagcgatctctcgttgatctccaactgccgcctccattcgccatggaccccaactgctcctgtgccacagatggatcctgctcctgcgctggctcctgcaaatgcaaacaatgcaaatgcacctcctgcaagaaaagctgctgttcctgctgccccgtgggctgtgcgaagtgctcccagggctgcatctgcaaagaggcttcggacaagtgcagctgctgcgcctgaagtgggggcgtcctcacaatggtgtaaataaaacaacgtaggaacctagcctttttttgtacaaccctgaccggttctccacacttttttctataaagcatgtaactgacaataaaataaaaaaacttgacttg

SEQ ID NO: 10 - DNA, 186 bp, Homo sapiens
  ref <308>: DATABASE ACCESSION NUMBER: Refseq / NM_005953
  ref <309>: DATABASE ENTRY DATE: 2002-11-05
atggatcccaactgctcctgcgccgccggtgactcctgcacctgcgccggctcctgcaaatgcaaagagtgcaaatgcacctcctgcaagaaaagctgctgctcctgctgccctgtgggctgtgccaagtgtgcccagggctgcatctgcaaaggggcgtcggacaagtgcagctgctgcgcctga

SEQ ID NO: 11 - protein, 61 aa, Homo sapiens
  ref <308>: DATABASE ACCESSION NUMBER: Refseq / NP_005944
  ref <309>: DATABASE ENTRY DATE: 2002-11-05
MDPNCSCAAGDSCTCAGSCKCKECKCTSCKKSCCSCCPVGCAKCAQGCICKGASDKCSCCA

SEQ ID NO: 12 - DNA, 447 bp, Rattus norvegicus
atgcaggtctctgtcacgcttctgggcctgttgttcacagttgctgcctgtagcatccacgtgctgtctcagccagatgcagttaatgccccactcacctgctgctactcattcactggcaagatgatcccaatgagtcggctggagaactacaagagaatcaccagcagcaggtgtcccaaagaagctgtagtatttgtcaccaagctcaagagagagatctgtgctgaccccaataaggaatgggtccagaagtacattagaaaactggaccagaaccaagtgagatcagaaactacagtcttctataaaattgcatcaaccctaaggacttcagcacctttgaatgtgaacttgacccataaatctgaagctaatgcatccactctcttttccacaaccacctcaagcacttctgtagaagtgaccagtatgacagagaactag

SEQ ID NO: 13 - DNA, 402 bp, Rattus norvegicus
  ref <308>: DATABASE ACCESSION NUMBER: EMBL / AA891576
  ref <309>: DATABASE ENTRY DATE: 2000-03-03
cccacctgaaaaaaaaatagtctcataaaggtctcgataaactgccactggaatggaaccagtcagtgattcccagagaaactctgaggagacagagggctgatgggtcaggaaccagggtggacttcctgaaggaagaggtctgagtgaggatggggaaagcagagggagcgaggcgggcgtccgggtgctggacccagcctgccattctagtcaggaaacagtaggaaaccagagaagacgctgtcagagccctcctcacccggctccccgggaggacccctggggcctggatcccctggcgacccagaggtccccatggggccgtttttcccacgatggccaggcatacccggctcgcccttctgacccttgggtccttgtgtcccaaggatggctggg

SEQ ID NO: 14 - DNA, 1176 bp, Homo sapiens
agacaccgtgtcctcttgcctgggagaggggaagcagatctgaggacatctctgtgccaggccagaaaccgcccacctgcaggtgaggcccggacccctgcccagttccttctccgggatggacgtggggcccagctccctgccccaccttgggctgaagctgctgctgctcctgctgctgctgcccctcaggggccaagccaacacaggctgctacgggatcccagggatgcccggcctgcccggggcaccagggaaggatgggtacgacggactgccggggcccaagggggagccaggaatcccagccattcccgggatccgaggacccaaagggcagaagggagaacccggcttacccggccatcctgggaaaaatggccccatgggaccccctgggatgccaggggtgcccggccccatgggcatccctggagagccaggtgaggagggcagatacaagcagaaattccagtcagtgttcacggtcactcggcagacccaccagccccctgcacccaacagcctgatcagattcaacgcggtcctcaccaacccgcagggagattatgacacgagcactggcaagttcacctgcaaagtccccggcctctactactttgtctaccacgcgtcgcatacagccaacctgtgcgtgctgctgtaccgcagcggcgtcaaagtggtcaccttctgtggccacacgtccaaaaccaatcaggtcaactcgggcggtgtgctgctgaggttgcaggtgggcgaggaggtgtggctggctgtcaatgactactacgacatggtgggcatccagggctctgacagcgtcttctccggcttcctgctcttccccgactagggcgggcagatgcgctcgagacccacgggccttccacctccctcagcttcctgcatggacccaccttactggccagtctgcatccttgcctagaccattctccccaccagatggacttctcctccagggagcccaccctgacccacccccactgcaccccctccccatgggttctctccttcctctgaacttctttaggagtcactgcttgtgtggttcctgggacacttaaccaatgccttctggtactgccattcttttttttttttttcaagtattggaaggggtggggagatatataaataaatcatgaaatcaat

SEQ ID NO: 15 - protein, 245 aa, Homo sapiens
MDVGPSSLPHLGLKLLLLLLLLPLRGQANTGCYGIPGMPGLPGAPGKDGYDGLPGPKGEPGIPAIPGIRGPKGQKGEPGLPGHPGKNGPMGPPGMPGVPGPMGIPGEPGEEGRYKQKFQSVFTVTRQTHQPPAPNSLIRFNAVLTNPQGDYDTSTGKFTCKVPGLYYFVYHASHTANLCVLLYRSGVKVVTFCGHTSKTNQVNSGGVLLRLQVGEEVWLAVNDYYDMVGIQGSDSVFSGFLLFPD

SEQ ID NO: 16 - DNA, 853 bp, Rattus norvegicus
  ref <308>: DATABASE ACCESSION NUMBER: Refseq / NM_057144
  ref <309>: DATABASE ENTRY DATE: 2003-01-13
tcatctcggcagattgactttggcccctgagtcttcaccatgccgaactggggtggaggtgcaaaatgtggagcctgcgacaagacggtttaccatgcagaagaaatccagtgcaatgggaggagcttccataagacctgtttccactgcatggcctgcaggaaggctctggacagcaccacagtggcagctcatgagtcagagatctactgtaaggtctgctatgggcgcaagtatggccccaaggggatcgggtttggacaaggcgctggctgcctcagcacagacaccggcgagcaccttggcctgcagttccaacaatccccaaagccagcacgtgcagccaccacgagcaacccttccaagttctctgcgaagtttggagaatcagagaagtgcccacgatgcggaaagtcggtatatgctgctgagaaggtcatgggaggtggcaagccctggcataagacctgctttccgtgcgccatctgtgggaagagcctggagtccacaaatgtcactgacaaggatggggagctttattgcaaagtttgctatgccaaaaattttggccccacaggcattgggtttggagggcttacacaccaagtggaaaagaaggagtgaaacggcgtgctttctcacagccctgctagtcaacagcagggcttagtgaccccatagatgtaactttggccccgcagcctcctttgtagctggactgcatttctcttcagaagcagtcataggctgcactgaccgtaaaaagagaccaccggaaatgaatctgcaaaagatgcttcattatttactatttttggggtgggagagacaataaacgttttaatggtaaaaa

SEQ ID NO: 17 - protein, 194 aa, Rattus norvegicus
  ref <308>: DATABASE ACCESSION NUMBER: Refseq / NP_476485
  ref <309>: DATABASE ENTRY DATE: 2003-01-13
MPNWGGGAKCGACDKTVYHAEEIQCNGRSFHKTCFHCMACRKALDSTTVAAHESEIYCKVCYGRKYGPKGIGFGQGAGCLSTDTGEHLGLQFQQSPKPARAATTSNPSKFSAKFGESEKCPRCGKSVYAAEKVMGGGKPWHKTCFPCAICGKSLESTNVTDKDGELYCKVCYAKNFGPTGIGFGGLTHQVEKKE

SEQ ID NO: 18 - DNA, 885 bp, Homo sapiens
  ref <308>: DATABASE ACCESSION NUMBER: Refseq / NM_003476
  ref <309>: DATABASE ENTRY DATE: 2000-11-01
ggagtccacacaggcagacttgaccttgaccagatagtcttcaagatgccaaactggggcggaggcgcaaaatgtggagcctgtgaaaagaccgtctaccatgcagaagaaatccagtgcaatggaaggagtttccacaagacgtgtttccactgcatggcctgcaggaaggctcttgacagcacgacagtcgcggctcatgagtcggagatctactgcaaggtgtgctatgggcgcagatatggccccaaagggatcgggtatggacaaggcgctggctgtctcagcacagacacgggcgagcatctcggcctgcagttccaacagtccccaaagccggcacgctcagttaccaccagcaacccttccaaattcactgcgaagtttggagagtccgagaagtgccctcgatgtggcaagtcagtctatgctgctgagaaggttatgggaggtggcaagccttggcacaagacctgtttccgctgtgccatctgtgggaagagtctggagtccacaaatgtcactgacaaagatggggaactttattgcaaagtttgctatgccaaaaattttggccccacgggtattgggtttggaggccttacacaacaagtggaaaagaaagaatgaagaggtgcgccgtttctcagattttttgcgagcctaaaacacttgccaagtaatcctgcacagatcgatacctttccccaaatagcctctcctttgtagtcgtacattatgtgtttctcctcagaagtgatcaggtctttactgaatgttagaagaggcctttggaagaaaattatgtaaagtttaatctataacaaatgctttattatttataatgcttggaatgggagaggcaataaataaatgttttagtgc

SEQ ID NO: 19 - protein, 194 aa, Homo sapiens
  ref <308>: DATABASE ACCESSION NUMBER: Refseq / NP_003467
  ref <309>: DATABASE ENTRY DATE: 2000-11-01
MPNWGGGAKCGACEKTVYHAEEIQCNGRSFHKTCFHCMACRKALDSTTVAAHESEIYCKVCYGRRYGPKGIGYGQGAGCLSTDTGEHLGLQFQQSPKPARSVTTSNPSKFTAKFGESEKCPRCGKSVYAAEKVMGGGKPWHKTCFRCAICGKSLESTNVTDKDGELYCKVCYAKNFGPTGIGFGGLTQQVEKKE

SEQ ID NO: 20 - DNA, 2681 bp, Rattus norvegicus
  ref <308>: DATABASE ACCESSION NUMBER: Refseq / NM_016989
  ref <309>: DATABASE ENTRY DATE: 2003-01-14
tttattggatatgaattttacaaatattacgtcaattagcggtaacggtggagctgaagagtgttgcgccttctccaggctgcacggcgagacccaccaatggtgtggtggaacttgtggccctttccaaggccacggctcttgcggccagcagatgtcagcccacgcatctccctgtgcttgtggactggtttggtaatccattgggtgtcgggatttcttctgatagctttatggaatggatcaatgaggataacctcaaaaaatttatatgtggaatcttcaccaacccagtaggaattcaggactctcaaagctccacaatggcgcccagctctctcctcagcaacagactgaaggcttcggctagttttgtgcgtctacaaagctttgagcggaattttagcttcggcaaacaagtccccccagctcctccagctaattcccgcgacttctctccagacaccagctccagacagtgactgatgcctctctggttgtgattccagcgcagaaactcgaaggagccctttgcccgccgtcctatttagtcaactctttcctagccgcgaatgaccatgtgtagcggagcaaggttggccctgttggtctacgggataataatgcataacagcgtctcctgttcacctgccgccggactcagcttccctgggatcagaccagaagaagaggcttacgatcaggacggaaacccgctgcaagacttctacgactgggaccctccgggcgcagggagccccgcctccgcgctgcgtgacgcctacgccctttactacccagccgacaggagagatgtcgcccacgaaatccttaacgaagcctaccgcaaagtcttggaccagctgtccgccaggaagtacctgcagtccatggtggccaggggcatgggcgagaacctcgccgccgccgcggtggacgaccgggcaccccttaccaaacgccactcggacggcatcttcacagacagctatagccgctaccgaaaacaaatggctgtcaagaaatacttggcggccgtgctagggaaaaggtataaacagagggttaaaaacaaaggacgccgaatagcgtacttgtagcgatgagttgccagctaccgtgtgtataaaatgaaaagtcgttttccaaattgactgaccagtcatcactcatgtgttctttccaaacatgtatttatgtatcaagtaaagccattaaatgactattttgataataatattgtttttctttttacgaagcactggagaatgcacagatatactttgtggaccaattattgatatatattataagtatatattaagaatatatataggtatagcagagagcaattcataagcgtgcacaaagattgaaaattcgcctgagctgtttatgtttttatataaaatgaatagagaaaatagacaaccattgttttgaatattactcctatttttgtaaactggaattaaaggatagtatttttatccacaaccggcttgaagataccaataatggccatttgtacaaaaaaatgatgccctgctccaggagaattctgaggtaatgacttcccaaattgctgaagggctttctttccttgtgagtctctggggcaggctgcttgaaccccagcctaactaactcaagtgggcattgtcccactggttgcgggacaattccaacactttcattttctttgactatacctttatgtgtatctgtctctcctcagagtcccagcccataaggaaattctaattactgaacagctcgatccaaattgtgcttctccccaaaattcatgtcatttccttggagaagagtcgaggaactgtacagaagagaccagcttggagagaaagcgctcttttttgtacttcctgattcttcagggaactgactatcctaaagctagggcaattggaacaaagtgaaagataaagagaggactggaaggggcagagcatggggtgtggaggaggaccctgtagagggactgatttgagagttgcctcaggtctgagaatctgggggcaagtctagtccctctgcaggttccactgcctgacagatcaggtgctggtgttggaatgaatgaatgcaaagtacaatgtgtttttctccagtgctgtccatgcttttcatgtcgtgaaatgaccaggatcctcccctttgaacactgctctgcagaagccacccctattctttgtggtttttctggagaacctccttcctacccttgccctcctgcactgtttaagaatctcgtatgccattttccactcacttatcttaaatttgtgaatgctagttattttttgttgttgtttgatgcaagcagttactgtgaagtttaggaacccctgtttagctaccacagagtgagtatgcactaaatatgaaccttttgtttcttgtttattgagtttgtaggtaaaatgtatttttctatattatggcttattgcttagtaaagcaagcccagcttcctgaggggccttttgtcctgttagcaattgaggcatttgcagaacactgtacagaccccgctctcccctgtacattcctccctggtggtgcccggtccccacttggggatgggagttttgtagactgtacagaaatcggcaccctattttcttgcagctctcagattttgttaatctggattatac

SEQ ID NO: 21 - protein, 175 aa, Rattus norvegicus
  ref <308>: DATABASE ACCESSION NUMBER: Refseq / NP_058685
  ref <309>: DATABASE ENTRY DATE: 2003-01-14
MTMCSGARLALLVYGIIMHNSVSCSPAAGLSFPGIRPEEEAYDQDGNPLQDFYDWDPPGAGSPASALRDAYALYYPADRRDVAHEILNEAYRKVLDQLSARKYLQSMVARGMGENLAAAAVDDRAPLTKRHSDGIFTDSYSRYRKQMAVKKYLAAVLGKRYKQRVKNKGRRIAYL

SEQ ID NO: 22 - DNA, 440 bp, Rattus norvegicus
  ref <308>: DATABASE ACCESSION NUMBER: EMBL / AI230130
  ref <309>: DATABASE ENTRY DATE: 1999-01-22
ggtcgctctcctgctgctcttcacagtcctgatcttggcggcgctggtcctgctcctgcgccaggtgcgttctgccaagtctccaggcgccctctaggggtgaactgggagcctctcccaactccctactatccctcccttccagagggcatctctgaccctgaagcagcctggaaaccaacgttccctatctacattcacagaaagcctacgtgggcagccctgagttctcaattaatcctcctctctcttcctaggatgtcaggtctcagcctgtgactcagggtgaggtccattcggagtgggacttttgttctgatcttcagggccctgggaactttctgtctgggcctttagaaaggcaggcaccagagcctacaggctgggagtcagttccatgcctacttgtaaaaacttttgtaataaaagatttttcctag

SEQ ID NO: 23 - DNA, 1500 bp, Homo sapiens
  ref <308>: DATABASE ACCESSION NUMBER: Refseq / NM_001246
  ref <309>: DATABASE ENTRY DATE: 2000-10-31
ctcccgcgcgcccgcccgcccatggccgggaaggtgcggtcactgctgccgccgctgctgctggccgccgcgggcctcgccggcctcctactgctgtgcgtccccacccgcgacgtccgggagccgcccgccctcaagtatggcatcgtcctggatgctggttcttcacacacgtccatgtttatctacaagtggccggcagacaaggagaacgacacaggcattgtgggccagcacagctcctgtgatgttccaggtgggggcatctccagctatgcagacaacccttctggggccagccagagtcttgttggatgcctcgaacaggcgcttcaggatgtgcccaaagagagacacgcgggcacacccctctacctgggagccacagcgggtatgcgcctgctcaacctgaccaatccagaggcctcgaccagtgtgctcatggcagtgactcacacactgacccagtacccctttgacttccggggtgcacgcatcctctcgggccaagaagaaggggtgtttggctgggtgactgccaactacctgctggagaacttcatcaagtacggctgggtgggccggtggttccggccacggaaggggacactgggggccatggacctggggggtgcctctacccagatcacttttgagacaaccagtccagctgaggacagagccagcgaggtccagctgcatctctacggccagcactaccgagtctacacccacagcttcctctgctatggccgtgaccaggtcctccagaggctgctggccagcgccctccagacccacggcttccacccctgctggccgaggggcttttccacccaagtgctgctcggggatgtgtaccagtcaccatgcaccatggcccagcggccccagaacttcaacagcagtgccagggtcagcctgtcagggagcagtgacccccacctctgccgagatctggtttctgggctcttcagcttctcctcctgccccttctcccgatgctctttcaatggggtcttccagcccccagtggctgggaactttgtggccttctctgccttcttctacactgtggactttttgcggacttcgatggggctgcccgtggccaccctgcagcagctggaggcagccgcagtgaatgtctgcaaccagacctgggctcagcagctgctgagtcgcggctacggcttcgatgagcgcgccttcggcggcgtgatcttccagaagaaggccgcggacactgcagtgggctgggcgctcggctacatgctgaacctgaccaacctgatccccgccgacccgccggggctgcgcaagggcacagacttcagctcctgggtcgtcctcctgctgctcttcgcctccgcgctcctggctgcgcttgtcctgctgctgcgtcaggtgcactccgccaagctgccaagcaccatttaggggccgacgggggcagctgccccatccctcccccaacccctgtatccccaccccgtactc

SEQ ID NO: 24 - protein, 472 aa, Homo sapiens
  ref <308>: DATABASE ACCESSION NUMBER: Refseq / NP_001237
  ref <309>: DATABASE ENTRY DATE: 2000-10-31
MAGKVRSLLPPLLLAAAGLAGLLLLCVPTRDVREPPALKYGIVLDAGSSHTSMFIYKWPADKENDTGIVGQHSSCDVPGGGISSYADNPSGASQSLVGCLEQALQDVPKERHAGTPLYLGATAGMRLLNLTNPEASTSVLMAVTHTLTQYPFDFRGARILSGQEEGVFGWVTANYLLENFIKYGWVGRWFRPRKGTLGAMDLGGASTQITFETTSPAEDRASEVQLHLYGQHYRVYTHSFLCYGRDQVLQRLLASALQTHGFHPCWPRGFSTQVLLGDVYQSPCTMAQRPQNFNSSARVSLSGSSDPHLCRDLVSGLFSFSSCPFSRCSFNGVFQPPVAGNFVAFSAFFYTVDFLRTSMGLPVATLQQLEAAAVNVCNQTWAQQLLSRGYGFDERAFGGVIFQKKAADTAVGWALGYMLNLTNLIPADPPGLRKGTDFSSWVVLLLLFASALLAALVLLLRQVHSAKLPSTI

SEQ ID NO: 25 - DNA, 567 bp, Rattus norvegicus
ggtggctttgtggctcatgtggaaagcacgtgcttgctggatgatgaagggaccccaatggacttcacatactgtatttccttcaacaaagatctgctggcctgctgggatccagaggagggacaaatagtcccctgtgaatatggggtcctgtttaaattggccgaattcatttcaaatatcctcaacaaagaagagggcctgatccagcgcttgaaaaatgggcttcaggactgttccacacacacccagcccttctggaacgcgctgacccacagaacgagaacgccatctgtccaagtagcccaaaccgctccttttaacacaagggagcctgtgatgctggcctgctacgtctggggcttctatccagcggatgtgaccgccgtgtggatgaagaacgggcagcttgttacttcccacagcaacaaggagaagacggctcagcctaacggggactggacataccagaccgtctcctacctagccttaaccccttcctactgggacatctacacctgcgtggtacagcacagcgggacccctgagcccatccgcgcgaactgg

SEQ ID NO: 26 - DNA, 1158 bp, Rattus norvegicus
  ref <308>: DATABASE ACCESSION NUMBER: Refseq / NM_017124
  ref <309>: DATABASE ENTRY DATE: 2003-01-14
ggccaacacctcttctgtctgggttcctcaagctgctcgctccccatctaggcgaagatgtccgcccaagagagttgcctcagcctcatcaagtacttcctcttcgttttcaacctcttcttctttgtactaggaggcctgattttctgctttggcacctggatcctcattgacaagaccagcttcgtgtcctttgtgggcttgtccttcgtgccactgcagacctggtccaaggtcctgtcggtctcgggtgtcctcaccatggccctggctctcctgggctgtgtgggggctctaaaggagctgcgctgtcttctgggcctgtatttcggaatgctgctgctcctgtttgccacacagattaccttggggatcctcatttccactcagcgagtccggctggagcgaagggtgcaggaattggtgttacggaccatccagagctaccgcacgaatccggatgagacagctgctgaggagagctgggactatgcgcagtttcagctgcgctgctgcggttggcaatctccgcgggactggaacaaggcccagatgctgaaagcaaacgggtccgaagagctctttgtgccctgctcctgctacaattccaccgcgaccaatgactcctccggctttgataagctctttctctcccagctaagccggctggggccgcgggcgaagctgaggcagactgctgacatatgtgcactccccgcaaaagcccatatataccgtgagggctgcgcgcggagcctccagaagtggctgcacaacaatatcatctccatagtgggaatttgtctgggagtcggtcttcttgagctcggcttcatgacactctcgatattcctgtgtagaaatctggatcacgtctatgaccggctggcccggtaccgctaggccccaacccaccggttggcacccacgcacctccatgcagtcaggaactgtttccttcctggttggttacaggcttggagccctgtgcctcaggcctcattctctggggacccagatgtctgccctaagacagccttcacttcccccacagggccagggactttcgagcccagcttccttccctgctccctcctccccacaccatctgtctgccacctcccacatgacacctcaaataaatccccttcttttttg

SEQ ID NO: 27 - protein, 281 aa, Rattus norvegicus
  ref <308>: DATABASE ACCESSION NUMBER: Refseq / NP_058820
  ref <309>: DATABASE ENTRY DATE: 2003-01-14
MSAQESCLSLIKYFLFVFNLFFFVLGGLIFCFGTWILIDKTSFVSFVGLSFVPLQTWSKVLSVSGVLTMALALLGCVGALKELRCLLGLYFGMLLLLFATQITLGILISTQRVRLERRVQELVLRTIQSYRTNPDETAAEESWDYAQFQLRCCGWQSPRDWNKAQMLKANGSEELFVPCSCYNSTATNDSSGFDKLFLSQLSRLGPRAKLRQTADICALPAKAHIYREGCARSLQKWLHNNIISIVGICLGVGLLELGFMTLSIFLCRNLDHVYDRLARYR

SEQ ID NO: 28 - DNA, 821 bp, Rattus norvegicus
  ref <308>: DATABASE ACCESSION NUMBER: Refseq / NM_012907
  ref <309>: DATABASE ENTRY DATE: 2003-01-14
aggaaggagtccagagacacagagagcaagatgagttccgagacaggccctgtagctgttgatcccactctgaggagaagaattgagccccacgagtttgaagtcttctttgacccccgggaacttcggaaagagacctgtctgctgtatgagatcaactggggaggaaggcacagcatctggcgacacacgagccaaaacaccaacaaacacgttgaagtcaatttcatagaaaaatttactacagaaagatacttttgtccaaacaccagatgctccattacctggttcctgtcctggagtccctgtggggagtgctccagggccattacagaatttttgagccgatacccccatgtaactctgtttatttatatagcacggctttatcaccacgcagatcctcgaaatcggcaaggactcagggaccttattagcagcggtgttactatccagatcatgacggagcaagagtctggctactgctggaggaattttgtcaactactccccttcgaatgaagctcattggccaaggtacccccatctgtgggtgaggctgtacgtactggaactctactgcatcattttaggacttccaccctgtttaaatattttaagaagaaaacaacctcaactcacgtttttcacgattgctcttcaaagctgccattaccaaaggctaccaccccacatcctgtgggccacagggttgaaatgacttctgggagttggggatggatgaaatgactccttgtatgtcttgacagcagcaattgattacccactaaagagcgactgccacaaggaatctagaagtcg

SEQ ID NO: 29 - protein, 229 aa, Rattus norvegicus [sequence omitted]

SEQ ID NO: 30 - DNA, 528 bp, Rattus norvegicus
atgaccatgtgtagcggacgaaggttggccctgttggtctacgggataataatgcataacagcgtctcctgttcacttgccgccggactcagcttccctgggatcagaccagaagaagaggcttacgatcaggacggaaacccgctgcaagacttctacgactgggaccctccgggcgcagggagccccgcctccgcgctgcgtgacgcctacgccctttactacccagccgacaggagagatgtcgcccacgaaatccttaacgaagcctaccgcaaagtcttggaccagctgtccgccaggaagtacctgcagtccatggtggcgaggggcatgggcgagaacctcgccgccgccgcggtggacgaccgggcaccccttaccaaacgccactcggacggcatcttcacagacagctatagccgctaccgaaaacaaatggctgtcaagaaatacttggcggccgtgctagggaaaaggtataaacagagggttaaaaacaaaggacgccgaatagcgtacttgtag

SEQ ID NO: 31 - DNA, 709 bp, Rattus norvegicus
  ref <308>: DATABASE ACCESSION NUMBER: Refseq / NM_024160
  ref <309>: DATABASE ENTRY DATE: 2003-01-13
ccacgcgtccgggaccgagcggctgcgtgtgctgggtcctcaccatggggcagatcgagtgggccatgtgggccaacgaacaggcgctggcatctggcctgatcctcatcacagggggcatcgtggctactgcgggacgcttcacgcagtggtactttggtgcttactctattgttgcaggagtgctcatctgtctgctggagtacccccggggaaagaggaaaaagggctccaccatggagcggtgtggacagaagtacctgaccgctgtggtgaagctgttcgggcccctcaccagaaattactacgtccgggctgtcctccacttactgctgtccgtgcctgcaggcttcctgctggccaccatcctggggaccgtctgcttggccattgccagtgtgatctacctgctggcagccatccggggtgagcagtggactcccattgagcctaaacccaaggagcggccgcaggttggaggcaccatcaagcagccacctaccaaccccccaccccggccaccagcggaggtccgcaagaagccaagtgaggccgaagaggaggcagcctcggcaggaggaccccaggttaacccaattccagtgacagatgaggtcgtgtgaccttcagtggctcctgcttgagtttccaaggtgttgctcccagagggtggtgatgcccactgtaataaacatggttaatagctggt

SEQ ID NO: 32 - protein, 192 aa, Rattus norvegicus
  ref <308>: DATABASE ACCESSION NUMBER: Refseq / NP_077074
  ref <309>: DATABASE ENTRY DATE: 2003-01-13
MGQIEWAMWANEQALASGLILITGGIVATAGRFTQWYFGAYSIVAGVLICLLEYPRGKRKKGSTMERCGQKYLTAVVKLFGPLTRNYYVRAVLHLLLSVPAGFLLATILGTVCLAIASVIYLLAAIRGEQWTPIEPKPKERPQVGGTIKQPPTNPPPRPPAEVRKKPSEAEEEAASAGGPQVNPIPVTDEVV

SEQ ID NO: 33 - DNA, 687 bp, Homo sapiens
  ref <308>: DATABASE ACCESSION NUMBER: Refseq / NM_000101
  ref <309>: DATABASE ENTRY DATE: 2000-10-31
gcagtgtcccagccgggttcgtgtcgccatggggcagatcgagtgggccatgtgggccaacgagcaggcgctggcgtccggcctgatcctcatcaccgggggcatcgtggccacagctgggcgcttcacccagtggtactttggtgcctactccattgtggcgggcgtgtttgtgtgcctgctggagtacccccgggggaagaggaagaagggctccaccatggagcgctggggacagaagcacatgaccgccgtggtgaagctgttcgggccctttaccaggaattactatgttcgggccgtcctgcatctcctgctctcggtgcccgccggcttcctgctggccaccatccttgggaccgcctgcctggccattgcgagcggcatctacctactggcggctgtgcgtggcgagcagtggacgcccatcgagcccaagccccgggagcggccgcagatcggaggcaccatcaagcagccgcccagcaaccccccgccgcggcccccggccgaggcccgcaagaagcccagcgaggaggaggctgcggcggcggcggggggacccccgggaggtccccaggtcaaccccatcccggtgaccgacgaggtcgtgtgacctcgccccggacctgccctcccaccaggtgcacccacctgcaataaacgcagcgaaggccgggaaaaaaa

SEQ ID NO: 34 - protein, 195 aa, Homo sapiens
  ref <308>: DATABASE ACCESSION NUMBER: Refseq / NP_000092
  ref <309>: DATABASE ENTRY DATE: 2000-10-31
MGQIEWAMWANEQALASGLILITGGIVATAGRFTQWYFGAYSIVAGVFVCLLEYPRGKRKKGSTMERWGQKHMTAVVKLFGPFTRNYYVRAVLHLLLSVPAGFLLATILGTACLAIASGIYLLAAVRGEQWTPIEPKPRERPQIGGTIKQPPSNPPPRPPAEARKKPSEEEAAAAAGGPPGGPQVNPIPVTDEVV

SEQ ID NO: 35 - DNA, 2061 bp, Rattus norvegicus
  ref <308>: DATABASE ACCESSION NUMBER: Refseq / NM_031531
  ref <309>: DATABASE ENTRY DATE: 2003-01-13
aacacaccagggaagtggcaaccctgaacatcaggagtcggcaatcacagaggctggcagctggctggtatcggctctgcagcctgaagactggagaagatgacccgccttgtgacttggagctcttgatggatgggatcggctctgctctcctctccttcccagattgcatactgggagaggacactctattccatgaagaccaagacaaggggacacaactggacagtctcacattggcctccatcaatactgactttgccttcagcctctacaagaagctggctttgaggaatccacataaaaatgttgtcttctccccacttagcatctcagccgccttggccgtcgtgtccctgggagcaaagggcagcagcatggaagagattctagaaggtctcaagttcaatctcacagagacccctgagacagaaatccaccggggctttggacacctcctccagaggctcagccagccaagggacgagatacagatcagtacaggcaatgccctgtttattgaaaaacgccttcaggtcctggcagagttccaggagaaggcaaaggctctgtaccaagctgaggccttcacagctgatttccagcagtctcgtgaggccaaaaagctcatcaatgactatgtgagtaaacagacccaggggaagatccagggactgatcacaaacctagctaagaagacatccatggtactggtgaattacatctactttaaaggcaaatggaaggtgccttttgaccctcgggacacattccagtctgagttctactctggcaaaaggaggtctgtgaaagtgcccatgatgaagcttgaggacctgaccacaccctacgtccgggatgaggagctgaactgcactgttgtggagctgaagtacacaggaaatgccagcgccctgtttatcctccctgaccagggcaagatgcagcaggtggaagccagcttgcaaccagagaccctgaggagatggaaggactctctcaggcccagcatgatagatgagctctacctgcccaagttctccatctctgctgactacaacctggaggacgtccttccagagctgggcatcaaagaagtcttctccacacaggctgacctgtctgggatcacaggggataaggacctgatggtctttcaggtggtccacaaggctgttctggatgtggctgagacaggcacagaagcagccgctgccacaggggtcaaatttgttccaatgtctgcaaaactggaccctctgattatagctttcgaccggcctttcctgatgattatctctgacacagaaactgcaatagctccctttttggccaagatatttaaccccaaatgagattcgaacttcccaagagttgatgcttctcctgaggcattgagcctgtctgtgggtctctgtgtgcattttcgcttctatgctgtgattggccatggcggcatgcctggatgagacagtaactaactgtgtaacagtcctcatgtacagacgcctgtgcagagtcgctgccatgctcccaaacttcttggtaccactagctcatatttctgagcctaaaatttgtctttcccctgcccttgctctctctcccctgtatctgcctcaacccagaagccagggccccatcaggttgtctcagtcccaacttaggctctagttatatcttccttcagcgttgctgtcttgatgggactgtgcacgattaccggccaacccacatggaccaagaagaacacttgctggtccctatctttctgcagtatgtgggaatcacttggtgcccagtgctgcctcactatttccttcctctgggcacagtgctccttgcagcactggcctgactttgtccacatctggcacagagctggagccctcccttctgcagatgcatggcacctgtgggtcagaccagatccccctccccagcactcctacttagagcaatgcagcctttcttttagttcccagctgaccaacctcacacaaaagatgaccaacaacaaccaaaatgaagaggtaggagcaaaggatcaataaacacatc

SEQ ID NO: 36 - protein, 408 aa, Rattus norvegicus
  ref <308>: DATABASE ACCESSION NUMBER: Refseq / NP_113719
  ref <309>: DATABASE ENTRY DATE: 2003-01-13
MDGIGSALLSFPDCILGEDTLFHEDQDKGTQLDSLTLASINTDFAFSLYKKLALRNPHKNVVFSPLSISAALAVVSLGAKGSSMEEILEGLKFNLTETPETEIHRGFGHLLQRLSQPRDEIQISTGNALFIEKRLQVLAEFQEKAKALYQAEAFTADFQQSREAKKLINDYVSKQTQGKIQGLITNLAKKTSMVLVNYIYFKGKWKVPFDPRDTFQSEFYSGKRRSVKVPMMKLEDLTTPYVRDEELNCTVVELKYTGNASALFILPDQGKMQQVEASLQPETLRRWKDSLRPSMIDELYLPKFSISADYNLEDVLPELGIKEVFSTQADLSGITGDKDLMVFQVVHKAVLDVAETGTEAAAATGVKFVPMSAKLDPLIIAFDRPFLMIISDTETAIAPFLAKIFNPK

SEQ ID NO: 37 - DNA, 532 bp, Rattus norvegicus
  misc_feature (1)..(532): n=a, c, g or t
  ref <308>: DATABASE ACCESSION NUMBER: EMBL / AI639241
  ref <309>: DATABASE ENTRY DATE: 2000-03-04
taagaaactacccatgatcctggctctgcacctgaagaggtttaagtacatggaccagcttcatcgatatacaaagctttcttaccgggtggtgtttcctttagaactccgtctgtttaacacttcaggagacgcaaccaaccctgacagaatgtatgacctggtcgctgttgtggttcactgtggaagtggtcccaatcgaggccattatattgcaatagttaagagtcatgatttttggttgttatttgatgacgacattgtagaaaaaatagacgcacaagctattgaagaattctacggactgacatctgacatctccaagaactctgagtctgggtacatccttttctatcagtctcgggactgaaaggtgccgcagtggaaagaagcttctgcttgcttctctggttgcttccgaaaggatcgagctgatgtttaagaagagagaaagagagacagacagacgcaggacgctcagggcagtagctcactttgcatacaataaagcaaaggctggattaacagnnaa

SEQ ID NO: 38 - DNA, 6412 bp, Rattus norvegicus
  misc_feature (1)..(6412): n=a, c, g or t
aattgtgagcggataacaattcccctctagaaataattttgtttaactttaagaaggagatataccatgggcagtagccatgatcatcatcatcacagcagcggcctggtgccgcagcggcagccatatggaattcatggcaacggcacttcagaagcctgggatggtcccccctccaccaggagaggagagccagacggtcatccttccacccggctggcacagctacttgtctcctcagggccgccgttactatgtcaacacgactaccaatgagaccacctgggaacgtcccagcagttctcctgggatttcagccagccctggccctcacaggagctctctgcctacaacagtgaatggataccacgcatcagggaccccggcgcaccctccagagactgcccacatgagtctccgaaaatccaccggtgattcccagaacctgggatcctcatcgccaggcaggaaacagagcaaggaaaacaccatcaccatcaactgtgtgacattccctcacccggacacgatgcctgaacagcaactgctcaagccgactgagtggagctattgcgactacttctgggcggataagaaggacccacaaggcaatggcacagtggctgggtttgaactgctgctgcagaagcaactgaaaggcaagcagatgcagaaggagatgtctgagttcatccgagaaaggataaagattgaagaagaatatgcaaagaaccttgctaagctctctcagaactccttggctgcccaggaggaaggctccctgggagaggcatgggcccaagtaaagaagagtctggccgatgaggctgaagttcatctcaagttctctgccaagctccacagcgaggtggagaaacccctgatgaacttcagagagaacttcaagaaagacatgaaaaagtgcgaccaccacatcgctgacctccgtaagcagctgggcgagagccgctatgcctcagtggagaaggcccgcaaagccctcacagagcggcagaaagacctggagatgaagacccagcagctggagatcaagttgagcaacaagactgaggaggacatcaagaaggcacggaggaagtccactcaggcaggagatgatctcatgcgctgtgtggacctctacaaccaggcccagtccaagtggtttgaagagatggtgacgaccaccctggagctggagcggctggaggtggagagggtagagatgatccgacaacatctgtgccagtacacacagctgcggcatgagacagacatgttcaaccaaagcacagtcgagcctgtggaccaactgctgcgaaaagtggacccagccaaagacagagagctatgggtcagagagcacaaaacaggcaacattcgcccagtggacatggagatctagaagtgactgtatggtcctgggggtcctcctgaggagaggggctgggggtcccatggagaaggggctgtatctgccctattacctgctaatctatccagggaaaaggaggaaaagagacagtgattcccgaaggangngggcccagccaggggctcccccaatattcccaggccataatgatggacccacagccccaacttcacctcaaagactggagcctcccctccaactcccatgctgtgcttgtcactctgagaaccaactgaggctagaaccctggggtcccagctgagttccacaggggtggccatcacacacctgtgccccaggtatccaaggcctgtcctctagcgggattgtcatctccaggaccatggaaggggaagggggtggtgtctctgtctccaaacaatgtcaggatcaggatcgaggacaggagggaaagtgaagttcgcatcctgtcccacaaccttttttagtcctccctacttctccctttgctttgtaggagcccccatctattttttttcgtctcccacaagaatggtggagtttcttcccaacccaaatctggagaggtcagaatggaactacctcagttggcacaaccagatcatagctcccatcagtttcagattccagatctggcattgactgtaaagtctaccacaaagtcccaatctacctttcccccaacctctttctcaaggaggaaactccacacctcatccagacagccctttccagactcaatagaggatattttcccaagtcctcagacagctagatgcatgatcaaaggctttgggggtggagccccacaaagtcttgtttgacacatgcccccgcccctcatcactatgacagccttgaccagtatgctctcccgtgctgactacaggccatgtgagtcagcggtggtaatattcaggtttggttattctctagaatggctctagctgtggatgtgcacaatggagtaggacctgctgtcccccttactgccattggtccgtagtgcagagtctcatggctgtaggtggttgccacccaggaaacgtaggaacgttgggtcgtcacacagtgagtggggttggggggtgaattctagctgggaacttgtgcggggtggggggcatttttcctcgtctttccacagatgactttgtgatttgacctgtctacccaaagggcagaatcccctgagcagcacgaattcggcacgagcctgagcgccactcccatcttgccatctcacatgcttgtcgcggatagcttactaatcttggacctttgggcagcccatccacagaaccatctctcatggttgttagcaagatgcctaatacactaaagcaaactaagcactgtcactttccttactgaaacatctcaaccataaaagccaccatgaggacatttcaccaacctgtgttcagcatggaccccgtgacaccagcctctgatattaggacattatttcttgatttccttattaaagaaaatgggtgctagtggtaatttgctttgtggcttagcaacctaatttgtgagtgatggtcaagttccaagtcttgtcatacacaggggttttgggtatcacagtgtggctcatgactttgttcccttgccacctcgcttaggacattcagagtcccctgagatgtcacttcctccagcataactgaagttggctgatgtgagccgattccgtgtgaggctattctctttttgttgtcccctcacttcctttttaatctatccatgtatacattttccttcttttgtccccttctttccattgatcattcatttagagttttgttaaagacaagcaatctgtgatctctcatctgaagacagcgtacagctctgtgatgcaaagaaaccctcagacgttctgtatagatccaccccttcctgagatgcacttggctctccctctccggtaccagctctatgtgggttcatgtgcacctggtttatgtgccgtgtgctggttcacaggcatctgttcgttttcatactcataaatgctctcagtaatgctggaacggtgcgagtgcgactagcaccatgtgtctaggagggcacccccccagcttcggctccacctccggtttgaccctttctggacagaggaaacaatacattttccaccccacacactgggattcttgaagtattaactgtgctaagagatcttggcacagcagtgggatcttgagtctcctgactaccaaatctcagttcacaccaagctcaatttcagaaatggctgcagttggtttccggtatgtttccttctactacaaatagggaagataagagcatagaggaggtgggtgccaggaagtgatgcccagaactgtgattgtggtagagtcacgtgtcccaactaccctcactgtacccaggggatgaaaccaagaagatgatgatgtgcaagaacctgaaagtgcatactgagttgagtattcaagctgctgttgtggtccttggtctccatgcagtgctggatacccaaccaagagtcatgtgtctaggccagttgctctaccacttagctattcccatccccgttaccttgcttttgtgaacacgccagtgcataggttctgagaggatctggcagggtttatttagagtgggcgagcatccattgtccaggctgagagcagcaacagccctttctacctgcccccgactaggagtgccaatgcacttaagctttgtctgcaaaaccctgattttaaaaaaaaaaaactctaaaatgaatgatgttcaaaaatgggttagttgccatggcaacctccaggaagagatacttgttacccttcattattttctagtacctttgaacagtctcacagtgcaggggccatttgaaggatgtgaatggcagccctaggctgtctctgctatgggggccacctttctacctccacacaagaccctgttgactcgggaggatctctgcaatggttgattaatagctgaggcaaagtatccaaatttgtgacaggggtttgtttgtgtgcaatccctctgtggaatccacccaattatgagggtagtggatgggtgcatgagaatcttggttaagccaaagccccttcatggaaatacaagccataaaattcaaaaggtgtcaaaagaccttggcttgtttgggggtttgttccccatctgtgagtagacttgacaagaaggatttaaacaggagtctgaagacctgctgttactaggaagctaagaaaggcattttacagacttgaagtagagaagcaggtcagctcctgatggcttagactgaagaccccttcattgccaaagttgttcccatgccacaaagcatctctccaactcccttttcaaggtaaattgaaggtgtgactaaaatacaagtacaactcgccctttcaaggaatgcagttctatgaaccttaccatgactggtcttctcaaccacaaccaagataagcatatcaccttgtcaattcctcttttcccaccccggatctagcagccagttcaatgttctgtccctataattttgcctttttctacaacaccatgtaaatggagtcacactgatacaaccttctggatcagccatgttgtgggtgtcagtagaaggtcccctttccctgctgagtgttctatcaaatgaatgggccctaggatttccttagttttaaaatgaggtttttatgccttggaagtcctagccccagatcttggcacagcagtgggatctgagtctcctgactaccaaatctcagttcacaccaagctcaatttcagaaatggctgcagttggtttccggtatgtttccttctactacaactagggaagataagagcatagaggaggtgggtgccaggaagtgatgcccagaactgtgattgtggtagagtcacgtgtcccaactaccctcactgtacccaggggatgaaaccaagaagatgatgatgtgcaagaacctgaaagtgcatactgagttgagtattcaagctgctgttgtggtccttggtctccatgcagtgctggatacccaaccaagagtcatgtgtctaggccagttgctctaccacttagctattcccatccccgttaccttgcttttgtgaacacgccagtgcataggttctgagaggatctggcagggtttatttagagtgggcgagcatccattgtccaggctgagagcagcaacagccctttctacctgcccccgactaggagtgccaatgcacttaaagcttgggttgggtagtgcggatgatgtttagactctttctgggtggtattagggatgtgagccctatgtgtttaaaggagagtttccaataggactgtgttggtggagtgtggaggccggaagccacactatggcaccggggcagaaaggaagaactgagactggccctcccctgcttcccagtctgtcccacatcctaagatcacaccccgggggactcctctgtgctcacctgttccttcctgcagcttcctcgacagacaggttcttggacccaggtaccgacattccaagggacaccagccaacctgggtgagggccgcactctgtatgtcttcccttccctggggaaagagatacccagaagcacccccttacaacctgagcacatgagcgaaccccatgaaagtggaattttctaacaaaataaacttgctcgttttgtctgttttctgtaacttttgctaaatactttatacatttttaatgttgaaaaaaaaaaagcagtgtctcctgccagaactcctcacccgggatgaatgtgtttacttctcgctgtatatctttccatgctgcggctgcctggaccagtaaataaaatggatgtaatataagttgtaagtaacattgtcaaaactcagatcccaatggaggctgcccgcctcccccaccccatgatagcatctctgtgtattaattctgaagaattaaatgtttaaattagaaaaaaaaaaaaaaaaaa

SEQ ID NO: 39 - protein, 442 aa, Rattus norvegicus
  misc_feature (1)..(442): Xaa=Unknown amino acid
MIIIITAAAWCRSGSHMEFMATALQKPGMVPPPPGEESQTVILPPGWHSYLSPQGRRYYVNTTTNETTWERPSSSPGISASPGPHRSSLPTTVNGYHASGTPAHPPETAHMSLRKSTGDSQNLGSSSPGRKQSKENTITINCVTFPHPDTMPEQQLLKPTEWSYCDYFWADKKDPQGNGTVAGFELLLQKQLKGKQMQKEMSEFIRERIKIEEEYAKNLAKLSQNSLAAQEEGSLGEAWAQVKKSLADEAEVHLKFSAKLHSEVEKPLMNFRENFKKDMKKCDHHIADLRKQLGESRYASVEKARKALTERQKDLEMKTQQLEIKLSNKTEEDIKKARRKSTQAGDDLMRCVDLYNQAQSKWFEEMVTTTLELERLEVERVEMIRQHLCQYTQLRHETDMFNQSTVEPVDQLLRKVDPAKDRELWVREHKTGNIRPVDMEIX

SEQ ID NO: 40 - DNA, 7979 bp, Homo sapiens
  ref <308>: DATABASE ACCESSION NUMBER: Refseq / NM_005890
  ref <309>: DATABASE ENTRY DATE: 2002-11-05
gaggatgcagagtgggagaccttaaaaccgtctgatctggctgctaaagcgagtgtctgacgaccacccattaacaccagcgagtagcgtttgctcacggctttaggataagaagcctggaatggtcccccctccgccgggagaagaaagccagacggtcatccttccacctggctggcagagctacctgtcgcctcagggccggcggtactatgtcaacacgaccaccaatgagaccacctgggaacgtcccagcagttctcctgggattccagccagccctggctctcacaggagctctctgcctccaacagtgaatggataccacgcatcagggaccccagcgcaccctccagagactgcccacatgagtgtccgaaaatccaccggtgattcccagaacctgggatcctcatcgccaagcaaaaagcagagcaaggaaaacaccatcacaataaactgtgtgacgttccctcacccagacacgatgccggaacagcagctgctgaaaccaaccgagtggagctactgcgactacttctgggctgataagaaggacccccaaggcaacggcacggtggctgggtttgaactactgctccagaaacagctgaagggcaaacaaatgcagaaggaaatgtcagaattcatccgggaaaggataaagattgaagaagactatgcgaagaacttagctaagctctctcagaactccttggcttcacaggaggaaggctccttgggagaggcgtgggcccaggtgaagaagagcctggcggacgaagcagaagttcacctcaagttctctgccaagcttcacagcgaggtggagaagcccctgatgaacttccgtgagaacttcaagaaagacatgaagaagtgcgaccaccacattgccgaccttcgcaagcagctcgccagccgctatgcctcggtggagaaggcccggaaagccctcacagagcggcagagagacctggagatgaagacccagcagctggagatcaagctgagcaacaagacagaggaggacatcaagaaggcgcggagaaagtccacacaggctggagacgacctcatgcgctgtgtggatctctacaaccaggcccagtccaaatggtttgaagagatggtgaccaccacattggagctagagcggctggaggtggagagggtagagatgatccggcagcacctgtgccagtacacgcagctgcggcatgaaacagacatgttcaaccaaagcacagtcgagcccgtggatcagctgcttcgaaaagtggacccggccaaagacagggagctgtgggtcagagagcacaagacgggcaacatccgccctgtggacatggagatctagatgggcctgtgcagcttcggggggtcctgctggggaggggggctgggctcccaccatggggcccatgccgagtggatgccccccaccctctctcctgggccactgaggagaggggagagagctggtgattccagaagggtgacccggacagcctagctgggggctcccccatattcccaggcccagaagacagacccacagccctgcccttgtctctgaggctgaagaccccctgactcccatgctgtgcttgccgctctgaaacaaacagaggctggaactttgtggtccttgccgagttttgtaggggtcactgtcacatgcttgtgccctggaagccccaaggctcttcctccagctggctcccttgtctccagggctttggaggatcagggtagggagggctctgtctctaagccaggtgtcaggatcagaatcatgggtagaaggtgccattcagctcacagccgcacccagaatcctttgcagccctccttctttatttttttcccattgcattctgggagtccacatctggctttctcagccactgttcatcaccaggggttttaggaggaaggcttggctcctgtcttcccagacccaccatgcctggagaggtcaggatggaactacctcattcggcaaattagccccaaattgagcgctgaatcgtgtcccatgagatcaggcgccatctgtaaagtctcctctggaaatgccaatccatccttcccccagctgcttcctcggggaggcccctgcccccaccctgccagcccttcccagtctcattagaggaagctttccaaagttctcagttatcaagacctcatccagctcgtccaaaggcttcagggatggaaacaaaccagctcgtctcagaggccagcaagctggggcctgtccgccacggtgccctgtgcacctttgggctgccctggcccccactctcccgggccgcccaccacaggctcttaatggggccgggtcagtcctacatgtgagatgggttagggcaagtctttgccatcccccagatggctctgtcttcttgtgtatggcagggctgggactgctgtcccttgtacagttttctgtcactggtgggcactggacaggcatagcagactctcttgtggccacactaggttgtcgcctttcaggcagtgtcccgccacctttgcttcccgctccttctggacattccagagccctgcaccaaacccttacttggtgtctgcacctcctttccctctctccatcttccaatccctggaaaagtctggtctgagtgtgacttgggaagctttcagtgctgctgtttggcccagctcattactttctccctttctctaccacagcaaacacattctccaccatgtcagtctaaagagtctaaaggggccgggagaagcatgagcgaggggcagattctagtcgggagcccatgccctggaaatccatctttcttcatctttcccattgaccactttgggtttgacctgcacatctgcagtgagggcagaattcaacaagcacaactcactggtctttcagtcaacgtgctagaaaccgatgacttattaatctctaattttttggcgcctctttcattgaatgagaattgctttcgtatagttcacattagaaaaatgcctaatatactaaagtaaaccaaacgttgtcacttttctcttgttcttgaaacattgcaaccaaaaaggtcagcacaaaggccttcacctacgtgaagacctcctggtaggatctgtccatgggatggagaaccactctgtccagatctggggttgggtcatgacaccagctaccaattttagaatattatttcttggtttctttatgaaaaatgggtgctagtggtaattgctttgtggcttagtaaactactctgtggatgatttccaaacattcaaagccaatagccttgttattaacaagatattttgagtacaatatggctcattgacttttccattacatctgaggattccagagtcctctgttcatccctgggatagagtgagccctcttgcgtcttccagggtagctcaggttggcccagtttgggccagtccatttttggaggtcactctttcccccctcatcccctcacctccttctctttacccccttcacgtacttcctttctttcttccctctgttattcattcatcaagcaggttaaagccattgtgctaagatctaatctgaggacactataatggccctgtcgtcagggaagcccgtgatcgctcgttttcaggggtcttaccggtcagcaaccttggcattgatacataggcactctacagaatttaagttttcagaggtaagtctgttgttctgattaatctgcattcattcagcgaatgctcaagacaagccaggcatgctgagaagcggcgctctagttgtatgtaagatgggcattcctctgctctcctctattctccatgtcgactgagaagagtataataagaacattgtaccctctccacacttaaccctctgggattctttattataatataaaccaccgtcgtgaggcatttacctgttggatggaaggtagacagcaacaagattttaatcacctggtcaccagaccctcacggcccatatccaattcgaatttcagaaatttctctgtttgctttaaataactctttacaaataagggtcgggcacggtggctcacgcctgtaatcccagctctttgggaggccgaggtgggcagatcacgaggtcaggagatcgagaccatcctggctaacatggtgaaaccccgtctctgctaaaaatacaaaaaattagccagatgtggtggtgcacacctgtagtcccaactattcggcaggctgaggcagtagaatcgcttgaacctgggaggcggagattgcagtgaaccaagatcgggccactgcactccagcttgggtgacagagcaagactccatctcaaaaaaattataaataactctttgcaaataggaaagtgaagctcaagggtaaccagtgaggctatgaaattgccagtgaattaagaccagggctagagtcaacagtccagaacccctatccgtatgaacaggggcccgtttctggttgaaatcaaggttaggatgcaactgagaaaataaaagactgcactttggagaggcaagcacgctatccgggttgttgttttgttttatgtcttggtgcttaggtgaggacttagctgggtttattcaaagtgggcgggtctgggctattcttgagaatgtcccttccatttctgagaacaagtcagccccttctacctgcctccacccaggagactgatgcacaagatctgtttgtgaaagcctgatttaaaaagaaaaaaaaaattccttaagccaaatggtgttccaagttggttgctgtgacaacctccaggaagagccacttgttaccctctattctttctagtgctttcagtcagtggcaacacataggccccttggaccgtggggatggcggccctgagattctgtcagtgggaccaccctgggcctcctttctacctccactcagcaccctgttggccaaggagaatttctgcggtgggaggcagtgctctgctagtcaggattgataaacagctgggcacaccgaaacagtgtaccaacgaattcaccaaccaggggtttctttccctaccctttgtgaaaaccaatcaattactagatgagtggatggatgcagaaaaatctgggctgagccaaagtcccttttggaaatacaagccataacattcgaaggacatcagcgaccttggcttgtttaggtgattttacttccagctgcaggtagtcttgacaaggagtgtttaaacagaaggctcaagatgcattccttgtgtaggtcggagagagcacttctaatgttaagtggggtacagatcagctgcccccccacgtagcctggacatcgtcttatccccataatccttgccatccctacaaggcccatcgccaccaccttttcccaggtttattgaggtatgattgacatccagtaaaattcaccctttggaaatatacagctctgtgaattttgacaaatttagtgtcttgtgaccatcaccaagatcaacctgtttttaaccctccaaaaaattcccttctcctgccctctttccctggcaaccctgattgattatctgatcctataattttgccttttctagaatgtcatataaatggagtcacactgatgtcgccttttgagtctggcatctttccctcagcttaatgcttttgagtcattcatgatgtgtgcgtgtggtttgttccttctccttgccgggaagtatttcattgcatgggcgtactactctgcttctttatttttacactgagcctttcgccctggaagttcttggcccagggtcttcaacttgtttgcacgaccacttccagcttgctgcttccttcagttccccaggctcctcctccaaatgccagctgtgcccacaagctgttcttagggctcacactcgccttttggcgcgtggtgggtttttggtagtgcagaaagaatccagggatgggaggggaagggacggatgggtgctcaattgctgctcacgtctgctgcaacctgaagcttgcatctcagccagcagatctgctcccttctgggacccaggcttcagtgtcacacggtccttggctatgtattgggcgttggaggctttgaaaggcgagcagaagcagcatggacaagaaggctggggctggccctggggctcatcatgatgctttcctggatctgttgcttcatctgcaagctgagggtgtttgttctagatgagtgtctcaggccaccggcaactgcatgtacctcctccctttctcatttccaatgatgtaccctgtacacgtgttcatgctgtgtctggctctcatctgcacaatcgtgcatagaattgcctcaagtcctggtgagagagatgccgtggtacttttccatttagattcaaatggagctaaaattaagagttttatgagctgttaagaatgaggtagtttctcctaggaccccccaaagacagtgcaagtaatgaccgtttggatctcattcgtcgatctttgatagtatgttctggagtctactccccaggagccaggacaggcgtgaagatggagtccttgtcgcagctggagccttgcctagctggtgatcacacagcctggcctgtacctgcaccccactggatggtggtacatggtggcagggacaggaccacacccagttaaggccagaccaggctgagtgtgacccctgaggtaaacactccactaagctgtgtcttgttcatgccccctgctcagtgaaaggtgagtcccgagaccagttgggtacctctctatgcgaaccagagacatttctggatccaggccaggtgaagattagggccaggaagcctgagcccccggggcctcaaggtagggagccgaagaggctgccaggactctgctgggttgaaatttgccggggaggactcttgtctccccctcaggagtatttttgttgaggctttcctggaggtgaagaagcaattcccattgcagcaggttagagcgagaatcagacagagggcaaaaaccaattcgcttctccccacgttctaaatgctggggcatggctgtcaggagggcttcctgggaggtgtctctgggggtggggtgaggttggggcgatggcctttggagattgcgtgtggtgttcaggactgttccttggtgtttgagggaaactttagtgggattgcagtggaatgtaaggtcagggcacgtgggtgctctctcggggtggggtgactgggagacctagagggaaagcctgctatgcagggggagagcacaggactggccctgctctgcggcctcctttgtcccataacctgaagttaagtcacatcccctgtcgggacctccgtgcactcatctgtcaagtgggggcgcttcccttccagcatcacctgcagcagacgggctctcgggagtcgtgggttccaggcagctgtgtggacccagggacagacattcaaagggacgccagccatccttagtgacaggggccccaacttagcatcccttcccttccgttaggaaggagatgaccggaagcaaccccttcacagacacgagcacatcggcaaaccctatgaaagtggaattttctaacaaaataaacttgcttgtttgatctgttttctgtaacttttgctaaatactttatacatttttcatgttaaagagccgtgtctcccgccagcactcctcaccccggtatgaatgtgtttcctccacattgtatatccttccaccctctggctgcctagatcagtaaataaaattgatgtaatataatttataagtaacactgttgaaaccctgatcccagtggaggctgtaacccacctgcccccgcaccacccccctgacccctgttaccgcatttgtgtgtattaatgctgaagaattaaatgtttaaagagtttaaattttgaaggcgtttgctatatacagttgtcctgcattattataaagagttttcaggaagtt

SEQ ID NO: 41 - protein, 412 aa, Homo sapiens
  ref <308>: DATABASE ACCESSION NUMBER: Refseq / NP_005881
  ref <309>: DATABASE ENTRY DATE: 2002-11-05
MVPPPPGEESQTVILPPGWQSYLSPQGRRYYVNTTTNETTWERPSSSPGIPASPGSHRSSLPPTVNGYHASGTPAHPPETAHMSVRKSTGDSQNLGSSSPSKKQSKENTITINCVTFPHPDTMPEQQLLKPTEWSYCDYFWADKKDPQGNGTVAGFELLLQKQLKGKQMQKEMSEFIRERIKIEEDYAKNLAKLSQNSLASQEEGSLGEAWAQVKKSLADEAEVHLKFSAKLHSEVEKPLMNFRENFKKDMKKCDHHIADLRKQLASRYASVEKARKALTERQRDLEMKTQQLEIKLSNKTEEDIKKARRKSTQAGDDLMRCVDLYNQAQSKWFEEMVTTTLELERLEVERVEMIRQHLCQYTQLRHETDMFNQSTVEPVDQLLRKVDPAKDRELWVREHKTGNIRPVDMEI

SEQ ID NO: 42 - DNA, 2068 bp, Rattus norvegicus
  ref <308>: DATABASE ACCESSION NUMBER: Refseq / NM_017327
  ref <309>: DATABASE ENTRY DATE: 2003-01-14
ctctcgcgctctccctgtctcctgtccgctccgccgagcgatgcgagttcttggccccggcgacgccgcctccagctagagatctgcacccctcacccccggcccggccctctgcccagccctgccctgcgcgcgggggtcggagaaggcgccgggacgcaccgacggccgaggagcggcgatgcacatgcactagcggcaccccctaactcactccctccacacccccgccgccgccgccgccaccgcctccgcctccgcctcctcctccgcctccggcagccgcggcagaaggacccaccctgccccccaccccaccctccgccggctccggctgcggatccagcctcgactcctattttatttattttgggtcgtgcactagtctcggtgcctgcaacccgcgcctcccgggcccgcgggcgcctcctctctcggctccggagccccagaccccggccaccctcacctcgacacccccagaccccagccagccgccgctaatcttcgccgctggaatcttgatagaggctgtccttttggggggattctggtctttcgacaattttgttcccaaccaaggaaaggatatcgtgattttctcccctttgagcccaggctctgctctgtgggggggtggggggcgcgccgacccgaggagtcgtgccagccgagtcgtgcgggctgtggcagggaaggggccaccatgggatgtactctgagcgcagaggagagagccgccctcgagcggagcaaggcgattgagaaaaatctcaaagaagatggcatcagcgccgccaaagacgtgaaattactcctgctgggggctggagaatcaggaaaaagcaccattgtgaagcagatgaagatcatccatgaagatggcttctctggagaagacgtaaagcagtacaagcctgtcgtctacagcaacaccatccagtctctggcagccattgtgcgggccatggatactctgggcgtggagtatggtgacaaggagaggaaggcagactccaagatggtgtgtgacgtggtgagtcgcatggaggacactgaaccattctctgcagaactgctttctgccatgatgcgactctggggcgactcggggatccaggagtgcttcaaccgatctcgggagtatcagctcaacgactctgccaaatactacctggacagcttggatcggattggagccgctgactaccagcccaccgagcaggacatcctccgaaccagggtcaaaacaactggcatcgtagaaacccacttcaccttcaagaacctccacttcaggctgtttgacgttgggggccagcgatctgaacgtaagaagtggatccactgcttcgaggatgtcacggccatcatcttctgtgtcgcactcagcggctatgaccaggtgctccacgaggacgaaaccacgaaccgcatgcacgagtctctcatgctcttcgactccatctgtaacaacaagtttttcatcgatacctccatcattctcttcctcaacaagaaagacctctttggcgagaagattaagaagtcacccttgaccatctgctttcctgaatacccaggctccaacacctatgaagacgcagctgcctacatccaaacacagtttgaaagcaaaaaccgctcacccaacaaagaaatttactgtcacatgacttgtgccacagacacgaataatatccaggtggtattcgacgccgtcaccgacatcatcattgccaacaatctccggggctgtggcttgtactgacctcttgtcctgtatagcaacctatttgactgcttcatggactctttgctgttgatgttgatctcctggtagcatgacctttggcctttgtaagacacacagcctttctgtaccaagcccctgtctaacctacgaccccagagtgactgacggctgtgtatttctgtagaatgctgtagaatacggttttagttgagtctttacatttagaacttgaaaggatttaaaaaaaaaaaaacatttctcatgtgctttgtagctttaaaaaggaaaactcaccatttcatccatatttcc

SEQ ID NO: 43 - protein, 354 aa, Rattus norvegicus
  ref <308>: DATABASE ACCESSION NUMBER: Refseq / NP_059023
  ref <309>: DATABASE ENTRY DATE: 2003-01-14
MGCTLSAEERAALERSKAIEKNLKEDGISAAKDVKLLLLGAGESGKSTIVKQMKIIHEDGFSGEDVKQYKPVVYSNTIQSLAAIVRAMDTLGVEYGDKERKADSKMVCDVVSRMEDTEPFSAELLSAMMRLWGDSGIQECFNRSREYQLNDSAKYYLDSLDRIGAADYQPTEQDILRTRVKTTGIVETHFTFKNLHFRLFDVGGQRSERKKWIHCFEDVTAIIFCVALSGYDQVLHEDETTNRMHESLMLFDSICNNKFFIDTSIILFLNKKDLFGEKIKKSPLTICFPEYPGSNTYEDAAAYIQTQFESKNRSPNKEIYCHMTCATDTNNIQVVFDAVTDIIIANNLRGCGLY

SEQ ID NO: 44 - DNA, 1658 bp, Rattus norvegicus
  ref <308>: DATABASE ACCESSION NUMBER: Refseq / NM_013073
  ref <309>: DATABASE ENTRY DATE: 2002-11-05
aattcgggggaccgtcgccgcgctgaaggtggctctatacctgctcgggtgtgcttcgcgatggcctggaaatccggcggcgccagccactcggagctaatccacaacctccgcaagaatggaatcatcaagacagataaagtatttgaggtgatgctggctacagaccgctcccactatgcaaaatctaacccttacatggattctccacagtcaataggtttccaggcaacaatcagcgctcctcacatgcatgcatatgcactagagctcctgtttgaccagctgcacgaaggcgctaaagcccctgacgtagggtctggaagtggaatcctcaccgcgtgttttgcacggatggttggacacagtgggaaagtcattggaattgatcacattaaagaactagtggacgactcaataactaatgtcaaaaaggatgaccccatgctcctgtcctctgggcgagtacggctggttgtgggcgatggaagaatggggtttgctgaagaagccccttacgatgccattcacgtcggagctgcagccccagttgtgccccaggcattaatagaccagttaaagcctggtggaagattgatattgccagtcggtcctgcaggaggaaaccaaatgttggagcagtatgacaagctacaagatggcagtgtcaaaatgaagcctctgatgggggtgatatacgtgcctttaacagataaagaaaagcagtggtccaggtggaagtgattttctcttctgctctttcttcctccacacattcaagggacgagctgtgagagcaacctgtagcttggccgtctgtaacactgcagtggattgctcatctcggtcctcaaagcattgagagccaacagcatcaccgcttgttttggactttgttacactctcttattttcagcatgaaaatgtgtggtttttgtagggtttcctaattcaaaacggtgcagagccagactgatagaggagggctggagagtgttaactttgtgttgtttaacatgccacatttactttacaaatattaaaagaaagggttctctaaccggaaagcttcgtttgtgacttagtttggaagagtggctttgcttttcttggacacttacttctgttccaatattaatttatgagatttcttttgtgtgtcagataacaccacattcacaagtttagcttttttttctttttttatgtgattttggctagcgagcattattagtgggaggagtcaagttgttagaatgattagtggggtggataatggatcgaggagaatataactagaaatttaggtaattttcgtcattttgtcataggagtgataagcttaataggctcactagaggaaagctgtaggaggtgacattggttcagatttttttgttggctgagagtcatgttagtgggaggagtatgatagatgggaaaataatttttaacattgtagaaggttgaggttttgtacgtagtctgttccgtaagtatttgaaatttttactagtaaggctaaacctacggtctttcgcaggctgcaaaaacatgaatggtaattgggatggttatggagattatggagttggagtttaatgtggatgttgaagttatgacaaatagtgatagtattattccttctccgaaattcc

SEQ ID NO: 45 - protein, 227 aa, Rattus norvegicus
  ref <308>: DATABASE ACCESSION NUMBER: Refseq / NP_037205
  ref <309>: DATABASE ENTRY DATE: 2002-11-05
MAWKSGGASHSELIHNLRKNGIIKTDKVFEVMLATDRSHYAKSNPYMDSPQSIGFQATISAPHMHAYALELLFDQLHEGAKAPDVGSGSGILTACFARMVGHSGKVIGIDHIKELVDDSITNVKKDDPMLLSSGRVRLVVGDGRMGFAEEAPYDAIHVGAAAPVVPQALIDQLKPGGRLILPVGPAGGNQMLEQYDKLQDGSVKMKPLMGVIYVPLTDKEKQWSRWK

SEQ ID NO: 46 - DNA, 5240 bp, Rattus norvegicus
  ref <308>: DATABASE ACCESSION NUMBER: Refseq / NM_017212
  ref <309>: DATABASE ENTRY DATE: 2003-01-14
cctcccctggggaggttcgcgttcccgtggctcgcgcctgctgcccgccggcctcgagaacgcgctctctcggccgcggcgctcacagtctccgccacccaccagctccagcaccagcagcagcgccggcgccaccgcccaccttctgctgtcgccgccgccacaaccaccttcccctccgctgtcctcttctgtcctcgcctcctgtcgattatcaggctttgaagcagcatggctgaaccccgccaggagtttgacacaatggaagaccaggccggagattacactatgctccaagaccaagaaggagacatggaccatggcttaaaagctgaagaagcaggcatcggagacaccccgaacatggaggaccaagctgctgggcatgtgactcaagctcgagtggccggcgtaagcaaagacaggacaggaaatgacgagaagaaagcgaagggggccgatggcaaaacgggggcgaagatcgccacacctcggggagcagccactccgggccagaaaggcacatccaatgccaccaggatcccagccaagaccacacccagcccaaagactcctccaggatcaggtgaaccaccaaaatccggagaacgaagcggctacagcagccccggctcgcccggaacccctggcagtcgctcccgtaccccatccctaccaacgccgcccacccgagagcccaaaaaggtggcagtggttcgcactccccctaagtcaccgtctgccagtaagagccgcctacagactgcccctgtgcccatgccagacctaaagaacgtcaggtccaagattggctccactgagaacctgaagcaccagccgggaggcggcaaggtgcagataattaataagaagctggatcttagcaacgtccagtccaagtgtggctcaaaggacaatatcaaacacgtcccgggcggaggcagtgtgcaaatagtctacaagccagtggacctgagcaaggtgacctccaagtgtggttccttagggaacatccatcacaagccaggaggtggccaggtagaagtaaaatcagagaagctggacttcaaggatagagtccagtcgaagattggctccttggataacatcacccatgtccctggaggagggaataagaagattgaaacccacaagctgaccttcagggagaatgccaaagccaagacagaccatggagcagaaatcgtgcacaagtcacctgtggtgtctggggacacatctccacggcacctcagcaacgtctcctccacgggcagcatcgacatggtggactctccacagcttgccacgttagccgatgaagtgtccgcctctttggccaagcagggtttgtgatcaggcccctggggccgtcactgatcatggagagaagagagagtgagagtgtggaaaaaaaaaaaaaaagaatgacctggcccctcaccctctgccctccccgctgctcctcatagacaggctgaccagcttgtcacctaacctgcttttgtggctcgggtttggctcgggacttcaaaatcagtgatgggaaaaagtaaatttcatctttccaaattgatttgtgggctagtaataaaatatttttaaggaaggaaaaaaaaaacacgtaaaaccatggccaaacaaaacccaacatttccttggcaattgttattgaccccgcccccccctctgagttttagagggtgaaggaggctttggatagaggctgcttctggggattggctgagggactagggcaactaattgcccacagccccatcttaggggcatcagggacagcggcagacatgaaagacttgggacttggtgtgtttgtggagccgtaaggcgtatgttaactttgtgtgggtttgagggaggactgtgatagtgaaggctgagagatgggtgggctgggagtcagaggagagaggtgaggaagacaggttgggagagggggcattgcgtccttgccaaggagcttgggaagcacaggtagccctggctgcagcagtcttagctagcacagatgcctgcctgagaaagcacagtggggtacagtgggtgtgtgtgccccttctgaagggcagcccatgggagaaggggtattgggcagaaggaaggtaggccccagaaggtggcaccttgtagattggttctctgaaggctgaccttgccatcccagggcactgctcccaccctccaggaggaggtctgagctgaggagcttccttttcgatctcacaggaaaacctgtgttactgagttctgaagtttggaactacagccatgattttggccaccatacagacctgggactttagggctaaccagttctttgtaaggacttgtgcctcttgcgggaacatctgcctgttctcaagcctggtcctctggcacttctgcagtggtgagggatgggggtggtattctgggatgtgggtcccaggcctcccatccctcgcacagccactgtatcccctctacctgtcctatcatgcccacgtctgccacgagagccagtcactgccgtccgtacatcacgtctcaccgtcctgagtgcccagcctcccaagcccaatccctggacccctgggtagttatggccaatctgctctacactaggggttggagtccagggaaggcaaagatttgggccttggtctctagtcctacgttgccagaatccaaccagtgtgcctcccacaaggaaccttacaaccttgtttggtttgctccatcaggcgtttggcgccatcgtggatggagtccgtgtgtgcctggagattaccctggacacctctgctttttttttttttactttagcggttgcctcctaggcctgactccttcccatgttgaactggaggcagccaagttaggtgtcaatgtcctggcatcagtatgaacagtcagtagtcccagggcagggccacacttctcccatcttctgcttccaccccagcttgtgattgctagcctcccagagctcagccgccattaagtccccatgcacgtaatcagcccttccataccccaatttggggaacataccccttgattgaaatgttttccctccagtcctatggaagcggtgctgcctgcctgctggagcagccagccatctcagagacgcagccctttctctcctgtccgcaccctgctgcgctgtagtcggattcgtctgtttgtctgggttcaccagagtgactatgatagtgaaaagaaaaagaaaaagaaaaaagaaaaaagaaaaaaaaaaaaggacgcatgttatcttgaaatatttgtcaaaaggttgtagcccaccgcagggattggagggcctgatattccttgtcttcttcgtgacttaggtccaggccggtcgagtgctaccctgctggacatcccatgttttgaagggtttcttcttcatctgggacccctgcagacactggattgtgacattggaggtctatacattggccaaggctgaagcacaggacccgttagaggcagcaggctccgactgtcagggagagcttgtggctggcctgtttctctgagtgaagatggtcctctctaatcacaacttcaagtcccacagcagccctggcagacatctaagaactcctgcatcacaagagaaaaggacactagtaccagcagggagagctgtggccctagaaattccatgactctccactactatccgtgggtcctttccaagccttgcctcgtcaccaagggcttgggatggactgccccactgatgaaagggacatctttggagacccccttggtttccaaggcgtcagccccctgaccttgcatgacctcctacagctgaaggatgaggcctttaaagattaggaacctcaggcccaggtcggccactttgggcttgggtacagttagggacgatgcggtagaaggaggtggccaacctttccatataagagttctgtgtgcccagagctaccctattgtgagctccccactgctgatggactttagctgtccttagaagtgaagagtccaacggaggaaaaggaagtgtggtttgatggtctgtggtcccttcatcatggttacctgttgtggttttctctgtatacccccatttacccatcctgcagttcctgtccttgaataggggtgggggtactctgccatatctcttgtaggcagtcagcccccaagtcatagtttggagtgatctggtcagtgctaataggcagtttacaaggaattctggcttgttacttcagtgaggacaatcccccaaggccctggcacctgtcctgtctttccatggctctccactgcagagccaatgtctttgggtgggctagatagggtgtacaatttgcctggaacctccaagctcttaatccactttatcaatagttccatttaaattgacttcaatataagagtgtatccatttgagattgcttgtgttgtggggtaaaggggggaggaggaacatgttaagataattgacatgggcaaggggaagtcttgaagtgtagcagttaaaccatcttgtagccccattcatgatgttgaccacttgctagagagaagaggtgccataaggctagaacctagaggcttggctgtccaccaacaggcaggcttttgcaaggcagaggcagccagctaggtccctgacttcccagccaggtgcagctctaagaactgctcttgcctgctgccttcttgtggtgtccagagcccacagccaatgcctcctcaaaaccctggcttccttccttctaatccactggcacatcagcatcacctccggattgacttcagatccacagcctacactactagcagtgggtaagaccacttcctttgtccttgtctgttctccagaaaagtgggcatggaggcggtgttaataactataggtctgtggctttatgagccttcaaacttctctctagcttctgaaagggttacttttgggcagtattgcagtctcaccctccgatggctgtagcctgtgcagttgctgtactgggcatgatctccagtgcttgcaagtcccatgatttctttggtgttttgagggtggggggagggacatgaatcatcttagcttagcttcctgtctgtgaatgtccatatagtgtactgtgttttaacaaacgatttacactgactgttgctgtacaagtgaatttggaaataaagttattactctgattaaacaaaaaaaaaaaaaaaaaaaaaaaaaaaaaaaa

SEQ ID NO: 47 - protein, 374 aa, Rattus norvegicus
  ref <308>: DATABASE ACCESSION NUMBER: Refseq / NP_058908
  ref <309>: DATABASE ENTRY DATE: 2003-01-14
MAEPRQEFDTMEDQAGDYTMLQDQEGDMDHGLKAEEAGIGDTPNMEDQAAGHVTQARVAGVSKDRTGNDEKKAKGADGKTGAKIATPRGAATPGQKGTSNATRIPAKTTPSPKTPPGSGEPPKSGERSGYSSPGSPGTPGSRSRTPSLPTPPTREPKKVAVVRTPPKSPSASKSRLQTAPVPMPDLKNVRSKIGSTENLKHQPGGGKVQIINKKLDLSNVQSKCGSKDNIKHVPGGGSVQIVYKPVDLSKVTSKCGSLGNIHHKPGGGQVEVKSEKLDFKDRVQSKIGSLDNITHVPGGGNKKIETHKLTFRENAKAKTDHGAEIVHKSPVVSGDTSPRHLSNVSSTGSIDMVDSPQLATLADEVSASLAKQGL

SEQ ID NO: 48 - DNA, 787 bp, Rattus norvegicus
  ref <308>: DATABASE ACCESSION NUMBER: Refseq / NM_031970
  ref <309>: DATABASE ENTRY DATE: 2002-11-05
gcacttctcggatcctcagcccagtgcttctagatcctcagccctgaccagctcagccaagaccatgaccgagcgccgcgtgcccttctcgctactgcggagccccagctgggagccgttccgggactggtaccctgcccacagccgcctcttcgatcaagctttcggggtgcctcggtttcccgatgagtggtctcagtggttcagctccgctggttggcccggctatgtgcgccctctgcccgccgcgaccgccgagggccccgcagcagtgaccctggcccggccgttcagccgggcgctcaaccggcaactcagcagcggtgtgtcagagatccgacagacggccgatcgctggcgcgtgtccctggacgtcaaccacttcgctcctgaggagctcacagtgaagaccaaggaaggcgtggtggagatcactggcaagcacgaagaaaggcaggatgaacatggctacatctctcggtgcttcacccggaaatacacgctccctccaggtgtggaccccaccttggtgtcctcttccctgtcccctgagggcacactcacggtggaggctccgctgcccaaagcagtcacacaatcagcggagatcaccattccggtcactttcgaggcccgtgcccaaattggaggcccagagtcggaacagtctggagccaagtagaagccttcagcttgctacccatccccagtagccgtcaccagccctccctctctgtcaatctgaatgctcttttgatacatgtactttctgttttactcaaataaa

SEQ ID NO: 49 - protein, 205 aa, Rattus norvegicus
  ref <308>: DATABASE ACCESSION NUMBER: Refseq / NP_114176
  ref <309>: DATABASE ENTRY DATE: 2002-11-05
MTERRVPFSLLRSPSWEPFRDWYPAHSRLFDQAFGVPRFPDEWSQWFSSAGWPGYVRPLPAATAEGPAAVTLARPFSRALNRQLSSGVSEIRQTADRWRVSLDVNHFAPEELTVKTKEGVVEITGKHEERQDEHGYISRCFTRKYTLPPGVDPTLVSSSLSPEGTLTVEAPLPKAVTQSAEITIPVTFEARAQIGGPESEQSGAK

SEQ ID NO: 50 - DNA, 387 bp, Rattus norvegicus
  ref <308>: DATABASE ACCESSION NUMBER: EMBL / AA875620
  ref <309>: DATABASE ENTRY DATE: 2000-03-03
gatgtgggctaacttaggacccagactaaggtggagttcctacaagtgactagaatgtcatgatcatctcattgtataacaagccctttgtcctctgtgctgggaaggccttagctgctactcaaaactgacaagttggactcctttttactactgccttgttgccagctatccgagcgtgaaaggccgcaaagccgtgggtgctggctgtcccacatcacaggcatggcaggtggcagcccagactgaaccagagcctcacttgaacatgagcattagccaatgtaataaaagcctaccttgcctgaagtgtatctgtctttctgcttacaatggcttgcaatggaagtgcatggtttcctgcttgtaataaaatcttttaaaagc

SEQ ID NO: 51 - DNA, 2234 bp, Rattus norvegicus
  ref <308>: DATABASE ACCESSION NUMBER: Refseq / NM_133398
  ref <309>: DATABASE ENTRY DATE: 2003-01-13
agccattgttccgccgggggaggacaagcgaggcctggcgctggcgccccgacgccacttagcggccgcctctggagacactctgtccccgccgccccgtgtcctcctggcggcggcggcgtgaggccgactggagggagtgggaaccctcggccctccccgtggcggcggcggccacctattccccactctggagtgaggggcggccgcgatgcgcttggcctaaggtgtcgcggccctcgtcgcttcccacgactgttccagcggcgtctgtgctccccggcgtcatcccgagagtctctgacgggagggaagatggctgcacgaagctggcaggacgaactggctcagcaggccgaggagggctctgcccggctgcgggagttgctctctgtcggcctaggttttctgcgcacggagttgggcctcgacctggggttggagccgaagcggtacccgagctgggtgatcctggtgggcaccggcgctctcgggttgctgcttctcttcctcctaggttacggctgggccgctgcttgcgccggcgcccgcaaaaagcgaaggagcccgccccgcaagcgggaggaggtgaccccgccgactccggcccccgaggacccagcccaactgaagaatctcagaagcgaggagcaaaagaaaaagaaccggaagaagctgcctgaaaagcccaaaccaaatggacggactgttgaaatacctgaagatgaagttgttagaactccccgaagtataactgccaagcagccaccagagacagacaagaaaaatgaaaagtcaaagaaaaataagaagaagtcaaagtcagatgctaaagcagtgcaaaacagttcacgccatgatggaaaggaagttgatgaaggagcctgggaaactaaaattagtcacagagagaaacgacaacagcgtaaacgtgataaagtgctgactgattctggttcattggattcaactatccctgggatagaaaataccatcacagttaccaccgagcaacttacaactgcatcatttcctgttggttccaagaagaataaaggtgattctcatctaaatgttcaagttagcaactttaagtctggaaaaggagattctacacttcaggtttcttcagggttgaatgaaaatattactgtcaatggaggaggctggagtgaaaagtctgtaaaactctcctcacaattgagtgcaggtgaggagaagtggaactctgtcccacctgcttctgcaggcaagagaaaaacagagcagtctgcttggactcaagaccctggtgatactaatgcaaatgggaaagactggggaaggaattggagtgatcgctcaatattttctggcattggatctactgctgagccagtttctcagtctaccacttctgattatcagtgggatggtagccgtaatcagccccatatcgatgatgaatggtctgggttaaatggtttgtcttctgctgatcctagctcagactggaatgcaccagcagaagagtgggggaactgggtagatgaagatagagcttcacttctgaagtcccaggagccgatttctaatgatcaaaaggattcagatgatgataaggaaaaaggagaaggagctcttccaactggaaaatctaaaaagaaaaaaaagaaaaagaagaagcaaggtgaagataactctatcacccaggacacagaagacctagaaaaggacactagagaagagcttccagtgaatacctcgaaagcccgtccaaaacaggagaaagcttgttccctgaagaccatgagcactagtgatccagttgaagtactcatcaaaaatagccagcctatcaagactcttccacctgctatctctgccgagccatctgttactttatcaaagggtgactctgacaagagctcttcccaagtgccaccgatgttacaagacacagacaaacccaagtcaaatgctaagcaaaacagtgtgcctccctcacagaccaagtctgaaactaattgggaatctccaaaacaaataaaaaagaagaaaaaggccagacgggaaacgtgaatttttttcctaaattggacatgtgtttacaaacactgtcttgaagattatgctgtttatgcaataatttgtgaacatgtacagagttttatataaatttaaaccaatttttaaaacaaaactgaacacaaccaccataaaatggaatcaaagggaaagttaatttatgaaat

SEQ ID NO: 52 - protein, 581 aa, Rattus norvegicus
  ref <308>: DATABASE ACCESSION NUMBER: Refseq / NP_596889
  ref <309>: DATABASE ENTRY DATE: 2003-01-13
MAARSWQDELAQQAEEGSARLRELLSVGLGFLRTELGLDLGLEPKRYPSWVILVGTGALGLLLLFLLGYGWAAACAGARKKRRSPPRKREEVTPPTPAPEDPAQLKNLRSEEQKKKNRKKLPEKPKPNGRTVEIPEDEVVRTPRSITAKQPPETDKKNEKSKKNKKKSKSDAKAVQNSSRHDGKEVDEGAWETKISHREKRQQRKRDKVLTDSGSLDSTIPGIENTITVTTEQLTTASFPVGSKKNKGDSHLNVQVSNFKSGKGDSTLQVSSGLNENITVNGGGWSEKSVKLSSQLSAGEEKWNSVPPASAGKRKTEQSAWTQDPGDTNANGKDWGRNWSDRSIFSGIGSTAEPVSQSTTSDYQWDGSRNQPHIDDEWSGLNGLSSADPSSDWNAPAEEWGNWVDEDRASLLKSQEPISNDQKDSDDDKEKGEGALPTGKSKKKKKKKKKQGEDNSITQDTEDLEKDTREELPVNTSKARPKQEKACSLKTMSTSDPVEVLIKNSQPIKTLPPAISAEPSVTLSKGDSDKSSSQVPPMLQDTDKPKSNAKQNSVPPSQTKSETNWESPKQIKKKKKARRET

SEQ ID NO: 53 - DNA, 1401 bp, Homo sapiens
gggctgaattggacatgtgtttgcaaacacttgtcttgaagattatgctgtttatgcaataatttgtgaacatgtacagagttttatataaatttaaaccaatttttaaaacaaaactgcggacaccaccataaaaatggaatcaaaagaaagttaatttatgaaattaagaggtcagcagaatatactcagtgatggaagacacttgggaaagtctttttaatagaacaagaacgatcttaatttaagaatattatcctggtttaacaacagtgccctgtttacaacagattgtgccctatctcatctgcagccgagtaataaaggattctgattagaaagagggttgcctacagattagtaagcaattccttggatcttatgcacagaacttgtaccatttgaatctgttttatgcttaaatcaaagtgctttgatcaaatgcataacctgccatatctttacatatttgttggtagcaatttgtattaaagaaatcacaagtgcaaataaaaagtcatttatcatttgtttaactaaactgtcatggtttagtttacaatttttaaaaagttcttaaaatactgaaaatgcagttgacacttgtgtatggcttatgaagttatttttgatagtcttacattacttgaattgttcaaagtacagtatattttaaattaagaaaagtgaactatatgtatttgttttatacatttaaggcttagactcataaataatgctattgtttatgatttgaaaactttcaggcaaaatccaatttacatttttcccttccctagcaattacttttttccagcttcaactcttcttagttactaatactttgttgactttaaaaatgaaatcattcacaaacttttggtatatgatggagaatgaaaaactagagtcagacagctttaattgacattgtcaacacctccagttatcaggaatacatttttttactgccttaacctgtagtgcgtagaatatgcatcaatttcttgaaggagattcatgtttttataagaattttcatgtaattattgcaattgtggtcaaataaggaacgtttcctgcttgaaattatattgatttaaatgatgtgtgagatgtttcaccattttcaggcactgtgtaattctattgtaataaactggcaggtatctttgtaactataaatagtgcatgctcagccatgtacactgtaaatagcctttaccaaacgtgtttgacaaggaccataattaacatcacttagtgaattgtgataaagaaaaaaaagccatgatttaaaaaaaaaaaaaaaaaaaaaaaaaaaaaaaaaaaaaaaaaaaaaaaaaaaaaaaaaaaaaaaaaaaaaaaaaaaaaaaaaaaaaaaaaaaaaaaaaaaaaaaa

SEQ ID NO: 54 - DNA, 2460 bp, Rattus norvegicus
  ref <308>: DATABASE ACCESSION NUMBER: Refseq / NM_031134
  ref <309>: DATABASE ENTRY DATE: 2003-01-13
agggtaattagacctctgcctggcggtagtagatcccgagatgaaaggggctctggcgtcactggcaggattttatgtccatgaatgcagggaacaaaccagaaacccccccaattctcccctgcgagtgaaagctattatatctgaaaatgacatctttctcaaaacgtttcaccgagcgtcgctcctggacagagccgcaggggggatgaggtatctccagacaggacaagtctctgaagacttcccagcccctaacccagtaccatttaccaagccagcttgcccctagctctcccacctgccactccccagcccctctaaccaccggccctcccgtttttttggggcacagggcatggtgtgaaaggctgagtactgagggggatactatgggtgctgtcccctagggcctgggtggcggggggtgggtggcctgtgggcgtggggggggggcagtgtgcccaccccagtctcttggcgtgctggagggcatcccggatggaattgaagtgaatggaacagaagccaagcaaggtggagtgtgggtcagacccagaggagaacagtgccaggtcaccagatggaaagcgaaaaaggaagaacggccaatgtcccctgaaaagcagcatgtcagggtatatccctagttacctggacaaagacgagcagtgtgtcgtgtgtggggacaaggccaccggttatcactaccgctgtatcacttgtgagtgctgcaagggcttctttcgccgtacaatccagaagaacctccatcccacctattcctgcaaatatgacagctgctgcgtcatcgacaagatcacccggaatcagtgccagttgtgccgcttcaagaagtgcatcgctgtgggcatggccatggacctggttctagacgattcaaagcgggtggccaaacgcaagctgattgagcagaaccgggagaggaggcgaaaggaggagatgatccgctcgctgcagcaacgaccagagcccactcctgaagagtgggatctgatccacgttgctacagaggcccatcgcagcaccaatgcccagggcagccattggaaacagaggcgaaaattcctgccggatgacattggccagtcacctattgtctccatgccggacggagacaaggtagacctagaggccttcagcgagtttaccaagatcatcaccccggccatcacccgcgtggtggactttgccaaaaaactgcccatgttctccgagctgccttgtgaagaccagatcatcctcctgaagggctgctgcatggagatcatgtccctgcgggcagctgtccgctatgaccctgagagcgacaccctgaccctgagtggggagatggcggttaagcgggagcagctcaagaatggtggcttgggtgtagtctccgacgccatctttgaactgggcaagtcactctctgcctttaacctggatgatacggaagtggctctgctgcaggctgtgctgttaatgtcaacagaccgctctggcctgctgtgtgtggacaagatcgagaagagtcaggaggcctacctgctggcgtttgagcactacgtcaaccaccgcaaacacaacattccgcacttctggcccaagctgctgatgaaggagagagaagtgcagagttcgattctgtacaagggggcagcggcagaaggccggccgggcgggtcactgggcgtccacccggaaggacagcagcttctcggaatgcatgttgttcagggtccgcaggtccggcagcttgagcagcagtttggtgaagcgggaagtctccgagggccggttcttcagcaccagagcccgaagagcccgcagcagcgtctcctggagctgctccaccgaagcggaattctccattcccgagcggtctgtggggaagacgacagcagtgaggcaagctccctgagctcctcttcctctgacgaggacacggaggtctgcgaggacctggcaggcaaggcagcctctccctgaggccccttggagggcgatggggaaggagaaggagcatgctactccttctccagggcctctgccctagagctgggcacgcccacatgctgggagcaaggccacaggctggccgcctcccactcaagaccaccctcctacccctgagcacgccacacgtggccaagctcccttgttatttgttctgtagttccctctgcctgggatgcccttccccctctctatgcctggcaataccttgtccctttgaggccccactcaagtgtcacctccttccccagctctcccaggcagaaatagttgtctgtgcttacgtggttcatgcttcttctgtgacacttctcactgttttataattagtcgggcatgagtctgtttcccaagctagactgtgtctgaatcatgtctgtagcccagtgcccagtgccgggcctggcatagagtaggaactccataaaaggtatgttg

SEQ ID NO: 55 - protein, 492 aa, Rattus norvegicus
  ref <308>: DATABASE ACCESSION NUMBER: Refseq / NP_112396
  ref <309>: DATABASE ENTRY DATE: 2003-01-13
MEQKPSKVECGSDPEENSARSPDGKRKRKNGQCPLKSSMSGYIPSYLDKDEQCVVCGDKATGYHYRCITCECCKGFFRRTIQKNLHPTYSCKYDSCCVIDKITRNQCQLCRFKKCIAVGMAMDLVLDDSKRVAKRKLIEQNRERRRKEEMIRSLQQRPEPTPEEWDLIHVATEAHRSTNAQGSHWKQRRKFLPDDIGQSPIVSMPDGDKVDLEAFSEFTKIITPAITRVVDFAKKLPMFSELPCEDQIILLKGCCMEIMSLRAAVRYDPESDTLTLSGEMAVKREQLKNGGLGVVSDAIFELGKSLSAFNLDDTEVALLQAVLLMSTDRSGLLCVDKIEKSQEAYLLAFEHYVNHRKHNIPHFWPKLLMKEREVQSSILYKGAAAEGRPGGSLGVHPEGQQLLGMHVVQGPQVRQLEQQFGEAGSLRGPVLQHQSPKSPQQRLLELLHRSGILHSRAVCGEDDSSEASSLSSSSSDEDTEVCEDLAGKAASP

SEQ ID NO: 56 - DNA, 3622 bp, Rattus norvegicus
  ref <308>: DATABASE ACCESSION NUMBER: Refseq / NM_032067
  ref <309>: DATABASE ENTRY DATE: 2003-01-13
cagcgtgagtgcgaggcggaggcggcggctgcagcggagcggacggtcgctcggcggcaggcactggtgtaatggataggtaacagaagaccacttcccttcctcctcagggcttcagcatgactgagtgcttcctgccccccaccagcagccctagtgaacaccgcagggccgagcacggcagcgggctgacccggacccccagctccgaggagatcagccctacaaaatttcctggattgtaccggacgggtgagccttcacctccccatgacatcctccacgagcctcctgatatcgtgtcagatgatgagaaagaccatggaaagaaaaaaggaaaatttaagaaaaaggagaaaaggactgaaggctacgctgccttccaggaagacagctctggagatgaggctgaaagtccttccaagatgaagaggtccaagggcatccatgtgttcaaaaagcccagcttctctaaaaagaaggaaaaggattttaaaatcaaagaaaagcccaaagaagaaaagcacaaagaagaaaagcataaagaggaaaagcataaagaaaagaaatgtaaagacttgacggccgccgatgttgttaaacagtggaaggaaaagaagaaaaagaagaagccaactcaggagccagaggtgcctcagacggacgccccgagtctcagacccattttcggcgctcccttggctgacgcagtagagaggaccatgatgtacgacggcatccggctgccagctgtcttccgggagtgcgtggactacatggagaagcacggcatgaaatgtgaaggcatctaccgagtgtcaggaatcaaatcaaaggtagatgagctgaaagcagcctatgaccgagaggagtctccaaacttggaagaatatgaacctaacactgtagccagcttgctgaagcagtatctgcgagaccttcccgagaatttgcttaccaaagagcttatgccccgatttgaagaggcttgtgggaggaccacagaggtggagaaagtgcaggagttccagcgcttgctcagggaactgccggagtacaaccatcttctgctctcctggctcattgtgcacatggaccacgtcatcgcgaaggagctggaaaccaagatgaacatccagaacatctccatagtgctgagcccaaccgtccagatcagcaaccgggtcctgtatgtgcttttcacacacgtgcaagagctctttggcaccgtggtcctgaagcaagtaacgagacctctgcgttggtccaacatggccacaatgcctacactgccagagacccaagcaggcatcaaggaagaaatcaggagacaggagttccttttgaactgtttacatcgagatctgcagggcgggataaaggacttgtctaaagaagaaagattatgggaagtacagaggattctgactgccctcaagagaaagctgagggaagctaaaagacaagagtgtgagaccaagattgcacaggagatagccagcctttcgaaggaggatgtttccaaagaagaaacgaacgaaaacgaggaggtcataaatatcctccttgcccaggagaatgagatcctgactgagcaggaggagctcctggccatggagcagtttctgcgtcgtcagatcgcctcggagaaagaagagattgaccccctccgagctgagattgcggagatccagagtcgccagcatggccgcagcgagacagaggagtactcctctgacagcgagagcgagagcgaggatgaggaggagctgcagatcattctggaagacttacagaggcagaatgaagagttagaaataaagaacaatcacttgaaccaggcagtccatgaagagcgggaggccatcgttgagctccgagtgcagctccggctgctccagatgctgcgagccaagtctgagcagcagctccaggaggaggaggagcccgagaggcgagggggcacaggcccactaccctgtgaaggtgtcctcgaggtgagagcagccaaggagcaggcgaagcctcgcccagcaaagaccggaaggagacgcccatctgaactgccccggccctgtgcatcgtactgtaagcgagagtccgctgcctgtcctgccaggcagcgttctgtgaaggctctcagagacgctcgctcttgcacacgtctgactccgtgtcaggctcaggtcctgggagagtgaaggggtggacactcgggggtggggggcttgcagggaacacaggtatttccagatagtgtcagcttatttgaaaattaattttctttgttaaaaataactattttaacccttgagtggcttctttttaaaccaaaaaactttttgcttttttttgttgttgtttaaatcacagcagaatcaggatctctttcttatcaaagggtgggaaccaaaccaggtcacttctgcgcctgccttgtggacgctcgtggtctcaccagccctgcagggtccctggccactcttgcttgtgccttccacaccttttggtgcagattgttcagtggggagctgcctcatattctctgactggccaaaaaggctctcgctggggttccctgtacctgccctgtgtgtaccactttgcttttccagctccgggtctgtcagtgtgagtcaggacggcccagtttggttgcagacggaggttaccatgcagcctgccaccagcctgggcagggcaggccacccactcactgccagggagcagcaagggcctcttctcagaggtggtcagagatgaccaccttgaccctgaggttgcacaggacacttctcacaccagggtccttttccacactgaccttccaggaaagtcaccttccacagtgacttcagttgctagcttgggctgggatacccacacctctgccaggataagccatgtagatgctgtcatgcacaactttcacctgtccatgtcatctcaaggggctgcttaaggactctgacagaactgagcggaaggaaggaaagcgtaactgtaattgaccccccctggtgtttgcctctaacctggacgactgctcccagcggtctgggaggccggactcttaggcaaccggatttcactgtcagatgagtggcccccagggaggtccccctgtggctctgaagacaaatcccacactctaaagtgagcgacaaacccacaggagggctccggtctactcctagttagtatttatttcagcacctgttggtgcgatttttcgttagcctctacctattgcactgttgtgacttgttggccattatttgatttttgtacggaaaaaaaagctttgttatagaaatcagcatactatttttttaaatctggagagaagatattatggaaactggaaacgtggtcaggtgtcaaatgtaaatgtataaatgccttgctgcacccgtcagatgtgcaacactcattctatatttgctggcaatattgaggaattctttttgtttgtgtaaactctaatttctatcaaggtatcatgggtttttaaaatttcattacaaatgtctcaatgttggttaactaatttttgccaggaccattattgattaaggaaataaactcagcagccatttgagaaaaaaaaaaaaaaaaaaaa

SEQ ID NO: 57 - protein, 693 aa, Rattus norvegicus
  ref <308>: DATABASE ACCESSION NUMBER: Refseq / NP_114456
  ref <309>: DATABASE ENTRY DATE: 2003-01-13
MTECFLPPTSSPSEHRRAEHGSGLTRTPSSEEISPTKFPGLYRTGEPSPPHDILHEPPDIVSDDEKDHGKKKGKFKKKEKRTEGYAAFQEDSSGDEAESPSKMKRSKGIHVFKKPSFSKKKEKDFKIKEKPKEEKHKEEKHKEEKHKEKKCKDLTAADVVKQWKEKKKKKKPTQEPEVPQTDAPSLRPIFGAPLADAVERTMMYDGIRLPAVFRECVDYMEKHGMKCEGIYRVSGIKSKVDELKAAYDREESPNLEEYEPNTVASLLKQYLRDLPENLLTKELMPRFEEACGRTTEVEKVQEFQRLLRELPEYNHLLLSWLIVHMDHVIAKELETKMNIQNISIVLSPTVQISNRVLYVLFTHVQELFGTVVLKQVTRPLRWSNMATMPTLPETQAGIKEEIRRQEFLLNCLHRDLQGGIKDLSKEERLWEVQRILTALKRKLREAKRQECETKIAQEIASLSKEDVSKEETNENEEVINILLAQENEILTEQEELLAMEQFLRRQIASEKEEIDPLRAEIAEIQSRQHGRSETEEYSSDSESESEDEEELQIILEDLQRQNEELEIKNNHLNQAVHEEREAIVELRVQLRLLQMLRAKSEQQLQEEEEPERRGGTGPLPCEGVLEVRAAKEQAKPRPAKTGRRRPSELPRPCASYCKRESAACPARQRSVKALRDARSCTRLTPCQAQVLGE

SEQ ID NO: 58 - DNA, 217 bp, Homo sapiens
  misc_feature (1)..(217): n=a, c, g or t
  ref <308>: DATABASE ACCESSION NUMBER: EMBL / AA029488
  ref <309>: DATABASE ENTRY DATE: 2000-03-03
aaaccccacacgagggctctcacctccttctcctaggtagtatttattttcagcacctgtttgatgcagtttttaatcctctacctattgcactgttgtgactcgttggccattatttgatttttgtacgaaaaaaagctttgttatagaaatcagcatactatttttttaaatctggagagaagatattctggtgactggaangtatgggcccggg

SEQ ID NO: 59 - DNA, 1665 bp, Rattus norvegicus
  ref <308>: DATABASE ACCESSION NUMBER: EMBL / X03347
  ref <309>: DATABASE ENTRY DATE: 2003-02-17
atgggacagaccgtaaccactcctttgagtctgaccctagaacactggggagacgtccagcgcattgcgtccaaccagtccgtggacgtcaagaagagacgctgggtcaccttctgttctgccgagtggccaactttcgatgtggggtggccgcaagatggtacttttaatttggacattattttacaggttaaatctaaggtgttctctcccggtccccacggacacccggatcaggtcccatacattgtcacctgggaggctattgcctatgaaccccctccgtgggtcaaaccttttgtctctcccaaactctccccctctccaaccgctcccatcctcccatccggtccttcgacccaacctccgccccgatctgccctttaccctgcccttaccccctctataaaacccagaccttctaaacctcaggttctctccgatgacggcggacctctcattgaccttctcacagaagaccctccgccgtacggagaacagggaccgtcctcctctgacggggatggcgacagagaagaggccacctccacttctgagattcctgccccctctcccatggtgtctcgcctgcggggcaaaagagacccccccgcggcagattccactacctctcgggctttcccactccgtttggggggtaatggtcagaaaaataataacccttccttttctgaagatccaggtaaattgactgccttaatcgagtctgtcctcaccacccaccagcctacctgggacgactgtcagcagttgctggggactctgctgacaggagaagaaaagcagcgggtgctcctggaggccagaaaggcagtccggggcaacgatgggcgccccacccagatgcctaatgaagtcaatgccgccttccccctcgaacgtcccgattgggattatacaactcctgaagacagcctttcctactaccattccccagccgactccttctccagcatgggctctcctgtcaacacacaggacttttgcgcagatctgtccgtctctagtgccaactttatccccacggagacagccatctccaccagccctgacctgcagtggctggtgcagcccactctggtctcctccgtggccccatcgcagaccagagcgccccatccttacggactccccacccagtctgctggggcttacgccagagcgggaatggtgaagaccgtgtcaggaggcagagcgcagagcatcggcagaaggggcaaagtagagcagctatctcctgaagaggaagtgaaacggagaatccgaagagaacggaataagatggctgcagccaagtgccggaatcggaggagggagctgacagatacactccaagcggagacagatcaacttgaagatgagaagtctgcgttgcagactgagattgccaatctgctgaaagagaaggaaaaactggagtttattttggcagcccaccgacctgcctgcaagatccccgatgaccttggcttcccagaggagatgtctgtggcctccctagatttgactggaggtctgctgccccttctcaacgaccctgagcccaagccatccttggagccagtcaagagcagctttgatgacttcttgtttccggcatcatctggacacagtggctttattagcatggcagggtggcaatag

SEQ ID NO: 60 - DNA, 518 bp, Rattus norvegicus
  ref <308>: DATABASE ACCESSION NUMBER: EMBL / AI639435
  ref <309>: DATABASE ENTRY DATE: 2000-03-04
ccctcatccctgtagcctgtccttgaggcaagctaaccctttataattcttgtctcaggctctcttaagccatcacagtagtaaaggctcaagtacatgagaaggccaagactctagttgttagtcactaggctaagagtggatcagtccatttaggagaactaaaggttctgaggtttgactctccccttcacctagtgctaaggggaagaggggaaagccctcagagtgcagagcctcaaggtggggcacatgtaggcttctgccagttgcaccattaacacatcagatgacactttcaggtccttctgcacagcccctcccatctccgtgattcagcctcagtgcagctgccctttctcccggggaagacctgaatcaagaagcttgcagaatgtgggggtgcatgcctttagtcccagcacttggaaggcagaggcagctggatccttgtgtgttcaagccagcctgggtgacatagtgaattctaggttagccaaggttaccaaacaaaataa

SEQ ID NO: 61 - DNA, 8797 bp, Rattus norvegicus
  misc_feature (1)..(8797): n=a, c, g or t
agaagcagggcaagatggagcggagacgtatcacctctgcacgccgctcctatgcctcctccgagacgatggtcaggggccatggtcctaccagacacctgggtaccattccgcgcctctccctgtctcgaatgacgcctccactccctgccagggtagacttctccctggccggggcgctcaatgccggcttcaaagagactcgggccagcgagcgcgcggagatgatggagctcaatgaccgctttgctagctacatcgagaaggtccgcttcctggaacagcaaaacaaggcgctggcagctgagctgaaccagcttcgagccaaggagcccaccaaactggctgacgtttaccaggcagaacttcgggagctgcggctgcgtctggaccagcttactaccaacagtgcccggctggaggtggagagggacaatctcacacaggacctcggcaccctgaggcagaagtgagaaggggaataggaaaatggctagtgagcagagagactgaattgagagaggagcctggaagaagggtactgcctccccctaaggagagcctcttagctgctgtgtttcaaaagggagagctgtctttgttccctaatatgatgcagaatagccaggaagagactgaaaacttcagggatcagattcccagagagagctgagcattctgggtacttaccaccaagctgagggaggactgtgtgtgggtagccagggtacaagcaggcaggtgcttcagtcactgggcactatgaatggccagagaggtttgcgtccacaaggagggctcttggtctctgaaatataagaaatgcaagaaagagcaggcaggcctggatgccgggcccagatggctgtctacgacctgcttttgaccctgctcaagtcattttgattggttgtagctgtaaaggagaggtcatgatacaatctgtcctaaaagatggtaaccgaggtcaaactctggggcgtggtgctttgctgggtggtggatattcacgtgtccctctggtgcaggaggggcactggtgtcagtgacagtgggcgcacggtggtggatgcgcctctgggaacaagagcaggtggcaccaaccccgataaggcacctcagtaatgagttaaggaggaaggctcttatctgttcacgcgtcaccaggcctctgtgtaggaacctgccattgcttactcttcctgccactctaccgatcctgtgggatccgtttgtaacantcccctccctctggaggttcggatagggacccaagagtcctcaggaaaacctaaagcctgtactgtgttccctgtcccaggctccaagatgaaaccaacctgaggctggaggcggagaacaacctggctgtgtacagacaggtcagagagatgagaggaagggtggggagggaaggcggaggcccgccaccaaacaccgcagttgtctgcttccaagatccccacaaggagggggaagacaaagttggaaattttagtagctaggaccctggggtcaaagagattctctccctgctccaggaggcggatgaagccaccttggctcgtgtggatctggagaggaaggttgagtcgctggaggaggagatccagttcttgaggaagatccatgaggaggtgaggccagggagggggagggaggggccttacgagaaactgcaggtaatagacagagacgctcacagaggnaaacngagaaaccaaatttcaggaagaaaacaaaaacaagagaaagagtnaagacagagacttagggagatgtgtccagtatttactacccgtgnaaacacacgcaggccttccgccgccatgttctaagaagcacagaaccgagtctgagtttctccttcacatcagctctcagccttatcactacctcttccacaactgtagggaccttgaggcctagagagtgaaacacacccaaagtcacacagctagaacccctctagacctgtcacagtggtatgcatctcagcctgtgagtggtagacgcggaacgtttgaactgttcaaggccaatttcngcnacannagnaaactgaaaccagccacgcnccgcncgcgcacatctattctcttacctcagaacctngctgcaagacatattnattcatgcctggttcctgactatgcagtcctgagaggaaggcacctcaaattctacttccatgcccattagacgctttacttttactttttgacaggatatcactgtgtagctggcctggaacatgcacttcctccagtaacatctgcctcatttccgtgagccattgctataaatggcagacagaggcgtgagtctgggagagtgcagcctaggccgtagcttgagccttaataccccttcttttaccttattaggaagttcgagaactccaggagcagctggcccagcagcaggtccacgtggagatggatgtggccaagccagacctcacagcggctctgagagagattcgcactcagtacgaggcagtggccaccagtaacatgcaagaaacagaagagtggtatcggtccaaggtacctgtggggcagcttgcctcttccaggaagtcttcctgctccctcctgaagaataaaggaaggaaggaagctagggaagggtaacctatctaggtgtccagtcttgcccagagagaggagacttgcccagaaccacgcaagcattattaacttcccaaactactcttggttactgctattataagtaatatcagtaatagttaataatagctaaaggctcaccagtttgctcagtgtcacacagctcctaagtgacaaagggatagcgtttcctatcctaacccatatcatcagagagcctgctttttgatgcctctgccagcctatgccctgcattaccgaacatctactgtgtgtcacgttctttttttctttttttggagctggggaccgaacccagggccttgcacttgctaagcaagcgctctaccactgagctaagtcccaaccccgtgtgccacgttctttagtccagatgaggccagcgtttatacagactgtaggaggcagggacgatgggggatggactaggggtgggacttgtgctagacaggcagcctagagactcaggagaagagggaagggcatctcaggtggagaacaggggctgtgaggaggcctgagacagaaaagcacagagaccagaaatgtcgctgcccagggcgccaagcccagtgtgagttaatgagcctcacatgcagggacagtctgggaggatgaaggcctaagaagttcttgggctacagttgttcctcctaagggagccctgaggttcctggtttttcagtgatcatgtatatctcccagctcaggcagctctctgggctgtgccttgcgcactttccctcaatttttggtcctctctgggtttagtttgcagacctcacagacgttgcttcccgcaacgcagagctgctccgccaggccaagcacgaggctaatgactatcgccgccaactgcaggccttgacctgcgaccttgagtccttgcgcggcacggtgagcacggatcactggttggatggggcagcaagaggttgctggagggggacagggatggagggaccggggtggcataggcgaacacggaagagatcaggggttgcagcctcgaagtttctcaaaatctcccggccaagcgatcagttccatcccgcagaacgagtccttggagaggcaaatgcgcgaacaggaggagcgccacgcgcgggagtcggcgagttaccaggaggcactcgctcggctggaggaggagggccaaagcctcaaggaggagatggcccgccacctgcaggagtaccaggatctactcaacgttaagctagccctggacatcgagatcgccacctacaggaaattgctggagggcgaagaaaaccggtgagctctacctcagcccgagaattcctcttgttcctttacagtactccggagttagccttgtatccttcccacccagagtgttcagcctacgaacaatagatattcaagaaatgtctgaagaatagatgggtccaactactggtaattctcgggactgaggacttgagttattccccagattaagtggcttaccacaagcatggccaacaaaaatggaatttcccatggtctgaagggcttgttctgcctctatgaagttattgtgacttaaaaaaaaaattccatctccaaagcctccttcctggaagtattctgtgggggcagataacacagtcctgcagacacttccggctcctggagagtgttggctgctgggttgaaagttggtggtggaggctggagagatagttagggctttgggttccaacatccatcttatggcttgcaatggcttgtagtaacactccagttccaggggaacccacatctgccattgtatgtgtgtgtgtgtgtgtgtgtgtgtgtgtgtgtgtgtgtgtgtgtgtatgtatgcatgcatgtatgtatgtatgtatgtatgtatgtatcagtcattatgttgctgctttagtcccagcacttgagaggaagaggccagcagatctctgtgagtttgaggctaacctggtatatatattgaatcagcgccatatagagaggctttgtaagaaaaagttggcgaagagaaagagaggagaggagacagagaggagcagaaaggagagagagcaggagagagacagacagacagacagacacacacacgcatgcacacaggacagagagaaaatgtgtgtgtgtgtgtgaaagagagagagagtgtgtgtgtgtgtgtgtatgtgagtgtgtgtgtgtatgtgtgtgtgtgtgtgtgtgtgtgtgtgtgtgtgtgtgtgtcctggtaaagggctttgagattttcatgctggccctggaccagccctggcctggggatgtcctagggcagcctcctcatccctatccctccttttccagcatcaccattcctgtacagactttctccaacctccagatccgaggtcagtatagtggggccttgtgggaaagggtaatgaatcccctccctcctcccccaggcctgtgaactgctctcatggactgggaggcaaagagacccacgctctccttgagagcttcgtgaccctccacggagaccctagatggagtgcagaatcttagggcttatagctggtccctgcctccctctgccctgtgtccccatcccctggaaaacccaacaggtctcaactgatgccaggtctgcaagccatgaacaagctccgccttctaagtgttttgtgttcttgttttttttttttttttttctcctctctctcttaactgcttgtcactacagggggcaaaagcaccaaagaaggggaaggccacaaagtcacaagacatctcaaaaggctcacaatacaagttataccaatacaggctctcgccagattgtaaacggagtcctgccagcactccgttagacacgtgcacttcagttgtgtacttttcccggcttgccttcttcctcccaggcctcttctaagggactgtaccgtgtcctttgtccagaaccttcagtacccacgctaggtcctggctctgtgtaattaggttatactgatagagctagcctacgttaaaggttaggtcatgctaacagagctagcctatgctaacagagctagcctatgctcaaggtgaggtcatgctaacagagctagcctgtgttaaaggcagcatgtctctgggagctcaaaggagatgctctgacccctctgagcaaatgcctctgcctcaccacttttgtgtcgctaggtggtccccttggattgcagtgcctgtgggcaggctctgtgtttgattcatgtgtccccagagttctattgcttcattcagtgctgactcagcccagaggttccccctggatggctgctcttgtagtgaataaactctaggttccctgctcttcgttttacatattagtgagtggcgacacgtatattttcctctctaagggggttggatcaaattacgttttactggtatgtggcccttaaatgattcttagatatgggggaagattccatttaggaacattggccgtgcatattgcagggtgtaattgagctttagaaagttaaccatgctggccaggcaaaggtgccaaataccaggcagtcaaaggtcactagagccagataagtgacagggaaataagaatggggaaaggtccgtgcgtattaaccactaatctgcaccacgtggtatacgtcagtgagttgacactcgcatgtccaggagtagtcactatgagcccattttgtaagagaggaaactgaggctccttccttggtgcagcccttggctgtctctcagccaggtgccagaacagaaggcagagcgggctacaggacagcagcagggtgtgcccagcgctgggggacagatgggagtctccagtcacttcggaaaagtcatgcttttcgctgcctagctagttagccccgtccgtattcacgatcctgggtgcatgatggggaacttgggtgcagggcaggatgtctagtgtcccaagagcccacggagacctcctctcctcgtacctgcagaaaccagcctggacaccaaatctgtgtcagaaggccacctcaagaggaacatcgtggtaaagacggtggagatgcgggatggcgaggtgaggaaacgttccagtggccccggggagttcttgaggctgtactggagaaagcctggtactagctcactgaaggtccttattaactaccaggagagctctggtagaagggatgggccttgaatgtaattctccttttccagctctttcatgggtggcgtgctaagggcaacctgtatatggaggccaccatctttctggaacacttggtggagggaggctttcaaattttactcagaagaactttccataggggaattggaagaggggctagacatagaatggccgtcttcatttgttgggatgttagcagcaatggttgcccttacgtcatagtcctctacaagtggcatttcatatctcaatgtgtgatgcaatcaagccgatagtcctggaagacacatccagggcagtcaggggctcgcctcggggatgctcagcctagcaaactggatctgggattctggagcccctaactctgtgctgtgactcttccctctgcctgcaggtcattaaggagtcgaagcaggagcacaaggatgtgatgtgaggtgtgcccagctggcggcccttgccatacagtgtgagggcctaaagctccctcctcagatagtcttgtttgctaggcccaattcccatccacaccagtgctccccttccttctgtttttatgcccacggctcggtcagtgcggagtctcatggacggcacagaccaccctgcatctccaactaacaggatactcaccccaaaggggcaatcaggaggggaggacccccctccccccagctgggttagaactggaagaaagaggaaagacaggggcagggagacttaacaaatcccttccttcatccttgttgttatggaaaccgttgccagagctggaggtctctgggaactggactttgagttttcataggctgctggagcaagacaaacattcagacagaaaggaaaagttcccgaggcaaagaatctctagccagaggcctaggcatctggaagaaccctgacgatgtaggagtgggtagggcagacttgctacctggaatggccactaaggcagtcctgaagggcccccctccggagggatgaccctcgtgtatcggccccactgagcagccctgcaggttgatgccccacgagcctgtgaaaacttggttcttggcatgtggcaggctctatagcataagtggagagggaaggtgtactggagggtatagaggagggctctctggcccctaagtatggatgcggagaggggggagcccaggaaggctaccccgctcaggctgcaggggtgccatggcggaggaaccggtggagataacttggacaatggagttggaagttgtaggcaactagttacacttggctctgaatccttggaatcaaggaaatgacctgttctctcaaagacactgaaacaggagagagggacttccatccactgggcagggtacaggcgcgtctcagttgtgaaggtctattcctggttgctcagtccccaactgcgcatcaccctgggcttctcaacctggaagagtccacaaccatccttctgaggccctccatccccacaaccactagctgttgttctccaagccaagggccccattccctttcttatgcatgtacggagtatcgcctagactttaagcgtccatcctgtttgaaagtttgggaaactgacacacgttgtgttcaagcagcctggtgtggagtgccttcgtattagtgtaccctctcggaagctggttggtgggcaggtgaggaagaaatggagctgaaagtgtcccctcagttgtcctttcctccccctctaaggtccctcacttttcccaggacatcgtacactcccccccttgtcacctctgctaaccttcagagcagtactgtcacctttactcactgggcagaaataaagacagtgtcagaggcttccacagagkatctgatttgttcagaaggtggggtgaggacagacaagacccaaccttgctcgttatcaccaccgaatgtctagcgagcctaaacttccacaacaaaccctccacagcagcagctggcgttaaatccgcctccaacgacgaggtgccct

SEQ ID NO: 62 - DNA, 1386 bp, Rattus norvegicus
  ref <308>: DATABASE ACCESSION NUMBER: Refseq / NM_017134
  ref <309>: DATABASE ENTRY DATE: 2003-01-14
ctcagctgcaggaaccctggatgagcatgagctccaagccaaagcccatagagattatcggagcgcctttctctaagggacagcctcgaggaggggtagagaaaggtcccgcagcattaaggaaagctggcctggtggagaagcttaaagaaacagagtacaatgtgagagaccacggggatctggcctttgtggatgtccccaatgacagcccctttcaaattgtgaagaacccacggtctgtgggaaaagccaatgaacagctggctgctgtggtagcagagacccagaagaatggaacaatcagtgtggtgctgggtggagaccacagtatggcaattggaagcatctctggccacgccagggtccaccctgacctatgcgtcatttgggtggatgctcacactgacatcaacactccgctgacaaccagctctgggaatctgcacgggcaaccggtggcctttctcctgaaggaactgaaaggaaagttcccagatgtaccaggattctcctgggtgaccccctgcatatctgccaaggacatcgtgtacatcggcttgcgagatgtggaccctggggaacactatataataaaaactctgggcattaagtatttctcaatgactgaagtggacaagctgggaattggcaaagtgatggaagagaccttcagctacctgctgggaaggaagaaaaggcccattcacctgagttttgatgttgatggactggacccagtattcaccccggctacgggcacacccgttgtgggaggcctatcttacagagaaggtctctacatcacagaagaaatttacaagacagggctactttcaggactagatatcatggaagtgaacccaactcttgggaagacaccagaggaggtgactcgtactgtgaacacggcagtgccgttgaccttgtcttgttttggaacgaaacgggaaggtaatcataagccagagactgactaccttaaaccaccgaaataaatgtgaatacatcgcataaaagtcatctggggcatcacagcaaaccgaacagaaccaggccaacgctgctcctcccaagggcttgttcttttagaaaaaagaatgttttttcccaatatgtatgtattctagcagttcctttctggaatgaaattcagggtgtgggaattaaaacagctatgaaattaggagacacgtacttcccattttagcagaagttatccttaagaagtagtataaattaatatctaattaaaaaatgcaccaggagttaaaatacacagtgatgtcaagtgtcaactcacggttggaagcaaaggcatctggagacgaggcctgcatccacgtcgttcaaaacatgtgatttttgtaataaactctttataat

SEQ ID NO: 63 - protein, 323 aa, Rattus norvegicus
  ref <308>: DATABASE ACCESSION NUMBER: Refseq / NP_058830
  ref <309>: DATABASE ENTRY DATE: 2003-01-14
MSSKPKPIEIIGAPFSKGQPRGGVEKGPAALRKAGLVEKLKETEYNVRDHGDLAFVDVPNDSPFQIVKNPRSVGKANEQLAAVVAETQKNGTISVVLGGDHSMAIGSISGHARVHPDLCVIWVDAHTDINTPLTTSSGNLHGQPVAFLLKELKGKFPDVPGFSWVTPCISAKDIVYIGLRDVDPGEHYIIKTLGIKYFSMTEVDKLGIGKVMEETFSYLLGRKKRPIHLSFDVDGLDPVFTPATGTPVVGGLSYREGLYITEEIYKTGLLSGLDIMEVNPTLGKTPEEVTRTVNTAVPLTLSCFGTKREGNHKPETDYLKPPK

SEQ ID NO: 64 - DNA, 393 bp, Rattus norvegicus
  ref <308>: DATABASE ACCESSION NUMBER: EMBL / U75397
  ref <309>: DATABASE ENTRY DATE: 2000-07-30
gacacaccttgccgatggctgaacatgtgcaattcgtgagggacacgctcacttctagccttaagggggtaggagtgatgtttcaggggaggctttagagcacgatgaggaagagggctgagctgagctttggttctccagaatgtaagaagaaaaaatttaaaacaaaaatctgaactctcaaaagtctatttttttaactgaaaatgtagatttatccatgttcgggagttggaatgctgcggttacctactgagtaggcggtgacttttgtatgctatgaacatgaagttcattattttgtggttttattttacttcgtacttgtgtttgcttaaacaaagtgacttgtttggcttataaacacattgaatgcgctttactgcccatggg

SEQ ID NO: 65 - DNA, 2337 bp, Rattus norvegicus
  ref <308>: DATABASE ACCESSION NUMBER: Refseq / NM_012526
  ref <309>: DATABASE ENTRY DATE: 2003-01-14
acagctgctctgcggagcccgcacccgccgagctcctcctacatgcagctggcgagcggcaccatgcagcgggccatgctcctcggcctcctgggcgcagcagctctggctgctgtcatctcagctccagtggataacagggatcacaatgaagaaatggtgactcgctgcattattgaagtcctctcaaatgccctatccaagtccagtgctccaaccatcacccctgagtgccggcaagtcctgaggaagagtggaaaagaggtcaaaggtgaagagaaaggtgaaaatgagaactcgaagtttgaagtacggttgctaagagacccatctgatgcctcagtaggccgctgggcctccagtagggaggaaacaggggctccagtagaagactctccaggtcaggcgaaggtagacaatgaggagtggacaggaggaggaggacacagtcgagaggcagtagatgaccaggagagcctccatccctccaaccaacaagtgtccaaagaagcaaagatacgccattcggaggaaaggggcggaaaagaggaggaggaggaagaaggcaagatttatccaaagggagagcataggggagatgctggtgaggagaagaaacacactgaagaatctggagagaaacacaacgccttctccaacaaaagaagcgaagcctcagctaagaaaaaagaggagtcagtggccagagcagaggcacacttcgtggagctggagaagacacacagcagggagcagagcagccaggagagtggagaggagacgaggaggcaggagaaaccacaggagcttcccgaccaggaccagagcgaggaagaatccgaggaaggcgaggaaggcgaggaaggcgcaacctcagaagtaaccaaacgcaggcccaggcaccaccactggagaagccagtccaacaagccctcttacgaagggcgtcgtcctctgtctgaggaaaggaaacatgctgctggggagtccaaggatgcaaatgtggccacagccaatttaggggaaaaaaggggccaccacctagctcactaccgggcttcagaggaagaacctgactatggggaagaattgagaagctatccgggcttccaggctccccagggactgcagtaccggggcagaggaagtgaagaggtcagagccccaagccctcggagtgaggagagccaggaaaaggagtacaagagaaaccaccccgactctgaactggaaagcacagcaaacagacacagtgaagaaactgaggaagagaggagctacgagggggcaaagggacgacaacacagaggcagggggcgggagccaggagcttatcctgctcttgacagcagacaagaaaaaaggctcctggatgaagggcatgaccctgttcatgaaagcccagtagatacggcaaaaaggtatccacaaagcaaatggcaaggacaaggagaaaactacctcaactatgacgaggaaggggaccagggaagatggtggcagcaggaagagcagctagaaccggaagaaagcagggaggaagtgagctttccagacagacaatacgcgccctaccccaccactgaaaagaggaagaggctaggggcgctgttcaacccgtactttgaccctctccagtggaagaatagcgactttgagaaaaaaggcaacccagatgacagtttccttgatgatgacggcgaagacggaaatggggtgacaatgactgagaagaatttcttcccagagtacaactatgactggtgggagaaaaggcccttctcggaggatgtgaattggggatatgagaagagaagctttgccaaggcccctcacttggacttgaaaaggcaatacgacgatggagtggctgaactggaccagctccttcactacaggaagaaggcagccgaatttcccgacttctacgattcagaggagcagatggggcctcaccaggaggcagaagatgaaaaggacagggctgaccagagagttctgaccgaggaagagaaaaaggaactggagaacttggcggccatggatctggaactgcagaagatagcggaaaagttcagccagcggggctgacagtcggagagacgagccattcgctgaaagacagcattgattcacccaaaggcagaaagcagaatttactatttattaaatgtttgatgcagttggaaatatcactaatctttgccagaatgctaatgctatgcgactagcgtgacttgtagcatattcttcctgcaaaatagatgttccacatgtctgtgacaatgaccgtgttactgtctttgaaacacaaacaataaaagatttacctgaaac

SEQ ID NO: 66 - protein, 675 aa, Rattus norvegicus
  ref <308>: DATABASE ACCESSION NUMBER: Refseq / NP_036658
  ref <309>: DATABASE ENTRY DATE: 2003-01-14
MQRAMLLGLLGAAALAAVISAPVDNRDHNEEMVTRCIIEVLSNALSKSSAPTITPECRQVLRKSGKEVKGEEKGENENSKFEVRLLRDPSDASVGRWASSREETGAPVEDSPGQAKVDNEEWTGGGGHSREAVDDQESLHPSNQQVSKEAKIRHSEERGGKEEEEEEGKIYPKGEHRGDAGEEKKHTEESGEKHNAFSNKRSEASAKKKEESVARAEAHFVELEKTHSREQSSQESGEETRRQEKPQELPDQDQSEEESEEGEEGEEGATSEVTKRRPRHHHWRSQSNKPSYEGRRPLSEERKHAAGESKDANVATANLGEKRGHHLAHYRASEEEPDYGEELRSYPGFQAPQGLQYRGRGSEEVRAPSPRSEESQEKEYKRNHPDSELESTANRHSEETEEERSYEGAKGRQHRGRGREPGAYPALDSRQEKRLLDEGHDPVHESPVDTAKRYPQSKWQGQGENYLNYDEEGDQGRWWQQEEQLEPEESREEVSFPDRQYAPYPTTEKRKRLGALFNPYFDPLQWKNSDFEKKGNPDDSFLDDDGEDGNGVTMTEKNFFPEYNYDWWEKRPFSEDVNWGYEKRSFAKAPHLDLKRQYDDGVAELDQLLHYRKKAAEFPDFYDSEEQMGPHQEAEDEKDRADQRVLTEEEKKELENLAAMDLELQKIAEKFSQRG

SEQ ID NO: 67 - DNA, 521 bp, Rattus norvegicus
  ref <308>: DATABASE ACCESSION NUMBER: EMBL / M24324
  ref <309>: DATABASE ENTRY DATE: 2000-03-04
gtgaccctgaggtgctgggccctgggcttctaccctgctgacatcaccctgacctggcagttgaatggggaggacctgacccaggacatggagcttgtggagaccaggcctgcaggggatggaaccttccagaagtggtcatctgtggtggtgcctcttgggaaggagcagaattacacatgccgtgtggagcatgaggggctgcctgagcccctttcccagagatggggcaggtacagctcccagagctccgttgtgtctctcccagattgtgaagcatgaagacagctgcctggagtggactgagtgacagacgatgtgttcaggtctctcctgtgacatccagagccctcagttctctttagacaccagtgtctgaagttccctgtgattctatggcttcagtgtgaagaactgtggagtccagcctgccctacacaccaggaccctgtccctgcactgcctgtgttgcctaccacattcagccttgctggtccagcctgggggtggagggtggggag

SEQ ID NO: 68 - DNA, 476 bp, Rattus norvegicus
  ref <308>: DATABASE ACCESSION NUMBER: EMBL / AA893493
  ref <309>: DATABASE ENTRY DATE: 2000-03-03
atcgctggattgcagccgccaaaatgaagttcaatcccttcgtgacttctgaccgaagcaagaaccgcaaacggcatttcaatgcaccatctcacattcggaggaagatcatgtcttagccgctttccaaagaattgagacagaagtataatgttcggtctatgcccattcgaaaggacgacgaagttcaggttgttcgaggacactacaaaggccagcagattggcaaagtggtccaagtgtacaggaagaaatacgtcatctacattgagcgagtccagcgagagaaggctaacggcacaactgtccatgtgggcatccaccccagcaaggtggttatcaccaggctaaagctggacaaggaccgcaagaagatcctggagaggaaagccaagtcccggcaagtaggaaaggagaagggcaaatacaaggaagaaactatcgagaagatgcaggagtagaaatgtcatgcccag

SEQ ID NO: 69 - DNA, 615 bp, Homo sapiens
  misc_feature (1)..(615): n=a, c, g or t
  ref <308>: DATABASE ACCESSION NUMBER: EMBL / AA166957
  ref <309>: DATABASE ENTRY DATE: 2000-03-03
tttttttttttttttaggaagcatttcccatttttattcataaaattattacttaaaattgcaaaagtggntttacagaggcacaggtaacaaaacaggaaatgaaatgttccagacattccgaaaagttcgaaagaaacacaccctagcctcaaaatctccggttaaaccgtggttgcacaacaggttctatttattcctgcattttctcaataagttcttctttatatttgcctttctcttttccaacttgtcgagacttggctttgcgttcaagaatttttttccgatccttgtccagttttagcctggtgataaccaccttgcttgggtgaatgcccacgtggacagttgtgccgttggccttctcacgctgcacccgctcgatgtagatgacatatttctttctgtacacctggactacctggccaatttgctgaccttgtagtgtcctcgaactacctggacctcgtcgtcctgcggatgggcatggagcggacattgtacttctgccgcgctcctggagagcgggatgacatgatcttctgcgcacgtgtgaaggggcatgantgacgttgcggttttactgcggtccaggtaagaaggatgaacttc

SEQ ID NO: 70 - DNA, 4758 bp, Rattus norvegicus
  ref <308>: DATABASE ACCESSION NUMBER: Refseq / NM_138896
  ref <309>: DATABASE ENTRY DATE: 2003-01-13
tggcgggtggaggatcgagcgctgttctcgctctggagccgctgcacatctcggaatcatttgcagcttattcactgtgtaaggaaaaaccaaattacatccataattctattgaactggaagcatagacgctgccatatatgtcacagtatacagaaaaagaaccatcagtaatggatcaagactccagcaaggctgcgtggcctagagcagcaggaggataccagacgattacaggcaggaggtacggaaggagacatgcgtatgtcagttttaagccatgtatgaccaggcatgaacggagcttgggtcgggctggcgatgactatgaagttctggaactggatgacgttgccaaggaaaacaccgcaggttccagttcattggatcaagtccatccttctttacccagtgaaactacagttgaaaaaagtgaaacagaaattcctacttgtggtccagcactgaatcaaagcacggagagcaacccatccgttgccacagtgtgtcatagtgaggaagtcagggagaccttagacagcagtacgaatcttcagaatcacgctgagagagagtgtacgccagcagtttgtaatgcctcaagtgtccagaatggaattgtgttggttcatactgactcttatgatccagacagcaagcatgatgagaatgactctcttcaactttgtgcccaagctgtggaaggtggtagacgtcagaaggtattaggcaatgcagtctttgagctggaaaatggagaggtagagagatatgctgatctgtgtccctcagttccctctctcagtggtgaaataagggaggagtctgaagagctaggttcagcactcttagagaaaaattctgctggcgatgcggaggctgtccatcaggatgggcaggaatttcagaggtcttctgaagacggcattgttagaaagaggcgacaagatgataccgatcagggaagacagacagaaaattcaactgaagatgcagactgtgttccaggccatgttgaacaaaatactagtgagagagccaatcaccatggaagttctcctgaacaggtagtgaggcccaaagttagaaaagtgatcagttcaagccaggtggaccaagagagcggttttaataggcacgaggctaagcaaagaagtgttcagaggtggagagaggctctggaagttgaggaatgcagttcagatgaccctataatcaagtgtgacgattatgatggagaccatgactgcatgttcctaaccccatcctactcaagagttacgccaagggaagcagaacgtcaccgtgcgacagcagaaaatggagccacagcttcaggaaggcaagaggctcgggaaaatgccttttggaatgcctgtggagagtattaccagctctttgacaaagacgaagacagttcagagtgcagtgatggggaatggtctgcttctctgcctcaccgattttctggcacagaaaaagaccagtcctcaagcgatgaaagctgggaaactctgccaggaaaagatgagaatgaacctgagctacagagtgatagtagtggccctgaggaagaaaaccaagaattgtctcttcaggagggagaacagacgtccttggaggagggggagattccctggttacagtacaatgaggtcaatgagagcagcagcgatgaagggaacgagcctgccaatgagtttgcacaaccagaagctttcatgttggatgggaacaacaacctggaggacgactcgagcgtgagtgaagacctggatgtggactggagcctatttgatggttttgcggatggacttggtgttgctgaagctatttcctacgtggatcctcagttcctcacctacatggcactagaagaacgcttagcccaggctatggagactgcactggcacacttagagtctcttgctgtagacgttgaggtggctaacccacctgccagtaaggaaagcatcgacggacttccagaaacccttgtcctagaagatcacaccgctattggtcaggagcagtgctgtcccatctgctgcagtgagtacattaaggatgacatcgcaacagagctgccctgccatcacttctttcataagccttgtgtctccatttggctacagaagtccggaacgtgccctgtgtgccgccgccacttcccacctgcagtgattgacgcatctgcagctgcttcctctgaaccagaccttgatgcctcgcctgcaaacgacaatgctgaggaagccccgtaagccgtcacggggaaatgagatcgaaattctatcacagtaaatctgcaaattccttctaaatctgatgtgcaaataattatatataaatatatttaaaatgctctatatagtatatgccgtagtttagaaagagaatattaacctttctaaactgaatttaggtttgcagaagatactaaacattttcaagctgaatgttgaagcagtgcatccattttctttagttgaacatggtgtccattgtaacgtcagtagtcatctctgtggcatacgtttctgttttgtctgaagtgctgccactaagagatcagaattaagctctcctttccacatcagatgtgaaaggagagcttaattctgatctctgtggcatacgtttctgttttgtctgaagtgctgccactaagagatcagaattaagctctcctttccacatcagatgtgaaaactgtgatcacaacagtagtacagtttggtttcattgaaaataaactgaattctaaagcatgctttttcactggtccctttgcttttgctacttcgagacctcttggtttatataacactgaggttaagattaaagcttttcagaatgccaggcaaagactagagttttgacccgaacacacacacaaaataaaaaaataaaaaataaattacatcttagatgtaaacttcctgaaactgtcatgtaataaactattcagtgaacgttggatgtttaaaggctagtaaagcatgtgaattatctgatgtgcttcatgctcggcacagtctcatgagcttggcctatgaaacactgtctaagccctcatgcagtctgcttctacttgttaaacactgaaggtccagaccagtcttggcatctgattaagaaattggatgtagttagctaaggtagtttgggttctactttaggagatctgaagatttgcacatggccatgtctgttacagcatcaccccagattagaaaggcacagcttttaggtggtcacacgagtaggcaagtctgtgcagacgctggtgtgataggtagcttacaggtgagccctgacatcagcacagggacaacggctcagcaggcccagcactggagcccatccgcgtgcacatctacctgccctgctcatccagttcgggaatatttctatagcttcccaaatcagcttcatctgatttgtgtaatatatctgagtatttatagtctttcttttttctccagtcttaaaaataaatgaattttcactgttggcacatttgaggcttaaatataagaaacctaacacttgcattctgatttttgcatatattgtaaatgtggctggtatttacagcgaatcctgtgtgtccttttatgggtaaaacaaaagtgaacattgcatgcaagtaatgtggtgaatttgtaatttaggggttttctggggcttctgtgactgtggatgcttaaattcaggccttaatgttgctctagctagcatgtttccttctaatgtacatagtcagcctgtatccactaatctctgcttgtcttctcctccgtggtcttcacaccgtatccactgatggtcagttagtgtcagaggtcacccaggttagcatcagttcccatgtgtgccgtgcggattgtgagccgtgtggttgcttggttggttttcttttatgtactttgattagctgtggcacttactgagtaaacttacgttgctgcagactgctgtgtaacaagccacgttttgtgtttagtcagtattacacacgggaccttgttttattcttctagatagcagctgtcccaaagaaaatatttcttctttgcctattaagatttagctattatctgccagttgttaaggggtttgattccaaactcaaccagagttgaacgtaagaaagctgctgtactcttgctgtccatctgttacgtcctccgttgttggctcctgactacgtacccacggctgctgaaggagacttgttttaatttgttttaaaaaggaaaatgaagttttaggactttgatggtggggaagctgacaagttcagaccccagtctgtcatttgctcttagcttggatccttttgaaaagttaagaatatatgaaggtaaattagaaaaagtaaaaatattgataaaatgtcatttatcttatgtctattttatgttgttatttggcctattaattttaattttttgaacattttcttatttcttgtaatatgaatgccgatatttaaagtttgactcacttgggtttcttttgtgtttcttagttgttatctctaagcctaactaacttttaagattatttgtgatatggatttatataagctgttaaatatatatgagctgttaaaatggaatgcaaggttttccaaagaccaggtctaactgtaatgattggtttattgttctacaatcccagcccggcattttccgtgtaaatcataaacaataaacaggatatactcagtgttcatttctaaaaaaaaaa

SEQ ID NO: 71 - protein, 707 aa, Rattus norvegicus
  ref <308>: DATABASE ACCESSION NUMBER: Refseq / NP_620251
  ref <309>: DATABASE ENTRY DATE: 2003-01-13
MSQYTEKEPSVMDQDSSKAAWPRAAGGYQTITGRRYGRRHAYVSFKPCMTRHERSLGRAGDDYEVLELDDVAKENTAGSSSLDQVHPSLPSETTVEKSETEIPTCGPALNQSTESNPSVATVCHSEEVRETLDSSTNLQNHAERECTPAVCNASSVQNGIVLVHTDSYDPDSKHDENDSLQLCAQAVEGGRRQKVLGNAVFELENGEVERYADLCPSVPSLSGEIREESEELGSALLEKNSAGDAEAVHQDGQEFQRSSEDGIVRKRRQDDTDQGRQTENSTEDADCVPGHVEQNTSERANHHGSSPEQVVRPKVRKVISSSQVDQESGFNRHEAKQRSVQRWREALEVEECSSDDPIIKCDDYDGDHDCMFLTPSYSRVTPREAERHRATAENGATASGRQEARENAFWNACGEYYQLFDKDEDSSECSDGEWSASLPHRFSGTEKDQSSSDESWETLPGKDENEPELQSDSSGPEEENQELSLQEGEQTSLEEGEIPWLQYNEVNESSSDEGNEPANEFAQPEAFMLDGNNNLEDDSSVSEDLDVDWSLFDGFADGLGVAEAISYVDPQFLTYMALEERLAQAMETALAHLESLAVDVEVANPPASKESIDGLPETLVLEDHTAIGQEQCCPICCSEYIKDDIATELPCHHFFHKPCVSIWLQKSGTCPVCRRHFPPAVIDASAAASSEPDLDASPANDNAEEAP

SEQ ID NO: 72 - DNA, 4765 bp, Homo sapiens
  ref <308>: DATABASE ACCESSION NUMBER: Refseq / NM_014819
  ref <309>: DATABASE ENTRY DATE: 2002-12-23
gttctcgctccggagccgctgcacatttcggaatcttctgcggcttgtccatagtgtgaataaaaactaaatcacatctataattctactgaactggtcatacagacgctgccatatatgtcacagtacactgaaaaggagccagcagcaatggaccaagaatctggtaaggctgtctggcccaaaccagcaggagggtatcagacaattacaggcaggagatatggaagaagacatgcttatgtcagttttaaaccatgtatgaccagacatgaaagaagcttaggtcgggctggtgatgactatgaagtgttggaactagatgatgttccaaaggaaaattcctcaggttccagtcctttggatcaagttgattcttctttacccagtgaacctatatttgaaaaaagtgaaacagaaattcccacttgtggttcagcattgaatcaaaccactgagagcagtcaatcctttgttgcagtacatcacagtgaggaaggcagggataccttaggaagcagtacaaatcttcataatcactctgagggagagtatattccaggagcttgtagtgcttcaagtgtccaaaatggaattgcattggttcatacagactcttatgatccagatggcaaacatggagaagataatgaccatcttcaactttctgcagaagtcgtggaaggtagtagataccaggaatcattaggcaatacagtatttgagttggaaaacagagaggcagaggcatacactggtctttcaccaccagttccctcatttaactgtgaagtaagagatgagtttgaagagttagattctgtaccattagtgaaaagttctgctggtgatactgagtttgtccatcagaatagccaggaaattcagaggtcttctcaagatgaaatggttagtacgaaacaacaaaataatactagccaggaaagacagacagaacattcacctgaagatgcagcctgtggtccagggcatatttgtagtgaacgaaataccaatgatagggaaaagaaccatggaagttctcctgaacaggtagtgaggccaaaagttagaaaactgataagttcaagccaggtggaccaagaaacaggttttaataggcatgaggcgaaacaaagaagtgttcaaagatggagagaggctttggaagttgaggaaagtggctcagatgacctcttaataaaatgtgaagaatatgatggagagcatgactgtatgttcttggatccaccatactcaagagttattacacaaagggaaacagaaaataaccaaatgacatcagaaagtggagccacagcgggaaggcaagaagtggataacaccttttggaatggctgtggagattattaccaactctatgacaaagatgaagatagttctgaatgcagtgatggggaatggtctgcttctttgcctcatcgattttctggtacagaaaaagatcaatcctcaagtgatgaaagctgggagactctgccaggaaaagatgagaatgaacctgagctacaaagtgatagcagtggccctgaagaagaaaaccaagaattatctcttcaggaaggggaacagacatccttggaagagggagaaattccttggttacagtacaatgaagtcaatgaaagcagcagtgatgagggaaatgaacctgccaatgaatttgcacagccagctttcatgttggatggtaacaataacctggaggatgactccagtgtgagtgaagacttagatgtggattggagcctatttgatggctttgcagatggactaggagttgctgaagctatttcatatgtggatcctcagttccttacctacatggcactagaagaacgcttagcccaggctatggagactgctctggcccatttagagtctcttgcagtggatgttgaggtggccaatccaccagctagtaaggaaagcattgatggtcttccagagacccttgttcttgaagatcacactgctattggtcaggaacaatgctgtccaatctgttgcagtgagtatattaaggatgatatagcaacagagttgccctgtcaccatttctttcacaaaccttgtgtctcaatttggctacaaaagtcgggaacatgccctgtgtgccgccgtcatttcccacctgcggttattgaagcatctgcagctccttcctctgagcctgatcctgatgccccaccttcaaatgacagtattgcagaagcaccctaaaccttgacagttgaaatgagatcagtgtatcaaagtaaatctgcaaattccttctaaatttcatgtgcaaataattatatataaatatatttaaaaatgctatatatagtatatgccatagtttagaaagaatattaacctttctaaactaaatttaggtttgcagaaagtattaaacatttttaagctgaatgttgagacagtgcatccattttctttagttgaatatgtttgtattaattgtaaagccaagcttatcagttgactctctccagaataaataatcatctgtgtggcatacgttattggctttgtctgtaatactgccactaagtgattataattaagctgtcctgtttgcatcaaatgtaaagactgtgttcacaaccgtagtaaaatttggtttcattggaaatgaaacaaattctaaagtatgctttttcactagtccctttgattttgctatatcataacctcttggttcatatgctgagaaatttttcagaaagtccatttttgtttaaaattagaacttttcagaatgccaaatgaaggctaaaattttggccagaacattacaaaagttttaaatcgtagacgtaactccccctgaaataaagttaggtagtaaaatccttaatgaaaccagtggatgtgcttaacgtaaggttagtaaagcatacaaagaatctagtgtgctcagggcttggtacaatgagctgaattagatggccttatgaaactctttctaacctcttacccaacctgtttctccttggttaaaattatacttgaaggcccagaacactcatggcacatttgtttaatattgcttatagttagtttaaggtaattttgcttctacagtattttggaaggtctgaaaacttgcacagggtcatctttgtaattatataaccccaaactaagatgcacaatgtctccttcaggtgatcacacacagtggacgagtatgtgcaaacatggacataatagttcacttacaaatgtgatttgatgttaacactagagaatgatgactgtagaacatttgagcaagtaaaatagtaaagcacatagtgagtgtatgtccgtctaactggtacattgataatttagtttgggcacataaaaggaatatttatatggcttcccaaatgcagagttacatcttattcgtgtatttctctgagtatttatatcccgtctccttttttcattcttaaaaataaatgaattttcactgttggcacatatgaggcttaaatataaggaacataacacttgcattctaatttttgcatatattgtaaatgtgtctggtatttacagcaaaatactgtgtatccttttatgggtaaaacaaaagtgaacattgcatgcatgtaatgtgatgaatttgtaatttaggagttctttggggcttctgtgacttgggaaatgcttacattcaggccttaatgttgcattagctagcatgttttccctctgatgtatatagtcactgttgtataaactaatctttgcttgttttctactctgtgatctttccatatcatatttcattaatgatcagttagtgtcaaggagtcaaaacagattaaaattaatttcatgtgtatatggtggaaatttgtggctagtgtgatttttgtttgtttccttttaagtactgttgatcagttgtgacacttactggttaaacttacgttgctaaagatttctctataataagccacacattatatttagactatattaagggaccttggttttcttctagatagcagctgtcccaaagaaaatatttcttctttgtctgttaagatttagctattatctgccagttgttaagaggttttggttccaaactcaaccagcaatgttgagagctgaacttaagatagctgttgtactttttgctttccatctgttactgtccttcattcttggctccctactatctataaacagctgctgtgaagaagaaaagttgaataagagttggcttaaattttaaaaaagaaaaagaaaattgaggttttaggattttcatggtaacaagctctggtataagctaaggctggcaagttcagatactaaaatattatttgatcatatcttggatccttttgaaaaagttaagactatatgaaggtaaattagaaataagtatgaatattaataaaatagcatttatcttatttctctattttatgttgtgacttaacctaattttatttttttaacattttcttatttcttataatatgaatgctgatatttaaaggtagatctatgtggtattctttgtgtttcttaattgtttaactcttaagattatttgtgatctggatttatgtatttgttagatacatacgaattgttaaaatggaatgcaagtttttcaaaagcccaggtctaaatgtaatggttggtttattgttctataaccccagcccatcattttctgtgtaaatcataaacaataaacagaatatactcggtggtcatttctaat

SEQ ID NO: 73 - protein, 708 aa, Homo sapiens [sequence omitted]

SEQ ID NO: 74 - DNA, 740 bp, Rattus norvegicus
  ref <308>: DATABASE ACCESSION NUMBER: Refseq / NM_053819
  ref <309>: DATABASE ENTRY DATE: 2003-01-13
cggactcctagagacacgctagagcagataccacgatggcgccctttgcatctctggcctctggcatcctcttgttgctatcattgatagcttccagtaaagcctgtagctgtgccccaacccacccacagacagctttctgcaactcggacctggttataagggctaaattcatgggttccccagaaatcatcgagaccaccttataccagcgttatgagatcaagatgactaagatgctcaaaggattcgacgctgtgggaaatgccacaggtttccggttcgcctacaccccagccatggagagcctctgtggatatgtccacaagtcccagaaccgcagcgaggagtttctcatcgcgggccgtttaaggaacggaaatttgcacatcactgcctgcagcttcctggttccctggcataatctgagccctgctcagcaaaaggccttcgtaaagacctatagtgctggctgtggggtgtgcacagtgtttccctgttcagccatcccttgcaaactggagagtgacagtcattgcttgtggacagatcagatcctcatgggctctgagaagggctaccagagcgatcactttgcctgcctgccacggaatccagatttgtgcacctggcaataccttggggtctcgatgacccgaagccttcccctggcaaaagctgaagcctgaacactgtttacctttcctccatctttctttctcttaaatggtgaaataaag

SEQ ID NO: 75 - protein, 217 aa, Rattus norvegicus
  ref <308>: DATABASE ACCESSION NUMBER: Refseq / NP_446271
  ref <309>: DATABASE ENTRY DATE: 2003-01-13
MAPFASLASGILLLLSLIASSKACSCAPTHPQTAFCNSDLVIRAKFMGSPEIIETTLYQRYEIKMTKMLKGFDAVGNATGFRFAYTPAMESLCGYVHKSQNRSEEFLIAGRLRNGNLHITACSFLVPWHNLSPAQQKAFVKTYSAGCGVCTVFPCSAIPCKLESDSHCLWTDQILMGSEKGYQSDHFACLPRNPDLCTWQYLGVSMTRSLPLAKAEA

SEQ ID NO: 76 - DNA, 2837 bp, Rattus norvegicus
  ref <308>: DATABASE ACCESSION NUMBER: Refseq / NM_030987
  ref <309>: DATABASE ENTRY DATE: 2003-01-13
gaattcggcacgaggtggaaagcactgagacgtgaagatgagtgaacttgaccagctgcggcaggaggccgagcaactgaagaaccaaattagagatgcccgtaaagcatgtgcagatgcgactctttctcagatcacaaacaacattgatccagtgggaagaatccaaatgcgaaccaggagaacactgagggggcatctggcaaagatttatgccatgcactggggcacagactcaaggctccttgtcagcgcctctcaggatgggaaactcatcatctgggacagctataccacaaacaaggttcatgccatccctctgcgctcctcttgggtcatgacctgtgcatacgctccttctgggaattatgtggcctgtggtggcctggataacatctgctccatttacaatctgaaaactcgtgaaggaaatgtgcgtgtgagtcgtgagctggcaggacatacaggttatctatcctgttgccggttcctggatgacaatcagatagttaccagttctggagacaccacatgtgccctgtgggacatcgagaccggccagcagacaaccacgtttactggacacactggagatgtcatgagcctgtctcttgctcctgacaccagactgtttgtctctggtgcttgcgatgcttcggtcaagctctgggatgtccgagaagggatgtgccggcagacctttacaggacacgagtctgacatcaatgccatatgtttctttcccaatggcaatgcctttgccactggctcagacgatgctacatgcaggctgtttgaccttcgtgcagaccaggagctcatgacctactcccatgacaacattatctgtggtatcacatctgttcccttctccaagagtggccgcctcctcctcggtggctatgacgacttcaactgtaatgtctgggatgcactcaatgctgacagagcaggtgtcctagctggacatgacaaccgagtcagctgcttgggggtgactgatgatggcatggctgtggcaacaggatcctgggacagcttcctcaagatctggaactaaggccacagcaggtggatggatgccatggcgactggaagaccattccaaccttgaagcgttactgcgatagcatatcctatccaaccatactaacgtggacacccacacctcccctcagaacttcaaaagggcaagatcttttttccttcacttattgctgaaaccaagagcacaactcccattaagagaaggatctctgtgctgtaaactaaaacaaattgtgcatttttctggggccattgtctttggtttattttgttttgttttttgtttttgttttgtttgtcttgggcaaatttttaaaggaaatactacaataaaaatgttaaccagaaggtaaccctgagtatgattgtgagagagacacaccttcttactagttcatttgcatttaaatcagtgatcctgatctgtggcaatcatgaaaaacaagttgaagactttgtttatctggaattgtttctaaatataagtcatttgtagcaagactttggaagcattcacgtttcttccttaaacatattcctttatgttcagtagttaagagaaccagagcccatgggggtgtctgactgtcactgatgcatttttgtccctggcttgcttttttttttttttttttttttttgtctcatgtcacagatgactgtttcgcacaaacacagcatagtggaagaaaaaattcagaagcaaagtagccaagcacatgttatgatggccacgaatgcttggtcagaatccttccctttgctcagcagtgaacttattcccagcacccttccctcctcactgtccagtttctgttctttccttgggtttcctgtgaagttggagggaagtttgtagtcatgtgacactagccgtcctgcccctgctgtcagattttttttctccagagaggtgcctgtcctgtgcttggatagtcagtttgtgtatgaaacaatgtacaaatcaatgttttgaaaataatgatctcagactttctaagttaaattttaaacaatttgattgtttgccatattgggtgggtttactcttagaatcgcatgctgtagaaatgctctaaagtgcatataggactcagtccttagatgttctttttattttaagaaataacctcttcaagttgtaaccgtggcggctttgtccattactgttgctattctgcacacatatcggaagcagcaagcgctttacacactcgagtagtgggataagtcactgttttctttactttacaagatgatagtcctgttgggaatgactgctgctggcttcaggaagggagggaagctgctccgctgcctctttgccacttcctggaagcagcctccatggaacagcctttgcatctgaggcaaccatttttacaccgtgcagatcttcgtggttatcatctcaaagccatgttcagcagcagcgtttggacagcagtgttctgtgggccctcccatcccccgatatcctgcacccctcatagcagtagtggcttcgccattctgttttctgcagcgtcctgtacaaaactgtgctgtgactgtgcggtaggcctggacatggcaaagagaatacagcgaagccccttctcttcctaccaaacgactctgtagagctctctgcaccctgtaccctttccaccttttgtatttaattttaaagtcagtgtactgcaaggaggctggatgcaagatagatactatattaaactgtactgttatttaagatgtaataaagcagtttgacatgaggaaaaaaaaaaaaaaaaaaaaaaaaaaaa

SEQ ID NO: 77 - protein, 340 aa, Rattus norvegicus
  ref <308>: DATABASE ACCESSION NUMBER: Refseq / NP_112249
  ref <309>: DATABASE ENTRY DATE: 2003-01-13
MSELDQLRQEAEQLKNQIRDARKACADATLSQITNNIDPVGRIQMRTRRTLRGHLAKIYAMHWGTDSRLLVSASQDGKLIIWDSYTTNKVHAIPLRSSWVMTCAYAPSGNYVACGGLDNICSIYNLKTREGNVRVSRELAGHTGYLSCCRFLDDNQIVTSSGDTTCALWDIETGQQTTTFTGHTGDVMSLSLAPDTRLFVSGACDASVKLWDVREGMCRQTFTGHESDINAICFFPNGNAFATGSDDATCRLFDLRADQELMTYSHDNIICGITSVPFSKSGRLLLGGYDDFNCNVWDALNADRAGVLAGHDNRVSCLGVTDDGMAVATGSWDSFLKIWN

SEQ ID NO: 78 - DNA, 1319 bp, Homo sapiens
  ref <308>: DATABASE ACCESSION NUMBER: EMBL / AY007113
  ref <309>: DATABASE ENTRY DATE: 2000-09-06
tcggttttaacattttattgggtaaatgattttaaaggtaataacaatagtgtcaaaactactacaatatctttccacagccataccttacagacccacataaaccttctcatattttttctttttgctcatatttaatattgtaaagccatacatgtcatataaaatgcccatttccaatagtttcttcaaactattaagcaattaaatgtggaaggaaggagggcctagttatactggaaggggtttcaggtaatctgtgatgtcttacggtaatcaaaaaacaggttactaagaaagaaggaaaagaggagctactccaggtagctttttgctcattacaagtctcaccattgtatcaccaagaactcattatgctggtgacagattcaaagtaattttggggaacatataaaacactaaaataacttagaaactagatccaaatatttcaaaagtaatcaactttgatatacaaaagtagtcagaggtggttacaaaagtttgtttgctcagtgcgtctatgtaccagcgcagttactgggtagagcaaaataaaaggttcattttcttctgaaatagcaataaaaaacaaggaaaacatatatttgtatataaaggatcaatgctggtcttaagaataatgtcatcagaaacccttaaatcgagaggcacacaacgggtttccacttttaaaaaataaaaggaaagtcaccagtttatttaaatggaggaggtgctcacacccctcaaataaacttaattcattttaacatcactagcaaaaatcacttagaaactgtacaaaaataaaaaagttaacacatttaatcctgcaaggtttttgtaaggactggaaggcaggcttttgaagcagcatttgggcatggctgggggcttctttggtttgatctaacacacataagagatggaacctattccagatgacagtttcaaatttcctgcacatttgaagacaagataagaggccagtatacaaacttccggtgtgctgggcactgggactgtatgtgctggactgaaaatcttacaactgctttaagctttaagggtgaggggaagcaagccttgcacttcctccatcaatttcactgacctctcgtgttaggggagactacagagggtagtagcacattctcgtgcagtcagaaggccacttgaggggtgggggacaatttgttcttttagaatctggtacctggctgaccttgtttaagaacaagaaaacccttccagaaatggaagccttttgctacataccaaagcaaagtacgtactatttccaagaggaaaaatac

SEQ ID NO: 79 - DNA, 1430 bp, Rattus norvegicus
  ref <308>: DATABASE ACCESSION NUMBER: Refseq / NM_019289
  ref <309>: DATABASE ENTRY DATE: 2003-01-14
atggcttaccacagcttcctggtggaacccatcagctgccatgcctggaacaaggaccgtactcagatcgccatctgccccaacaaccacgaggtgcacatctacgagaagagcggtgccaagtggaacaaggtgcacgagctcaaggagcacaacgggcaggtgacaggcatcgactgggcccccgagagtaaccgcattgtgacctgcggcacagaccgcaatgcctatgtgtggacgctgaagggccgcacgtggaagcccacgctggtcatccttcggattaatcgagctgcccgctgcgtgcgctgggcccccaatgagaacaagttcgccgtgggcagtggctcccgtgtcatttccatctgttattttgagcaggagaatgactggtgggtgtgcaaacacatcaaaaagcccatccgctccactgtccttagcctggactggcaccccaacaacgtgctcctggctgcaggctcctgtgacttcaagtgcaggatcttctctgcctatatcaaggaggtggaggaacggccagcccctacaccgtggggctccaagatgccctttggggagctgatgtttgaatcgagcagcagctgtggctgggtgcatggtgtctgcttctcggccggtgggagccgagttgcttgggtcagccatgacagcactgtgtgcctggtagatgctgagaagaagatggccgtggcaaccctggcctctgagacattaccgctcctggccatcaccttcatcacagaaaatagtctcgtggcagcgggccacgactgcttcccggtgctgtttacctatgacaacgctgcggggacattgagctttggtggccggctggatgtgcccaagcagaactcccagcgtggcctgacagcccgagagcgcttccagaacctcgacaagaaggccagctctgaagggggtgcagccacaggggctggcctggattcactgcacaagaacagcgtcagtcaaatctcggtgctcagcgggggcaaggccaagtgctcgcagttctgcaccacaggcatggacggtggcatgagcatctgggatgtgaagagcttggagtcagccttgaaggacctgaagatcagatgagctgtgaggagtgctgtcctcatcccacatgctggggaggagggaaaggggttggggaggctaagggctgctttgctgaatgcttctagggtgtagtacaggtctgcaaaggggatgctctctctccaaagaggggaagaggaaggtggggaactttcctgcctatttaatgaaaatgtgccttttaaagagatgctttcattcattgcaaaccaaaaacaagacaaaaaacccaaagcacaatgctggtcataaactgcttcaaaatgtgggctaataaacataccaaatgtgaaaaaaaaaaaaaaaaa

SEQ ID NO: 80 - protein, 372 aa, Rattus norvegicus
  ref <308>: DATABASE ACCESSION NUMBER: Refseq / NP_062162
  ref <309>: DATABASE ENTRY DATE: 2003-01-14
MAYHSFLVEPISCHAWNKDRTQIAICPNNHEVHIYEKSGAKWNKVHELKEHNGQVTGIDWAPESNRIVTCGTDRNAYVWTLKGRTWKPTLVILRINRAARCVRWAPNENKFAVGSGSRVISICYFEQENDWWVCKHIKKPIRSTVLSLDWHPNNVLLAAGSCDFKCRIFSAYIKEVEERPAPTPWGSKMPFGELMFESSSSCGWVHGVCFSAGGSRVAWVSHDSTVCLVDAEKKMAVATLASETLPLLAITFITENSLVAAGHDCFPVLFTYDNAAGTLSFGGRLDVPKQNSQRGLTARERFQNLDKKASSEGGAATGAGLDSLHKNSVSQISVLSGGKAKCSQFCTTGMDGGMSIWDVKSLESALKDLKIR

SEQ ID NO: 81 - DNA, 1520 bp, Homo sapiens
  ref <308>: DATABASE ACCESSION NUMBER: Refseq / NM_005720
  ref <309>: DATABASE ENTRY DATE: 2003-01-15
ggctgctgctccggcgcggagcccagagccggttcggcgcgtcgactgcccagagtccgcggccggggcgcgggaggagccaagccgccatggcctaccacagcttcctggtggagcccatcagctgccacgcctggaacaaggaccgcacccagattgccatctgccccaacaaccatgaggtgcatatctatgaaaagagcggtgccaaatggaccaaggtgcacgagctcaaggagcacaacgggcaggtgacaggcatcgactgggcccccgagagtaaccgtattgtgacctgcggcacagaccgcaacgcctacgtgtggacgctgaagggccgcacatggaagcccacgctggtcatcctgcggatcaaccgggctgcccgctgcgtgcgctgggcccccaacgagaacaagtttgctgtgggcagcggctctcgtgtgatctccatctgttatttcgagcaggagaatgactggtgggtttgcaagcacatcaagaagcccatccgctccaccgtcctcagcctggactggcaccccaacaatgtgctgctggctgccggctcctgtgacttcaagtgtcggatcttttcagcctacatcaaggaggtggaggaacggccggcacccaccccgtggggctccaagatgccctttggggaactgatgttcgaatccagcagtagctgcggctgggtacatggcgtctgtttctcagccagcgggagccgcgtggcctgggtaagccacgacagcaccgtctgcctggctgatgccgacaagaagatggccgtcgcgactctggcctctgaaacactaccactgctggcgctgaccttcatcacagacaacagcctggtggcagcgggccacgactgcttcccggtgctgttcacctatgacgccgccgcggggatgctgagcttcggcgggcggctggacgttcctaagcagagctcgcagcgtggcttgacggcccgcgagcgcttccagaacctggacaagaaggcgagctccgagggtggcacggctgcgggcgcgggcctagactcgctgcacaagaacagcgtcagccagatctcggtgctcagcggcggcaaggccaagtgctcgcagttctgcaccactggcatggatggcggcatgagtatctgggatgtgaagagcttggagtcagccttgaaggacctcaagatcaaatgacctgtgaggaatatgttgccttcatcctagctgctggggaagcggggagaggggtcagggaggctaatggttgctttgctgaatgtttctggggtaccaatacgagttcccataggggctgctccctcaaaaagggaggggacagatggggagcttttcttacctattcaaggaatacgtgcctttttcttaaatgctttcatttattgaaaaaaaaaaaaaatgcccccaaagcactatgctggtcatgaactgcttcaaaatgtggaggtaataaaatgcaactgtgtaaaaaaaaaaaaaaaaaaaaaa

SEQ ID NO: 82 - protein, 372 aa, Homo sapiens
  ref <308>: DATABASE ACCESSION NUMBER: Refseq / NP_005711
  ref <309>: DATABASE ENTRY DATE: 2003-01-15
MAYHSFLVEPISCHAWNKDRTQIAICPNNHEVHIYEKSGAKWTKVHELKEHNGQVTGIDWAPESNRIVTCGTDRNAYVWTLKGRTWKPTLVILRINRAARCVRWAPNENKFAVGSGSRVISICYFEQENDWWVCKHIKKPIRSTVLSLDWHPNNVLLAAGSCDFKCRIFSAYIKEVEERPAPTPWGSKMPFGELMFESSSSCGWVHGVCFSASGSRVAWVSHDSTVCLADADKKMAVATLASETLPLLALTFITDNSLVAAGHDCFPVLFTYDAAAGMLSFGGRLDVPKQSSQRGLTARERFQNLDKKASSEGGTAAGAGLDSLHKNSVSQISVLSGGKAKCSQFCTTGMDGGMSIWDVKSLESALKDLKIK

SEQ ID NO: 83 - DNA, 2661 bp, Rattus norvegicus
  ref <308>: DATABASE ACCESSION NUMBER: EMBL / U50842
  ref <309>: DATABASE ENTRY DATE: 2000-03-04
atggcagccgacgacactgaggccccagtgctttcggaggacgaggtatgggagttctgtctggataagaatgaagagggtggtggatcccccggaagtgatgtcacagatacttgtgagccaccatgtggatgctgggagttaaatccgagttccctggaagaggagcacgtgcttttcactgccgaatccataatctcgagcttcaacaatgatgacacgcgagttgtgagagtgaaggttatagctggcataggtctggccaagaaagacatcttgggagccagtgatccttatgtaagagtgacattgtatgacccgatgagtggagtccttaccagcgtgcagacgaaaactatcaaaaagtctttgaatccaaaatggaacgaagaaatactgttcagagtccttccacaacagcaccggattcttttcgaagtgtttgatgaaaatcgtttgacaagagatgatttcctgggtcaagtggatgtccctctctatcctttaccgactgaaaacccaagaatggagagaccatatacatttaaggattttgttcttcatccaagaagccacaaatcaagagttaaaggttatctgagattaaaaatgacttacttacctaaaaacggctcagatgatgaaaatgcagaccaggctgaggagttagagcctggctgggttgttttggaccaaccagatgctgccacccatttgcagcatccaccagaaccttctcccctacctccagggtgggaagagaggcaggatgtccttggaaggacctactacgtaaaccatgagtctagaacaacacaatggaaaagaccaagccctgaggatgacctcacagatgatgagaatggtgacattcagctgcaggcgcacggagcatttaccaccaggcggcagatatcggaggatgtggatggccctgacaaccacgagtcccctgagaattgggagattgtacgagaagatgagaacaccatctacagtggtcaggctgttcagtcgcctccgtcaggtcacccagacgtgcaggtccgcctcgcagaggagttagataccagactcaccatgtatggaaacccggccaccagccagccagtcaccagctcaaaccattccagcagaggaggcagctcgcaaacctgtatctttgaggaacagcctacacttcctgtgcttttgcctacttcatctggattgccaccaggttgggaagaaaaacaagatgacagaggacgatcgtactatgtagaccacaactctaagacaaccacatggtccaagcccaccatgcaggatgatccaagatcgaaaattcctgctcatctgagaggaaagacaccagtcgactccaatgacctgggacctttacctccaggctgggaagaaagaacgcacacagatggaagggtcttcttcataaatcacaatataaagaagacacagtgggaagatcctcggatgcagaatgtggccataactggaccagcagagccctactccagagattacaaaagaaagtatgagtttttccgaaggaagctgaagaagcagactgacattccaaacaaatttgaaatgaaacttcgccgtgcaaacattctggaggattcttaccggagaattatgggtgtgaagagagctgacttcctcaaggcccgactctggattgagtttgatggtgaaaagggccttgactatggaggagttgcccgagaatggttcttcctcatctcaaaggagatgtttaatccctattatggcctgtttgaatattccgctacggaggacaattacactctgcagataaatccaaactcgggcttgtgtaatgaagatcacctctcatacttcaagttcattggccgtgtggctgggatggcggtttatcatggcaagctgttggatgggtttttcatccgccccttttacaagatgatgcttcagaaactgataacactgcacgacatggagtctgtggatagtgaatattacagttctctgcgatggattcttgaaaatgacccgacggagctggacctgagatttatcatagatgaagagctttttggacagacacatcaacacgagctgaaaactggtggatcggaggttgtggtcaccaacaagaacaaaaaggagtatatctaccttgtaatccagtggcgatttgtgaacagaatccagaagcaaatggctgcttttaaagagggattttttgaactgataccacaggatctgatcaagatattcgatgaaaatgaactagagcttctcatgtgtggtctgggagatgtggacgtgaatgactggagggaacatacaaaatacaaaaatggatacagcttaaaccaccaggtcatccactggttctggaaggctgttttgatgatggattcagaaaaaagaatacgcttacttcagtttgttactggcacatcccgtgtgcctatgaatggatttgctgaactctatggctcaaatggaccacagtccttcacagtggaacagtggggcacccctgataagctgcccagagcacatacctgcttcaaccgcctggacctgccaccctatgaatcctttgacgaactctgggataaacttcagatggcgattgagaacacgcagggctttgatggggttgat

SEQ ID NO: 84 - DNA, 360 bp, Rattus norvegicus
  ref <308>: DATABASE ACCESSION NUMBER: Refseq / NM_024128
  ref <309>: DATABASE ENTRY DATE: 2003-01-13
atgccagggctccggccatcagaacagtgcatttggtggtttcgttctcttttatgcccctttgctatttgcagaccttaccccatacatagagtgaccccacgctctgctgactgcagtgtggatgcactgctaagcggcgcagaggaaggaaggtgtgcaccacgacacacgcagccctgccagggcagttctgggaggttctctttgctatgtcccctgcgcagaacacgaggatggggtggggaggagctggctctgggccagggggttgccgagcctgtgctcctgtgggtggtgtctgctggtgatgtgctagataggaagaaagcccactggctcgttcctttcctgttatga

SEQ ID NO: 85 - protein, 119 aa, Rattus norvegicus
  ref <308>: DATABASE ACCESSION NUMBER: Refseq / NP_077042
  ref <309>: DATABASE ENTRY DATE: 2003-01-13
MPGLRPSEQCIWWFRSLLCPFAICRPYPIHRVTPRSADCSVDALLSGAEEGRCAPRHTQPCQGSSGRFSLLCPLRRTRGWGGEELALGQGVAEPVLLWVVSAGDVLDRKKAHWLVPFLL

SEQ ID NO: 86 - DNA, 606 bp, Homo sapiens
  ref <308>: DATABASE ACCESSION NUMBER: EMBL / AW974756
  ref <309>: DATABASE ENTRY DATE: 2000-06-08
gtttaaggggtcaaagttggtatcattaacagggcaatgacttgacccttctttcaactgatcttactggtagttgtctctagtttttaagtaaattaatgatggaccatcccccaaacagagaactatgggggtatgaaacaaggctgaaggcttttaaccatgggagaaaaaggtgctggtattattcatatagcataacctgaggttggagaggaccacttgggagcctgtaaccaaaactagaaggtaacttctgggatggacggaggttcccttgaagcagtgccaacctaaatctacctcaggtaagtagttagattaactttttcaagatttcagaccaaacaagacaacttgtattcagttgatgtattcctatgctttaatgtttttgtttgcccttaattattaaataaacatttgttctgaaaaaaaaaaaaaaaaaaaaccatttgcggccgcaagcttattccctttagtgagggttaattttagcttggcactggccgtcgttttaacaacgtttgactgggaaaaccctggcgtttccccaaattaattgcctttgcagacataccccttttgccgcttggcgtaatagca

SEQ ID NO: 87 - DNA, 961 bp, Rattus norvegicus
  ref <308>: DATABASE ACCESSION NUMBER: Refseq / NM_022499
  ref <309>: DATABASE ENTRY DATE: 2003-01-25
tttcccaacaggatctcccaccagcccagcttttctatataggctctgacctctggtcatccaagttgcaggatgtcgatgacagacttgctcagcgctgaggacatcaagaaggcgataggagcctttactgctgcagactccttcgaccacaaaaagttcttccagatggtgggcctgaagaaaaagagtgcggatgatgtgaagaaggtgttccacattctggacaaagacaaaagtggcttcattgaggaggatgagctggggtccattctgaagggcttctcctcagatgccagagacttgtctgctaaggaaacaaagacgctgatggctgctggagacaaggacggggacggcaagattggggttgaagaattctccactctggtggccgaaagctaagtggcgctgactgcttgggtctcccacctctccaccccccatgccccatctcagcccttctcgcggccctcctgggtttctgttcagtttgtttatgttattttttactcccccatcctttatggccctcgaatgacaccactcttctggaaaatgctggagaaacaataaaggctgtacccatcggacaccacctgtagggaggacccaggcctggtaggtgttggtttggcaagtttttccggacagcagtgggggtatagtagaaaaagtgagagagagcgaaggaccacgccctgatatttcctgcctgcttggtaccgagtggtcacgtgggccaccttgttcagtctttgtgcctttcctacaaggggatgggatggcgcaggggattttaaagatgcagaaactgccttttaaagagcagaacggaaggggctgagtccacaggtgattactttatgtccctgaggaataactaggtcgaaggactcaaatgacactctatcaattgcttttgactttgctgtgataaaattcctgataagagaaactt

SEQ ID NO: 88 - protein, 110 aa, Rattus norvegicus
  ref <308>: DATABASE ACCESSION NUMBER: Refseq / NP_071944
  ref <309>: DATABASE ENTRY DATE: 2003-01-25
MSMTDLLSAEDIKKAIGAFTAADSFDHKKFFQMVGLKKKSADDVKKVFHILDKDKSGFIEEDELGSILKGFSSDARDLSAKETKTLMAAGDKDGDGKIGVEEFSTLVAES

SEQ ID NO: 89 - DNA, 424 bp, Homo sapiens
  ref <308>: DATABASE ACCESSION NUMBER: Refseq / NM_002854
  ref <309>: DATABASE ENTRY DATE: 2002-08-27
accagcccagcctttcagtgcaggctccagccctccacccccacccgagttgcaggatgtcgatgacagacttgctgaacgctgaggacatcaagaaggcggtgggagcctttagcgctaccgactccttcgaccacaaaaagttcttccaaatggtcggcctgaagaaaaagagtgcggatgatgtgaagaaggtgtttcacatgctggacaaggacaaaagtggcttcatcgaggaggatgagctgggattcatcctaaaaggcttctccccagatgccagagacctgtctgctaaagaaaccaagatgctgatggctgctggagacaaagatggggacggcaaaattggggttgacgaattctccactctggtggctgaaagctaagaagcactgactgcccctggtcttccacctctctg

SEQ ID NO: 90 - protein, 110 aa, Homo sapiens
  ref <308>: DATABASE ACCESSION NUMBER: Refseq / NP_002845
  ref <309>: DATABASE ENTRY DATE: 2002-08-27
MSMTDLLNAEDIKKAVGAFSATDSFDHKKFFQMVGLKKKSADDVKKVFHMLDKDKSGFIEEDELGFILKGFSPDARDLSAKETKMLMAAGDKDGDGKIGVDEFSTLVAES

SEQ ID NO: 91 - DNA, 1291 bp, Rattus norvegicus
  ref <308>: DATABASE ACCESSION NUMBER: Refseq / NM_144756
  ref <309>: DATABASE ENTRY DATE: 2003-01-13
ccccttcctcgagagacgacaccatgacccagggaaagctctctgtggctaacaaggcccctgggactgaggggcagcagcaggcaaatggagagaagaaggatgccccagcagtgccctcggcaccaccctcctacgaggaggccacctctggagaggggctgaaggcaggggccttcccccagggtcccacagctgtaccactccatccaagctgggcctatgtggaccccagcagcagctctggctatgaaggtggtttccctgcaggacaccatgagcttttcagcaccttcagctgggatgaccagaaagttcgtcagcttttcatcagaaaggtctataccatcctgttggttcagctgctggtgaccttggctgtggtggctctctttaccttctgtgacgtcgttaaggactatgtccaggccaacccaggctggtactgggcatcctatgccgtattctttgcaacatacctgactctggcttgctgttctgggcccaggagacacttcccttggaacctgattctgctgaccatctttaccctgtccatggcctacctcactgggatgctgtccagttactacaacaccacgtctgtcctgctgtgcctgggcatcacagctcttgtctgcctctcagtcaccatcttcagtttccagaccaagtttgacttcacctcctgtcacggtgtgctatttgtactgctcatgactctcttcttcagtggactcctcctcgccatcctcctgcccttccaatatgtcccctggctccacgccgtctatgctgtgctaggagcgggtgtgttcacgttgttcctggcatttgatacccagctgctgatgggtaaccgtcgacactcgctgagtcctgaggagtatatttttggagccctcaacatctacctagacattatctatatcttcaccttcttcctgcagctttttggcaccaaccgggaatgaggagccctccccccacccccgccctcctccagagaatgcccctcccctgtcctgtgaccctctcagagctcctgcaagaccagacataaacttgctgcagccagcttgtgtgcagccgctccctcctgcagccagccctcacctcgagccctctgcagcttgtacatatgccatccttggagccccgcagatctgaggccacaccatcccctgtggtgcccccagcacccgattgcatcttccaagtggcacagtcatggctgagggcatctctgggtttgcagagaccccagaaatgagtgggaggagcccagagg

SEQ ID NO: 92 - protein, 316 aa, Rattus norvegicus
  ref <308>: DATABASE ACCESSION NUMBER: Refseq / NP_653357
  ref <309>: DATABASE ENTRY DATE: 2003-01-13
MTQGKLSVANKAPGTEGQQQANGEKKDAPAVPSAPPSYEEATSGEGLKAGAFPQGPTAVPLHPSWAYVDPSSSSGYEGGFPAGHHELFSTFSWDDQKVRQLFIRKVYTILLVQLLVTLAVVALFTFCDVVKDYVQANPGWYWASYAVFFATYLTLACCSGPRRHFPWNLILLTIFTLSMAYLTGMLSSYYNTTSVLLCLGITALVCLSVTIFSFQTKFDFTSCHGVLFVLLMTLFFSGLLLAILLPFQYVPWLHAVYAVLGAGVFTLFLAFDTQLLMGNRRHSLSPEEYIFGALNIYLDIIYIFTFFLQLFGTNRE

SEQ ID NO: 93 - DNA, 1170 bp, Homo sapiens
  ref <308>: DATABASE ACCESSION NUMBER: Refseq / NM_012306
  ref <309>: DATABASE ENTRY DATE: 2000-11-02
cccacgcggaggaaggaagagacgcaggcaggctgcggttacccaagcggccacccgggcctcagggaccccttccccgagagacggcaccatgacccggggaaagctctccgtggctaacaaggcccctgggaccgaggggcagcagcaggtgcatggcgagaagaaggaggctccagcagtgccctcagccccaccctcctatgaggaagccacctctggggaggggatgaaggcaggggccttccccccagcccccacagcggtgcctctccaccctagctgggcctatgtggaccccagcagcagctccagctatgacaacggtttcccaccggagaccatgagctcttcaccactttcagctgggatgaccaagaaagttcgtcgagtctttgtcagaaaggtctacaccatcctgctgattcaactgctggtgaccttggctgtcgtggctctctttactttctgtgacccttgtcaaggactatgttcaggccaaccaggctggtactgggcatcctatgctgtgttctttgcaacctacctgaccctggcttgctgttctggacccaggaggcatttcccctggaacctgattctcctgaccgtctttaccctgtccatggcctacctcactgggatgctgtccagctactacaacaccacctccgtgctgctgtgcctgggcatcacggcccttgtctgcctctcagtcaccgtcttcagcttccagaccaagttcgacttcacctcctgccagggcgtgctcttcgtgcttctcatgactcttttcttcagcggactcatcctggccatcctcctacccttccaatatgtgccctggctccatgcagtttatgcagcactgggagcgggtgtatttacattgttcctggcacttgacacccagttgctgatgggtaaccgacgccactcgctgagccctgaggagtatatttttggagccctcaacatttacctagacatcatctatatcttcaccttcttcctgcagctttttggcactaaccgagaatgaggagccctccctgccccaccgtcctccagagaatgcgcccctcctggttccctgtccctcccctgcgctcctgcgagaccagatataaaactagctgccaaaaaaaaaaaaaaaaaaaaaaaaaaaaa

SEQ ID NO: 94 - protein, 316 aa, Homo sapiens
  ref <308>: DATABASE ACCESSION NUMBER: Refseq / NP_036438
  ref <309>: DATABASE ENTRY DATE: 2000-11-02
MTRGKLSVANKAPGTEGQQQVHGEKKEAPAVPSAPPSYEEATSGEGMKAGAFPPAPTAVPLHPSWAYVDPSSSSSYDNGFPPETMSSSPLSAGMTKKVRRVFVRKVYTILLIQLLVTLAVVALFTFCDPCQGLCSGQPGWYWASYAVFFATYLTLACCSGPRRHFPWNLILLTVFTLSMAYLTGMLSSYYNTTSVLLCLGITALVCLSVTVFSFQTKFDFTSCQGVLFVLLMTLFFSGLILAILLPFQYVPWLHAVYAALGAGVFTLFLALDTQLLMGNRRHSLSPEEYIFGALNIYLDIIYIFTFFLQLFGTNRE

SEQ ID NO: 95 - DNA, 2815 bp, Rattus norvegicus
  ref <308>: DATABASE ACCESSION NUMBER: Refseq / NM_019253
  ref <309>: DATABASE ENTRY DATE: 2003-01-14
ggggggatgttgagggatgagggcctttctggtggcctccgttacttcaagtcttcatgactggaacgaagggaagactggagttctgaactacagtctcaggaattaatttcctcgtatcctgcctaccctaacccataaataaaaagacaggtatcctgggtctctctgaagacctcctgtctaaggaggcctttctggaagacttcctttctatgtgtacctgtggggtcttttgtggggagggatgtctcagtcgcctgtgattagcttttctcctgaagactgctgaggcctcctctgggtacaccacctctccctccactgcccagtctgagaggctcaggagcttcctgggggctgaaggtgagctctgcagggcaatataggggcaaaggggtgcagctgtccactcagtctgcgcccccgactgccccagcttgcctgtggggtgctctggctcagtggccatggccactcctggctgcagaccaccacagacctcatcttctcctcgctcaccgtgttgaaccacctgggacctgcagcctggctaggttctgggacctgggggacaccaagtctgctgttagtctctctgactgtgagcctgggcatcatcaccaccctggtgtggcaccttctcaagacacccccagagccacctgtcccactgcccccagaggacagacgacaatcagtgagccggcagccctccttcacttactcagagtggatggaggagaaggtagaggatgactttctggacctggacgcagtgccggagacacccgtgtttgactgtgtgatggacatcaagcctgaggctgatcccacctcgttgactgtcaagtccatgggtctgcaggagaggaggggctccaatgtctccttgaccctggacatgtgtactcctggctgcaatgaggagggctttggctacctggtgtccccacgagaggagtcagcccatgaatacctgctcagtgcctcccgtgtcctccgggcagaggagctgcacgaaaaggccctggaccctttcttgctgcaggcggaattctttgaaatccccatgaactttgtggatccaaaagaatatgacatcccagggctggtacggaagaatcggtacaaaaccatccttcccaatcctcacagcagggtacgtctgacgtcaccagaccctgaagatcctctgagttcctacatcaatgccaactatatccggggctacaatggggaggagaaggtgtacatcgccacccagggacccatcgtcagcactgtggtcgacttctggcgcatggtgtggcaggagcgcacacccatcatcgtcatgatcaccaacatcgaggagatgaacgagaagtgcacggaatattggccagaagagcaggtcgtccacgatggcgtagagatcactgtgcagaaagtcatccacacagaggactaccggctgcgacttatctccctcaggagagggactgaagagagaggcttgaagcattactggttcacatcctggcctgaccagaagacccccgaccgggcacccccactcctgcacctggtacgggaggtggaggaggcagcccagcaagagggaccccactgttccccgatcattgttcactgcagtgcagggattgggagaaccgggtgcttcatcgccaccagcatctgctgccagcagctgcgacgtgagggcgtggtagacatcctaaagaccacgtgccagctccgtcaggacaggggcggcatgatccaaacatgcgaacagtatcagtttgtgcaccacgccatgagcctctatgagaagcagctatccctccagtcctcagagtgaccacactcttcctctgagatccactgggcactgccgagtctgaggctggggcttcaccccaactacccaaggtcttaccttgggtcctgggcctgttccctggctctccccttcagtctgcccccatctgttgtcctggcctggtccctaccccaagcctagctcttctactgtacatactgcagagttcgggagggcaggggaggaatgtgccaggccaggcctggggccctgggcctgacccacactatatagacctggggcctcagttttaaccatgattccacagctacttgatccaaaatgttttcatgccacaccccaagtgtcctaccacaacatgttctgtctgtccatccatcacagctatctgtaccaaacactgtgtcccctcagccaggaaaggagtactgatctgagctctcacccctcagccctcacccacatcgccattcccagacacccaccctgatccccaggcagagatgtctaccaatctctggcctcacaggatgtggatggtggagaccaggcagaggagaatgtggtggttgaccgagatcccagctgagaaggttcccaggcaagggtgggcatctctggcctatgagacactggagagaaagaggacagatatagtgggaaaccctaaggatctgagccctgagggggccctccaagagtagggtggggacagctccagacctgcaaggcatctttctgtgtcactatgggaaaccccaaatgtctcctcgctacatgttgctccgtgtgttcccttgtccatgtttgtgttgagagcccatgagcagggcatgcatgactctttggcaacatgtgttatcttggagccacgtgtttttatcgctgactttaaatatttattccacggcatacagagacatttggtgtctttttataatctgctcgtggtcattgaatagagcaataaacagagcattttgagca

SEQ ID NO: 96 - protein, 369 aa, Rattus norvegicus
  ref <308>: DATABASE ACCESSION NUMBER: Refseq / NP_062126
  ref <309>: DATABASE ENTRY DATE: 2003-01-14
MEEKVEDDFLDLDAVPETPVFDCVMDIKPEADPTSLTVKSMGLQERRGSNVSLTLDMCTPGCNEEGFGYLVSPREESAHEYLLSASRVLRAEELHEKALDPFLLQAEFFEIPMNFVDPKEYDIPGLVRKNRYKTILPNPHSRVRLTSPDPEDPLSSYINANYIRGYNGEEKVYIATQGPIVSTVVDFWRMVWQERTPIIVMITNIEEMNEKCTEYWPEEQVVHDGVEITVQKVIHTEDYRLRLISLRRGTEERGLKHYWFTSWPDQKTPDRAPPLLHLVREVEEAAQQEGPHCSPIIVHCSAGIGRTGCFIATSICCQQLRREGVVDILKTTCQLRQDRGGMIQTCEQYQFVHHAMSLYEKQLSLQSSE

SEQ ID NO: 97 - DNA, 2965 bp, Homo sapiens
  ref <308>: DATABASE ACCESSION NUMBER: Refseq / NM_032781
  ref <309>: DATABASE ENTRY DATE: 2002-11-05
gcgcacggagcgcgggacggagcgccaggcggacggaccgaaggacggaggcaccgaaggacggacgcccccgcacacgcagacgcacagagctcggcgcggcccccgtcgcatacacactggcacagacacaagcagggacacacgcagacacacgcacactcgcgcgcgcatcctcccgccagcctgcccgcctgctcgccggcgcccggagcccgctctggccgcttgctttttgctgagaaagcttcctgccctggaagatggcacccttccccatccagacaccttgggaatgaattatgagggagccaggagtgagagagagaaccacgctgctgatgactccgagggaggggccctggacatgtgctgcagtgagaggctaccgggtctcccccagccgatagtgatggaggcactggacgaggctgaagggctccaggactcacagagagagatgccgccaccccctcctccctcgccgccctcagatccagctcagaagccaccacctcgaggcgctgggagccactccctcactgtcaggagcagcctgtgcctgttcgctgcctcacagttcctgcttgcctgtggggtgctccggttcagcggttatggccacatctggtcacagaacgccacaaacctcgtctcctctttgctgacgctcctgaaacagctggaacccacggcctggcttgactctgggacgtggggagtccccagtctgctgctggtctttctgtccgtgggcctggtcctcgttaccaccctggtgtggcacctcctgaggacacccgcagagccacccaccccactgccccctgaggacaggcgccagtcagtgagccgccagccctccttcacctactcagagtggatggaggagaagatcgaggatgacttcctggacctcgacccggtgcccgagactcctgtgtttgattgtgtgatggacatcaagcctgaggctgaccccacctcactcaccgtcaagtccatgggtctgcaggagaggaggggttccaatgtctccctgaccctggacatgtgcactccgggctgcaacgaggagggctttggctatctcatgtccccacgtgaggagtccgcccgcgagtacctgctcagcgcctcccgtgtcctccaagcagaagagcttcatgaaaaggccctggaccctttcctgctgcaggcggaattctttgaaatccccatgaactttgtggatccgaaagagtacgacatccctgggctggtgcggaagaaccggtacaaaaccatacttcccaaccctcacagcagagtgtgtctgacctcaccagaccctgacgaccctctgagttcctacatcaatgccaactacatccggggctatggtggggaggagaaggtgtacatcgccactcagggacccatcgtcagcacggtcgccgacttctggcgcatggtgtggcaggagcacacgcccatcattgtcatgatcaccaacatcgaggagatgaacgagaaatgcaccgagtattggccggaggagcaggtggcgtacgacggtgttgagatcactgtgcagaaagtcattcacacggaggattaccggctgcgactcatctccctcaagagtgggactgaggagcgaggcctgaagcattactggttcacatcctggcccgaccagaagaccccagaccgggcccccccactcctgcacctggtgcgggaggtggaggaggcagcccagcaggaggggccccactgtgcccccatcatcgtccactgcagtgcagggattgggaggaccggctgcttcattgccaccagcatctgctgccagcagctgcggcaggagggtgtagtggacatcctgaagaccacgtgccagctccgtcaggacaggggcggcatgatccagacatgcgagcagtaccagtttgtgcaccacgtcatgagcctctacgaaaagcagctgtcccaccagtccccagaatgactgcgcttctcctacaaggttctctgggcactgcccagcctgagtctcggccctcacccagggccctgcctcgggtcctgggcctgctccccgcttcctccccttcagtcagctccctctgtcctctgtcagcctggcctgacccctaccctccagcattgctcttcctactgtacatattggggagtggggggcagggtcgggaagggacatgccaggccaggcctggggccccggggcctgacccacaccacgcagaccccgggctccagtttttaacgatggttccatcaatacctgatccagaatgtttccgtgctacactttgtgtcctgctgcaatgtgttctgtctgtccatccatctctgccctctgtaccggacactgtgtctcctcagccaggaaggggtaatgagctccagcccctaagcaaccggacttgcctgcctcggcctcacccgcacttctcccaaaaggcagatgacggggagttaggcatggggagctccagaaggtcaccagagagctttcagctgagggagagttctctaggttggagtgggcatcacagccagggtggcctctgggtgtcagatgctctcaggagggtgcccagcctgtgaggcactggcaaggtagggggcagatggggcatggagaacccagaggatctaggccctgttggggaggggaggggagctcaaggtttgggtggggactcagcccagatctacgtgagacatttttctgtgtcactgtgggaaagccttcccagaagtctcactgcgtgtgttgagagcccatcaggagggcatgcatgactctttggcaacatgtattatcttggagccacgtgtttttattgctgactttaaatatttatcccacggcagacagagacatttggtgtctttttataattcgctcgtggtcattgaatagagcaataaacggagcattttgagcaaaact

SEQ ID NO: 98 - protein, 565 aa, Homo sapiens
  ref <308>: DATABASE ACCESSION NUMBER: Refseq / NP_116170
  ref <309>: DATABASE ENTRY DATE: 2002-11-05
MNYEGARSERENHAADDSEGGALDMCCSERLPGLPQPIVMEALDEAEGLQDSQREMPPPPPPSPPSDPAQKPPPRGAGSHSLTVRSSLCLFAASQFLLACGVLRFSGYGHIWSQNATNLVSSLLTLLKQLEPTAWLDSGTWGVPSLLLVFLSVGLVLVTTLVWHLLRTPAEPPTPLPPEDRRQSVSRQPSFTYSEWMEEKIEDDFLDLDPVPETPVFDCVMDIKPEADPTSLTVKSMGLQERRGSNVSLTLDMCTPGCNEEGFGYLMSPREESAREYLLSASRVLQAEELHEKALDPFLLQAEFFEIPMNFVDPKEYDIPGLVRKNRYKTILPNPHSRVCLTSPDPDDPLSSYINANYIRGYGGEEKVYIATQGPIVSTVADFWRMVWQEHTPIIVMITNIEEMNEKCTEYWPEEQVAYDGVEITVQKVIHTEDYRLRLISLKSGTEERGLKHYWFTSWPDQKTPDRAPPLLHLVREVEEAAQQEGPHCAPIIVHCSAGIGRTGCFIATSICCQQLRQEGVVDILKTTCQLRQDRGGMIQTCEQYQFVHHVMSLYEKQLSHQSPE

SEQ ID NO: 99 - DNA, 453 bp, Rattus norvegicus
  misc_feature (1)..(453): n=a, c, g or t
  ref <308>: DATABASE ACCESSION NUMBER: EMBL / AF022952
  ref <309>: DATABASE ENTRY DATE: 1998-01-14
caagaggaaagtggtgtcatggatagatgtttatgcacgtgccacatgccagccaagggaggtggtggtacctctgagcatggaattcatgggtaatgtggtcaaacaattcgtgccaagctgtgtgactgtgcagcgctgtggtggctgctgtcctgacgatggcctggagtgtgtgcccattgggcaacaccaagtccgaatgcagatcctcatgatccagtacccgagcagtcagctgggggagatgtccctggaagaacacagccaatgtgaatgcagaccaaaaagaaaggagagtgctgtgaagccagacagccccaggaccctctgcccacgctgcaccnagcgccgtnagcgccctgatccccggacctgccgttgccgctgcagacgccgccgcttcctccattgccaagggcggggcttagagctcaacccagacacctgcag

SEQ ID NO: 100 - DNA, 2260 bp, Rattus norvegicus
  ref <308>: DATABASE ACCESSION NUMBER: Refseq / NM_012941
  ref <309>: DATABASE ENTRY DATE: 2002-11-14
cggaggccggggccgcctcccgacgcccacctactagcttctccagctccatctttcccgagaagcggcagggacctcggcctccagcttaccgggcggatcgaagcagcggtcgggatggtactgctgggcttgctgcagtcaggcggctcggtgctcgggcaggcgatggagcaggtgacaggaggcaacctgctttccacgctgctcatcgcctgcgccttcacgcttagccttgtctacctgttccgcctcgcagtgggccacatggtccagctgcccgctggagcgaaaagtccgccatatatttactctccaattccgttccttggccacgcgatagcatttgggaaaagtccaattgagttcctggaaaatgcatatgagaagtacggacctgtgtttagctttaccatggtgggcaagactttcacttaccttttggggagtgacgcagccgccctgctcttcaacagtaagaacgaagacctgaatgcggaagaggtctacggtcggctgacaacgcccgtgtttgggaagggagttgcatacgacgtgccaaatgcagttttcctggaacagaagaaaatactaaaaagcggccttaacatagcccacttcaagcagtatgtttctatcattgaaaaagaagcgaaggagtactttaaaagttggggagaaagcggagaaagaaatgtgtttgaagcgctgtctgagctcataattttaacagctagccattgcttacatggaaaggaaattagaagtcagctcaacgagaaggtggctcagctgtacgcagacctggatggaggctttagccatgccgcctggctgttgccaggctggctgcccctgccgagtttcaggcgcagggacagagcccatcgagagatcaagaatattttctacaaggccatccagaaacgtaggctgtcaaaagaaccagccgaggacattcttcaaactttactggattctacatacaaggatgggcgtcctctgacggacgacgagatcgcagggatgctcatcggactgctgctggccggacagcacacatcctccaccaccagtgcctggatgggcttctttctggccagagataaaccacttcaagacaaatgctacttagaacagaaaacggtgtgcggggaggatctgcctcccttaacttatgagcagttgaaggatctgaatttacttgatagatgcataaaagaaacactaagactgaggcctcctataatgaccatgatgagaatggccaagacccctcagactgtggctgggtacaccattcctccaggacatcaggtgtgtgtttctccaactgtcaatcaaagactgaaagactcctgggtagaacgcttggacttcaatcctgaccgctacctacaggacaacccagcgtcgggagagaagtttgcctatgtgccgtttggagccgggcgccatcgttgtattggagaaaattttgcctatgttcaaattaagacaatttggtccactatgcttcgtttatatgaatttgacctcatcaatggatattttcccagtgtgaattatacaacaatgattcataccccagaaaacccagtaatccgttacaaacgaagatcaaaatgaagaaaggaacaaggagccagtgtggagacgggactgcaagctgcagcttggcagagaatgaagctttgacacagctttcatactgtactgttttttaagtgtgtggttctgaaagccagtttgattttaatgttttattaactcggtgatttttgtcagacctaatggcatttgaaacagttataatagttctgataggatttcagggaagccaagtttatgttagaaatcgtttaggggagcctcggtattcagagatgatacagaatatagcatccaggtaactaacttcagaagcacacgttgccgtagggagattccggcttggaactagtttgggaagttttaagcctggtcagatgctacagaggcaatgggtcattggtgtggttgggccacttctgtgcgtaaagatgtgagagggtgaaggataagttttctgcgaagctctagatggtgtgagtgccctttgtagtgttaactgagagcaccactccagcgagatggcagcaatcttggaccttatcttgataaccttatttcctaaaaataataaatactaaagagtacttatgttattggttccagaaaaatccaaaatcaaatccttgtggaatttttaattttaatt

SEQ ID NO: 101 - protein, 503 aa, Rattus norvegicus [sequence omitted]

SEQ ID NO: 102 - DNA, 511 bp, Rattus norvegicus
  ref <308>: DATABASE ACCESSION NUMBER: EMBL / AA925252
  ref <309>: DATABASE ENTRY DATE: 2000-03-03
gactatcgttacaaacaatttcagtggaggacaccagctgggtaaagtgctctcctaagcttgcattttattaccctacactttgaatatgagtgataatagaacatacttttgacagaaggcttgtacacttgggaacacaaatacacttagcatataatgtagccagtaataactagcaccacagctacatggaaatcctttacatacaccaacttggctttcacttttgaaatgaaactcagaatccatggctcagtaggataactagaatggtgttgctttgcttttaaacaggtctacataagttaatagcactgacaaaaatcaaaggatagcttcagacctcttacaagtttaggagacagtgctagtgaccacaaatagactcactacctgatatccaagtacaggttcactggaaattgctgcacgttagttaggtttttaaaatctttctacacataataaaaaatatatattatgaacaatacaagtacatctcatatac

SEQ ID NO: 103 - DNA, 1591 bp, Rattus norvegicus
  ref <308>: DATABASE ACCESSION NUMBER: Refseq / NM_031315
  ref <309>: DATABASE ENTRY DATE: 2003-01-13
cggctcgaaatggaggcgactctgagcctggggcccgccggccgcagctgctgggatgagccgctgagcatcaccgtgcgcggcctggtccccgagcagcccgtcacgctgcgcgcggccctgcgcgacgagaagggcgcgctcttccgagcccgcgcgctctaccgcgccgatgcccacggagagctggacctggcgcgcgcgcccgctctggggggcagcttcacggggctcgagcccatggggctgctctgggccatggagcccgaacggcctttctggcgcttggtcaagcgcgacgtgcagacgcccttcgtggtggagctggaggtgctggacggacacaaacccgacggcgggcggctgctggcgcgggcggtgcacgagcgtcacttcatggctcccggggtgcggcgggtgcccgtgcgcgagggcagggtgcgcgccacgctcttcctgcccccagaacctgggccctttcctggaatcataaacctttttggagttggaggcggccttctggagtaccgggcgagtctgctggctgggaagggttttgccgtcatggctctggcttattacaactacgacgacctccccaagaccatggaaaccatgcgcattgagtactttgaagaagccgtgaactacctgcgtggccaccctgaggtaaaaggaccaggaattgggctgcttgggatttccaaagggggtgaacttggccttgctatggcctccttcctgaagggcatcacggctgctgttgtcatcaatggctccgtggctgctgttgggaacaccatatgctacaaggatgagactataccccctgtgactatcctgagaaaccaggtcaaaatgaccaaggatggcctcaaggatgttgtagatgctttgcaaagccctctggtagaacagaagagcttcatccctgtggaaaggtctgacacgaccttcctgttcctcgttggtcaggatgaccacaactggaagagcgagttctatgccaatgagatctccaaacgcttgcaggcccacgggaaagagaagccccagatcatttgctacccagaagcagggcactatatcgagcctccttacttcccactgtgcagcgctggcatgcacctcctggtgggtgctaacatcacctttggaggggagcctaagcctcactctgtggcccagttggatgcatggcagcaactccagactttcttccacaaacagttgggtggtaagagtcatggggtgtcccctaaaatataacctgttatgtgatggttttggcaggaaaagtacaaatactttgtaggaatatcagttcagattacttcatctgaacatataaccgcttttggtttacatttttaaaaattaattttagtatcaaaatagtgctgattcaaaggctggaaatatagttcagttgtagagtccttgactgactcatgcaagttcctgggttcaatctccgtgctgtaagggaaaagagcacattttatggaaactgtagctattcaagaaatagtgcctagaatttaaaggaaccatgagtaaacactcttatgtaacttaaaaaaaaaaaaaa

SEQ ID NO: 104 - protein, 419 aa, Rattus norvegicus
  ref <308>: DATABASE ACCESSION NUMBER: Refseq / NP_112605
  ref <309>: DATABASE ENTRY DATE: 2003-01-13
MEATLSLGPAGRSCWDEPLSITVRGLVPEQPVTLRAALRDEKGALFRARALYRADAHGELDLARAPALGGSFTGLEPMGLLWAMEPERPFWRLVKRDVQTPFVVELEVLDGHKPDGGRLLARAVHERHFMAPGVRRVPVREGRVRATLFLPPEPGPFPGIINLFGVGGGLLEYRASLLAGKGFAVMALAYYNYDDLPKTMETMRIEYFEEAVNYLRGHPEVKGPGIGLLGISKGGELGLAMASFLKGITAAVVINGSVAAVGNTICYKDETIPPVTILRNQVKMTKDGLKDVVDALQSPLVEQKSFIPVERSDTTFLFLVGQDDHNWKSEFYANEISKRLQAHGKEKPQIICYPEAGHYIEPPYFPLCSAGMHLLVGANITFGGEPKPHSVAQLDAWQQLQTFFHKQLGGKSHGVSPKI

SEQ ID NO: 105 - DNA, 686 bp, Rattus norvegicus
  ref <308>: DATABASE ACCESSION NUMBER: EMBL / X07551
  ref <309>: DATABASE ENTRY DATE: 2002-01-08
ccgaccacgtaggctcctatggtataactgtgtatcagtatcatgaatccaaaggccagtacacacatgaatttgatggtgacgagagattctatgtggacttggataagaaggagaccatctggaggatccccgagtttggacaactgataagctttgacccccaaggtgcacttcgaaatatagctataataaaacacaatttggaaatcttgatgaagaggtcaaattcaaccccagctgtcaacgaggttcctgaggcgaccgtgttttccaagtcccctgtgctgctgggtcagcccaacaccctcatctgctttgtagacaacatctttcctcctgtgatcaatatcacatggttgagaaacagcaagccactcacagaaggcgtttatgagaccagcttccttatcaacagtgactattccttccacaagatggcttacctcaccttcatcccttccaacgacgacatttatgactgcaaggtggagcactggagcctggacgagccggttctaagacactgggaacctgagattccagcccccatgtcagagctgacagagactgtggtctgtgccctggggttgtctgtgggtctcgtgggcatcgtggtgggcaccatcttcatcattcaaggcctgcgatcagtggctccctccagacacccagggcccttgtga

SEQ ID NO: 106 - DNA, 2619 bp, Rattus norvegicus
  ref <308>: DATABASE ACCESSION NUMBER: Refseq / NM_053625
  ref <309>: DATABASE ENTRY DATE: 2003-01-14
ctgaccttcctcccggaagtgctcctgtggctggagttgccggcgtgactttgagcgcttcccgctctgctgccggcgctgagcacaacagagcacagcgacgaggaaccctggaagtggctgttccagacttgtcatgcggctgctgcggatcactgcaggcctggggcgtgggccgctccctcgggtccctgccatcctgggttggcaggggaagcaggctaattggaagacctaccgatggtgttcgtcaggatcaattcccaatgagaaaatccggaacattggaatctcggctcacattgattctgggaagacgacgttaacagaacgggtgctgtactacaccggcaggattgccacgatgcacgaggtgaaaggtaaagatggagtcggtgctgtcatggactccatggagctagagagacagcgagggatcactattcagtcagcagctacctacaccatgtggagagatgtcaatatcaacatcatagacactccaggccacgtggacttcacaatagaagtggaaagggccctgcgagtcctggatggtgcggtccttgtcctctgtgcagtcggtggagtgcagtgccagaccatgactgtcagtcgccagatgaagcgctacaacgttccctttttaaccttcattaacaaactggaccgaatgggctccaacccagccagggcccttcagcaaatgagatccaaactaaatcacaatgctgcatttgtgcaaatacccattggtttagagggggattttaagggaattatagacctcattgaagaacgagccatttactttgatggagactttggtcagattgttcgatatgatgagattccggctgatctgagggccgcagcagctgaccaccggccagagctaattgaatgtgtggctaattcagatgagcagcttggtgagctgtttctggaagaaaaaatcccctcagtgtctgatttaaagttagcgatccggagagctactctgagtagatcctttactcctgtgttcttgggaagtgctctgaagaacaagagagttcagcctctcctggatgctgttttagaattcctccccaatccatctgaagtccagaattacgctctactcaatcagaatgatttaaaagagaagaaaaaaatcctaatgaaccccaaaagagacgactcgcacccgtttgtaggcctggcttttaaattggaggcaggccgtttcggacagttaacttacgtccgcaattatcaaggcgaactgaagaagggaagcaccatctacaacacgaggacaggaaagaaagtgcgcgtgcagcggctggtgcgcatgcatgccgacatgatggaggatgttgaagaagtatatgccggagacatctgtgcgttgtttggcattgactgtgcaagtggagacacattcacaaacaaagacaacagtgacctttctatggaatcgattcatgttcctgatcctgtcatttcagtagcaatgaagccttctaacaagaatgatctggaaaaattttccaaaggtattgccaggtttacacgggaagacccaacatttaaagtccactttgacacagagagacaaggagacgattgtgtctggaatgggagaattgcacctgagatctatgctcagagaatggagagagaatatggctgtccttgtatcacaggaaagacccaaagtggacgtttagagaaaccgttactgcccctgtgccatttgattttacacataaaaagcagtcgggtggtgccggccagtatgggaaaagtgataggggtgctggagcccttggccccggaggacctaccgaagttggagttttccgatgagacctttggggccaatgttccaaagcagtttgttcccgccgttgagaaggggtttttggatgcctgcgaaaaagggcctctttctggtcacaagctttctgggctccggtttgttctgcaagatggagcacaccacatggtggattctaacgagatctctttcatccgagctggagaaggtgctcttaaacaagccttggccagtgccacattgtgtattattgaacctatcatgtccgtggaagtcatcgccccaaatgagtttcagggagcagtgtttgcaggaattaaccggcgccatggagtgattacagggcaagacggaattgaggactatttcacgctctacgctgatgttcccctaaataatatgtttggttattccactgagcttaggtcttgcacagagggaaaaggagagtacacaatggagtacaacagataccaaccatgttccccatccacacaagaagagctcgtcaataagtatttggaagctataggtcaacttcccgtaaaaaaaggaaaagccaagaactgactctcagtggtactttgaacgtactgacagtttgactacaagacgtaaggatgatggatgccggtagaatgaatttagacggctgaaacagatttaggagcccctgccatctcgtgttcaggagcttctatatacgtgcaagataactagataactatgtgtatttaaactgtatttttattatttagtaaaagatcttaaataaaattatattattggaattc

SEQ ID NO: 107 - protein, 752 aa, Rattus norvegicus
  ref <308>: DATABASE ACCESSION NUMBER: Refseq / NP_446077
  ref <309>: DATABASE ENTRY DATE: 2003-01-14
MRLLRITAGLGRGPLPRVPAILGWQGKQANWKTYRWCSSGSIPNEKIRNIGISAHIDSGKTTLTERVLYYTGRIATMHEVKGKDGVGAVMDSMELERQRGITIQSAATYTMWRDVNINIIDTPGHVDFTIEVERALRVLDGAVLVLCAVGGVQCQTMTVSRQMKRYNVPFLTFINKLDRMGSNPARALQQMRSKLNHNAAFVQIPIGLEGDFKGIIDLIEERAIYFDGDFGQIVRYDEIPADLRAAAADHRPELIECVANSDEQLGELFLEEKIPSVSDLKLAIRRATLSRSFTPVFLGSALKNKRVQPLLDAVLEFLPNPSEVQNYALLNQNDLKEKKKILMNPKRDDSHPFVGLAFKLEAGRFGQLTYVRNYQGELKKGSTIYNTRTGKKVRVQRLVRMHADMMEDVEEVYAGDICALFGIDCASGDTFTNKDNSDLSMESIHVPDPVISVAMKPSNKNDLEKFSKGIARFTREDPTFKVHFDTERQGDDCVWNGRIAPEIYAQRMEREYGCPCITGKTQSGRLEKPLLPLCHLILHIKSSRVVPASMGKVIGVLEPLAPEDLPKLEFSDETFGANVPKQFVPAVEKGFLDACEKGPLSGHKLSGLRFVLQDGAHHMVDSNEISFIRAGEGALKQALASATLCIIEPIMSVEVIAPNEFQGAVFAGINRRHGVITGQDGIEDYFTLYADVPLNNMFGYSTELRSCTEGKGEYTMEYNRYQPCSPSTQEELVNKYLEAIGQLPVKKGKAKN

SEQ ID NO: 108 - DNA, 2668 bp, Homo sapiens
gtcagattgttcgatatggtgagattccagctgaattaagggcggcggccactgaccaccggcaggagctaattgaatgtgttgccaattcagatgaacagcttggtgagatgtttctggaagaaaaaatcccctcgatttctgatttaaagctagcaattcgaagagctactctgaaaagatcatttactcctgtatttttgggaagcgccttgaagaacaaaggagttcagcctcttttagatgctgttttagaatacctcccaaatccatctgaagtccagaactatgctattctcaataaagaggatgactcaaaagagaaaaccaaaatcctaatgaactccagtagagacaattcccacccatttgtaggcctggcttttaaactggaggtaggtcgatttggacaattaacttatgttcgcagttatcagggagagctaaagaagggtgacaccatctataacacaaggacaagaaagaaagtacggttgcaacggctggctcgcatgcatgccgacatgatggaggatgttgaggaagtatatgccggagacatctgtgcattgtttggcattgactgtgctagtggagacacattcacagacaaagccaacagcggcctttctatggagtcaattcatgttcctgatcctgtcatttcaatagcaatgaagccttctaacaagaacgatctggaaaaattttcaaaaggtattggcaggtttacaagagaagatcccacatttaaagtatactttgacactgagaacaaagagacagttatatctggaatgggagaattacacctggaaatctatgctcagaggctggaaagagagtatggctgtccttgtatcacaggaaagccaaaagttgcctttcgagagaccattactgcccctgtcccgtttgactttacacataaaaaacaatcaggtggtgcaggccagtatggaaaagtaataggtgtcctggagcctctggacccagaggactacactaaattggaattttcagatgaaacattcggatcaaatattccaaagcagtttgtgcctgctgtagaaaaggggtttttagatgcctgcgagaagggccctctttctggtcacaagctctctgggctccggtttgtcctgcaagatggagcacaccacatggttgattctaatgaaatctctttcatccgagcaggagaaggtgctcttaaacaagccttggcaaatgcaacattatgtattcttgaacctattatggctgtggaagttgtagctccaaatgaatttcagggacaagtaattgcaggaattaaccgacgccatggggtaatcactgggcaagatggagttgaggactattttacactgtatgcagatgtccctctaaatgatatgtttggttattccactgaacttaggtcatgcacagagggaaagggagaatacacaatggagtatagcaggtatcagccatgtttaccatccacacaagaagacgtcattaataagtatttggaagctacaggtcaacttcctgttaaaaaaggaaaagccaagaactaactttgcttactgtgagttgactgactctaattgaatctgcgtggttttgatactttgatggattccagtggaataaattcaggctgctgaaacaagaaattctgagcccaggaagcgggctcttctttcttcaaaagaagcccttcttgttcatattcaggagcttctgttatattcaaaggtaattctatgtctatctcaactctattgattggttttatagttcattgaaaatcctcaaataaaatataattattactgaaatatgtttaatatttaaggggaaaagagactaatttcagttatacttttaagcttagaatgtatgttcatttccaaattttgtatcataagagttttcaacatagagaaaagctgaaaaaatgcaaagaataaccacatactttccatctaccttcctttgttaacgggttgtttatcatataataatttgttttgtcatatttgctttcactgtctattatctgtttaagtctcataactctatttttagtttgctgaagacttgaaagtgaatcgcatatatcatgacacttcttggagtgtcattaatgggcaggcttttctgttgaagagtggattccgtatgttcttcatagagagtgtttttcagattcttcattgggatattaaaatattagccaaatttctctctgttttatatatgtctgtttatttcagtttgtggtttctgcaaatttgtaactgcctctgttttaggagtataagtattacttccttgtggtctattgtgaagtaaaaagtagacccttgcatatactattcttgtttgtgttcatcttaatgtttttgtacagctaaatcaaatgtaatttatagagttagtttcatcaacctaatgaatgctagttaaatttgaattccttggaatttatcgtatattgtattcactgagattatgaagggacaaatgttaatcttttgtttccagaaaaagttgggctttcccaagcagttctattacccggttcagaattgcttcatccaaaaatcatctgatggtatagatggatcctagtccttttcattacctgatggtagaaataaaataattgatt

SEQ ID NO: 109 - protein, 485 aa, Homo sapiens [sequence omitted]

SEQ ID NO: 110 - DNA, 2626 bp, Rattus norvegicus
  ref <308>: DATABASE ACCESSION NUMBER: Refseq / NM_021597
  ref <309>: DATABASE ENTRY DATE: 2002-11-05
atgttacccatgtactcgggagccggccccgttcttgcgtctcctgctccgacaacatcacccatcccaggatatgccttcaagcctccacctcggccggatttcggcaccaccgggagaacaatcaaactacaggccaatttctttgaaatggacatccccaaaattgacatctatcactatgaattggacatcaaacctgagaaatgccctcggagagtgaacagggaaatagtggagcatatggtccagcactttaaaacccagatcttcggggaccggaagccagtgtttgatggacggaagaatctgtacacagctatgccccttccaattggcagggacaaggtggaactggaggtcacgctgccaggagaaggcaaagatcgcatcttcaaggtatccatcaagtgggtatcctgcgtgagcttgcaggcgttacacgatgcactttcggggcggctgcccagcgtccccttcgagacgatccaggccctggacgttgtcatgaggcacttgccatccatgaggtacacccctgttggccgttccttcttcactgcatcggaaggctgttccaaccctctgggagggggcagagaagtgtggtttggcttccatcagtccgtccgaccttctctttggaaaatgatgctgaacatcgatgtatcagcaacagcattttacaaggcacagccagtgatcgagtttgtttgtgaagtgttggattttaaaagtattgaagaacaacaaaaacctctgacagattcccaaagggtaaagtttaccaaagaaattaaaggtctaaaggtggagataacgcactgtggtcagatgaagaggaaataccgtgtctgcaatgtgacccggcggcctgccagtcaccaaacgttcccactgcagcaggagagtgggcagacagtggagtgtacagtggctcagtacttcaaggacaggcacaagctggttttgcgctacccccacctcccatgtttacaagttggacaagagcagaaacacacctaccttcctttggaggtctgtaacatagttgctggacagagatgtataaaaaaattaacagacaatcagacctcaaccatgatcagagcaactgccaggtcagcacccgatcggcaagaggagatcagcaaattgatgcgaagtgcaagtttcaatacagacccgtatgttcgtgaatttgggatcatggtgaaagatgagatgacagatgtgacaggacgggttctgcagccgccctccatcctctacgggggcaggaacaaagcgattgccacccctgtccagggtgtgtgggacatgagaaacaagcagttccacacgggcatcgagatcaaggtgtgggccatcgcctgctttgcaccccagcgccagtgtacagaagtccatctcaagtccttcacagagcaactgaggaagatctcaagagatgctgggatgcctatccagggtcagccctgcttctgtaaatacgcacagggggcagacagtgtggaacccatgttccgacacctgaagaacacatacgctggtctccagctggtggtggttatcctgcctggcaagactcctgtgtacgcggaagtcaagcgtgtgggagacacggtgctgggcatggccacgcagtgtgtccagatgaagaacgtgcagaggaccacgccacagaccctatccaatctctgcttaaagatcaatgtcaaactgggaggagtcaacaacatcctgctgccacagggcaggcctccagtgttccagcagcctgtcatcttcctgggagccgatgtcacccacccaccagctggggatgggaagaaaccttcaattgctgccgtcgtgggcagcatggacgcacaccccaaccgctactgtgccaccgtgcgcgtacagcagcaccgacaggagatcatccaggacctggctgctatggtgcgagagctgctcattcagttctacaaatctacacgcttcaagcccacccgcatcatcttctaccgagacggcgtctctgagggccagttccagcaggttcttcaccatgagctcctggccatcagagaggcctgcataaagctggagaaggaatatcagccagggatcacattcatcgtggtgcagaagcggcaccacacacgtctcttctgcacagacaagaatgagcgggttggaaagagtgggaacatcccagcaggcacaaccgtcgacacaaagatcacccacccaactgagtttgacttctacctgtgcagtcatgctggcatccaggggacaagccgtccttcccactaccacgtgctctgggatgacaatcgtttctcttctgatgagcttcagattctgacctaccagctgtgtcacacctacgtgcgctgcacacgctctgtgtcaattcctgcgccagcttactatgcccacctggtggccttccgagccaggtaccacctggtggataaagaacatgacagcgctgaaggaagccatacctctgggcagagcaacgggcgagatcaccaggcgctggccaaggcggtccaggtccaccaggacacactgcgcaccatgtactttgcttgacatgttgtattgtttagcgattgtgtggaattcc

SEQ ID NO: 111 - protein, 863 aa, Rattus norvegicus
  ref <308>: DATABASE ACCESSION NUMBER: Refseq / NP_067608
  ref <309>: DATABASE ENTRY DATE: 2002-11-05
MLPMYSGAGPVLASPAPTTSPIPGYAFKPPPRPDFGTTGRTIKLQANFFEMDIPKIDIYHYELDIKPEKCPRRVNREIVEHMVQHFKTQIFGDRKPVFDGRKNLYTAMPLPIGRDKVELEVTLPGEGKDRIFKVSIKWVSCVSLQALHDALSGRLPSVPFETIQALDVVMRHLPSMRYTPVGRSFFTASEGCSNPLGGGREVWFGFHQSVRPSLWKMMLNIDVSATAFYKAQPVIEFVCEVLDFKSIEEQQKPLTDSQRVKFTKEIKGLKVEITHCGQMKRKYRVCNVTRRPASHQTFPLQQESGQTVECTVAQYFKDRHKLVLRYPHLPCLQVGQEQKHTYLPLEVCNIVAGQRCIKKLTDNQTSTMIRATARSAPDRQEEISKLMRSASFNTDPYVREFGIMVKDEMTDVTGRVLQPPSILYGGRNKAIATPVQGVWDMRNKQFHTGIEIKVWAIACFAPQRQCTEVHLKSFTEQLRKISRDAGMPIQGQPCFCKYAQGADSVEPMFRHLKNTYAGLQLVVVILPGKTPVYAEVKRVGDTVLGMATQCVQMKNVQRTTPQTLSNLCLKINVKLGGVNNILLPQGRPPVFQQPVIFLGADVTHPPAGDGKKPSIAAVVGSMDAHPNRYCATVRVQQHRQEIIQDLAAMVRELLIQFYKSTRFKPTRIIFYRDGVSEGQFQQVLHHELLAIREACIKLEKEYQPGITFIVVQKRHHTRLFCTDKNERVGKSGNIPAGTTVDTKITHPTEFDFYLCSHAGIQGTSRPSHYHVLWDDNRFSSDELQILTYQLCHTYVRCTRSVSIPAPAYYAHLVAFRARYHLVDKEHDSAEGSHTSGQSNGRDHQALAKAVQVHQDTLRTMYFA

SEQ ID NO: 112 - DNA, 610 bp, Homo sapiens
  ref <308>: DATABASE ACCESSION NUMBER: EMBL / AA468881
  ref <309>: DATABASE ENTRY DATE: 2000-03-03
ttaaataggaggacttttatttaattttttgctgacatactatgaggcaaaacaaaattgacaccatacaaaataactttataaaatatcattcacatcatattttatcagatttacagcattctgtgcatgttaggggttatgtaaggaggtgaaaaaacactatgccaaacttttagtattagtttatcaatgacgtctcatgttcgatgctggctgtcacggaagggctggccatctgttggtctgagtgtagctggtctcgtgaatcccactcggtacacaatcgctaaacactaaaacatgtcaagcaaagtacatggtgcgcagagtgtcttggtgaacctggaccgccttggccagtgcttggtggtctcgcccgttactctgcccagaggtatggcttccttcagcactgtcatgttccttatccaccaggtggtacctggcccggaagccaccaggtgagcgtagtatgctggcgctgggatggacacgggcgtgtgcaacgccgtaggtgtgacacaactggtaggtaggatctgcaactcatcagagggaaacgattgtcgtcccaaaggggttgatattgcgaaggcctgctgtcccc

SEQ ID NO: 113 - DNA, 2410 bp, Rattus norvegicus
  ref <308>: DATABASE ACCESSION NUMBER: Refseq / NM_013026
  ref <309>: DATABASE ENTRY DATE: 2003-01-14
gcgggctagaggagacagagcctggcgctgaggaaggaatctggcagtcgagagctgactccagccgacggaacctgcagcccttgctccggacagcagcgcgccgggcaggagtccgggatagcgaagcgcagagcaatcagcagagcctgcccggagctccgtgcaaccggcaactccgacccacatagcccgccgagctcccgccgccggtccgggcagcatgagacgtgcggcgctctggctttggctctgcgcgctggcgctgcgcctgcagcctgccctcccgcaaattgtcaccgcaaatgtgcctcctgaagaccaagatggctctggggacgactcagacaacttctctggctcaggcacaggtgctttgccagatatgactttgtcacggcagacaccttccacttggaaggatgtgtggctcctgacagctacacccacagctccagaacccaccagcagggataccgaggccaccctcacctctatcctgccggctggagagaagcctgaggagggagagcccgtggcccacgtggaagcagagcctgacttcactgctcgggacaaggagaaggaggccaccaccaggcctagggagaccacacagctcccagtcacccaacaggcctcaacagcagccagagccaccacggcccaggcatctgtcacgtctcatccccacggggatgtgcaacctggcctccacgagaccttggctcccacagcacccggccaacctgaccatcagcctccaagtgtggaggatggaggcacttctgtcatcaaagaggttgtggaggatgaaactaccaatcagcttcctgcaggagagggctctggagaacaagacttcacctttgaaacatctggggagaacacagctgtggctggcgtcgagcctgaccttcggaatcagtccccagtggatgaaggagccacaggtgcttctcagggccttttggacaggaaggaagtgctgggaggtgtcattgctggaggcctggtgggcctcatctttgctgtgtgcctggtggctttcatgctataccggatgaagaagaaggacgaaggcagttactccttggaggagcccaaacaagccaatggcggtgcctaccagaaacccaccaagcaggaagagttctacgcctgatggggaaatagttctccccccacaacccctgccactcactaggctcccatttgcctcttctgtgaaaaacttcaagccctggcctccctaccgctgtgccgtctcctctgcacccagacccttctgcccgagcggtctcagggtgtgctgggaattccttctcctctgacttctgctagaagcttgggtgcagagggtttcttgcattttgtctttctaccacagccacgcctgttgtccactcttctgacttggcttctccaaatgggaggagactcagctctggacagaaagggaacccaactgctttggacctagatggcctattgtgactggaggatcctgaggacaggagaggggcttcaacagacacgccatagcacttacccatagagaccattagggttggctgtgctgtggtagggaaggagtccagggctccttggaattcacttctcattgtggggaggtctactttagacaacttggttttgcacatgtttcctctaatttttctgttttagagccccagcagaccttacttctggggtaaggcaagtcagttgactggtgtccccacctcgcttccctaatctacattcgggagaccgcatcggggttaaataagacttttcattttcgtttttgtttttaacctagaagaaccaaatccggacaccaaaacgtaggcttagtttgtgtgttgtctctgagtttgtcgctcatgcgtgcaacagggtatggactatctgtttggtgccccatttttggtggcccataagtaggctggctagcccaggatgccatggagtagccacctcttgaccagtcatgcctgtgtgcatagactcagggccatggcctttgtgacattggaagagcctgtgtgagaacttcctcctagattagtctagggatggaggggaggagactgtacagtttgggaggaggggtgacaagggtgtccaagactctcccacctttggtactaactctggtcaccctttctcctggaagttgacaagacacatcttgagtatggctggcactggctcctccatcaagaaccaagttcaccttcagctcctgtggccctgttcccaggctggagtcagaaatgtttcccaaagagtgagagtcttttgcttttggcaaaacgctacttaatccaatgggttctgtacagtagattttgcagatgtaataaactttaatataaaggagtcctatgaaaaaaaaaaaaaa

SEQ ID NO: 114 - protein, 313 aa, Rattus norvegicus
  ref <308>: DATABASE ACCESSION NUMBER: Refseq / NP_037158
  ref <309>: DATABASE ENTRY DATE: 2003-01-14
MRRAALWLWLCALALRLQPALPQIVTANVPPEDQDGSGDDSDNFSGSGTGALPDMTLSRQTPSTWKDVWLLTATPTAPEPTSRDTEATLTSILPAGEKPEEGEPVAHVEAEPDFTARDKEKEATTRPRETTQLPVTQQASTAARATTAQASVTSHPHGDVQPGLHETLAPTAPGQPDHQPPSVEDGGTSVIKEVVEDETTNQLPAGEGSGEQDFTFETSGENTAVAGVEPDLRNQSPVDEGATGASQGLLDRKEVLGGVIAGGLVGLIFAVCLVAFMLYRMKKKDEGSYSLEEPKQANGGAYQKPTKQEEFYA

SEQ ID NO: 115 - DNA, 1113 bp, Rattus norvegicus
  ref <308>: DATABASE ACCESSION NUMBER: EMBL / M34097
  ref <309>: DATABASE ENTRY DATE: 2000-03-04
cataagatgtatgtgtagggggtgtaagagtactcgtgaggggtgtgggcagtgttatagggtgctggtgagcaaaccctctgggacctaggtggccttccagggaagatgaagctcctcttgctcctgctgagcttctctctggcccccaagacagaggcaggggagatcatcgggggacatgaagccaagccccactctcgaccctacatggcctatcttcagatcatggatgagtattctgggagtaagaagtgtggcggcttccttatacgagaagactttgtgctgactgctgctcactgttcgggaagcaaaataaatgtcacgttgggggcccacaacatcaaagaacaggagaagatgcaacaaatcatccctgtggtgaaaatcattccccacccagcgtataattctaagacaatctccaatgacatcatgctgttaaagctgaagagtaaggccaagaggtctagcgctgtgaagcctctcaatctgcccagacgcaacgtcaaagtgaaaccaggagatgtgtgctatgtggctggttggggaaagctgggcccaatgggcaaatactcagacacactacaagaggttgagctaacagtacaggaggatcagaagtgtgagtcctacttaaaaaattatttcgacaaagccaatgagatatgtgcaggggacccaaagatcaaacgtgcttcctttcggggggactctggagggcctcttgtgtgtaaaaaagtggccgcgggcatcgtctcctatggacaaaatgatggttcaactccacgggcattcaccaaagtctcgactttcctatcatggataaagaaaactatgaaaaagagctaactacaagaagcaacatggatcatttcctgactaaccatctgccctatagctgagtccaggattgctctaggacagatggcagcaactgaataaagcactttttttctgagactggttgactggtttcatgtccattcacagtgatcaaccctgtccttggcagatgaatggaatgcttctgccacaaggctgtgacaacccagctgacatctgctagttcaccctctctacaagagaagaagaatgtttgattgtccg

SEQ ID NO: 116 - protein, 249 aa, Rattus norvegicus
  misc_feature (1)..(249): Xaa=Unknown amino acid
MKLLLLLLSFSLAPKTEAGEIIGGHEAKPHSRPYMAYLQIMDEYSGSKKCGGFLIREDFVLTAAHCSGSKINVTLGAHNIKEQEKMQQIIPVVKIIPHPAYNSKTISNDIMLLKLKSKAKRSSAVKPLNLPRRNVKVKPGDVCYVAGWGKLGPMGKYSDTLQEVELTVQEDQKCESYLKNYFDKANEICAGDPKIKRASFRGDSGGPLVCKKVAAGIVSYGQNDGSTPRAFTKVSTFLSWIKKTMKKSX

SEQ ID NO: 117 - DNA, 960 bp, Homo sapiens
  ref <308>: DATABASE ACCESSION NUMBER: Refseq / NM_004131
  ref <309>: DATABASE ENTRY DATE: 2000-11-01
agcagctccaaccagggcagccttcctgagaagatgcaaccaatcctgcttctgctggccttcctcctgctgcccagggcagatgcaggggagatcatcgggggacatgaggccaagccccactcccgcccctacatggcttatcttatgatctgggatcagaagtctctgaagaggtgcggtggcttcctgatacaagacgacttcgtgctgacagctgctcactgttggggaagctccataaatgtcaccttgggggcccacaatatcaaagaacaggagccgacccagcagtttatccctgtgaaaagacccatcccccatccagcctataatcctaagaacttctccaacgacatcatgctactgcagctggagagaaaggccaagcggaccagagctgtgcagcccctcaggctacctagcaacaaggcccaggtgaagccagggcagacatgcagtgtggccggctgggggcagacggcccccctgggaaaacactcacacacactacaagaggtgaagatgacagtgcaggaagatcgaaagtgcgaatctgacttacgccattattacgacagtaccattgagttgtgcgtgggggacccagagattaaaaagacttcctttaagggggactctggaggccctcttgtgtgtaacaaggtggcccagggcattgtctcctatggacgaaacaatggcatgcctccacgagcctgcaccaaagtctcaagctttgtacactggataaagaaaaccatgaaacgctactaactacaggaagcaaactaagcccccgctgtaatgaaacaccttctctggagccaagtccagatttacactgggagaggtgccagcaactgaataaatacctctcccagtgtaaatctggagccaagtccagatttacactgggagaggtgccagcaactgaataaatacctcttagctgagtgg

SEQ ID NO: 118 - protein, 247 aa, Homo sapiens
  ref <308>: DATABASE ACCESSION NUMBER: Refseq / NP_004122
  ref <309>: DATABASE ENTRY DATE: 2000-11-01
MQPILLLLAFLLLPRADAGEIIGGHEAKPHSRPYMAYLMIWDQKSLKRCGGFLIQDDFVLTAAHCWGSSINVTLGAHNIKEQEPTQQFIPVKRPIPHPAYNPKNFSNDIMLLQLERKAKRTRAVQPLRLPSNKAQVKPGQTCSVAGWGQTAPLGKHSHTLQEVKMTVQEDRKCESDLRHYYDSTIELCVGDPEIKKTSFKGDSGGPLVCNKVAQGIVSYGRNNGMPPRACTKVSSFVHWIKKTMKRY

SEQ ID NO: 119 - DNA, 4035 bp, Rattus norvegicus
  ref <308>: DATABASE ACCESSION NUMBER: EMBL / D10938
  ref <309>: DATABASE ENTRY DATE: 2000-04-18
ggatccaaactaaaagctgcaaagatactctatagaaacaaaaattcctaggacacaagtgggcaagtggcttaacacccttggctaaggacgaggtggctataagtaatggagatgctgtgcagagcagggaagatggctttcaaacagtgtccaatctcctgaggaaggaagatccaagccttcttcagagggatgctacactagtctcaaatcgttgcctggacttgagtgtgaaatgtctcactttccttcctgtctggctgtgcttgggtaactagctctgtgaacaacttctcttactgtggctggtgtgtggaggctatgcgcatctatgaagtctgaaactgttgtgtgcattgctctcctgaggggaagagcctcaagataattgtgatgccactgtagcattgaggagggctttacggtccctcttcagtgagaattctgtagcttgtgtgcataagctgtctatgtggcctgttcggacgccacataggatcattgctgtcttctcgttgattggctacccctaccgtccaagcagttctgagtatgtttaccatttatgcaaactgaaggtgtatacatgaggaaatttccattggtggtagactaccttgtctctttcaaaagtggatgatagaaactttgatttttcaatactaaagctttcggccatttctgcactattgactggaggtaggttatttttgtgttcagcaactcatcgtggacagaaacataattcttttctggtggacttaccctgcataatgagtgctgtgcgtgtatgtctttacgagtctatgttccacagctgataagtagaaagaaagttagcacggtagagttaaaggaattctacttgttactactaagaggcacaatgcttccggtaagtaactcagaagtcttccaccacctgacgtaaccttggtttggtccataggtatgtcttaattttgcttcttattcaattttagttgggtttgcagagcgtgcttaaagatgcaagccaaattctaagagtgatttaactttgtggtatgttgttaagaggcatcatagggaacttcaaatgcacagaaaagaaaatccctagctgccagttccaaagtgtgtaaaatactactcagctttgtaaaggtatgacaactcagtgttacacaaccgcgcgcgtgcacacacacacacacacacaggagttctgctaatgagaagttgcgctctctttggtttgccaaaacaagccatccaagtaccatgggagtctggagagatgtccgcacgtgaaaggcattgattgatccggacttgaatgcctttccttgaggactagtccagctttcccctttctcttgttttcatacctcctcaggcacatcattagaacaaacctactgaaaacgaattgtttggaaataagcaaaaccttctcagatgcagtaaaacctagagatgtgctctctagttcctaaagtttcttcatgacaccagacaaatcctgtttggcctttagcttccctatctgaaaaacaccgtggtccgaagtgctgtcacactgcctctagggagaaaggcccgtcccagctctcctgctcagagctgcagccagccgccctctagccactactgtttccaccacacattcctaccaaggactgtgctgctgacttgaaaggaagattactattccacttgcagttgttgcttagtaacatgtgtgattgtgtttctggtgacggcgtgaacagagatcattaaaaattaaacccccagagctgctaaagtgggaggaagtgggagcggggaagccacagtgccgtcacttgcttagaaaccgtttactctcaggcttacatgtaaatcttgaggaaaacactgcatgtctctggtttatattaagctacatacagcacggtaactgacattgatttgtgtcccctgcaggtggagtggatcagtaagacattaaaaaaaaaagaaaaagaaaaaaagaaagaaaaaaggtctgaaattacaagcagatgggccacatggtgtccccaagaaagtaaggtctaacctgttctgtgtctgtctctgcttccttcccacagttccaccaggtgagaagagtgatgaccatccttttccttactatggttatttcatacttcggttgcatgaaggctgcgcccatgaaagaagcaaacgtccacggacaaggcaacttggcctacccagctgtgcggacccatgggactctggagagcgtgaatgggcccagggcaggttcgagaggtctgacgacgacgtccctggctgacacttttgagcacgtgatcgaagagctgctggatgaggaccagaaggttcggcccaacgaagaaaaccataaggacgcggacttgtacacttcccgggtgatgctcagcagtcaagtgcctttggagcctcctctgctctttctgctggaggaatacaaaaattacctggatgccgcaaacatgtctatgagggttcggcgccactccgaccccgcccgccgtggggagctgagcgtgtgtgacagtattagcgagtgggtcacagcggcagataaaaagactgcagtggacatgtccggtgggacggtcacagtcctggagaaagtcccggtatcaaaaggccaactgaagcaatatttctacgagaccaagtgtaatcccatgggttacacgaaggaaggctgcaggggcatagacaaaaggcactggaactcgcaatgccgaactacccaatcgtatgttcgggcccttactatggatagcaaaaagagaattggctggcggttcataaggatagacacttcctgtgtatgtacactgaccattaaaaggggaagatagtggatttatgttgtatagattatattgagacaaaaattatctatttgtatatatacataacagggtaaattattcagttaagaaaaagataattttatgaactgcatgtataaatgaagtttatacagtacagtggttctacaatctatttattggacatatccatgaccagaaagaaacagtcatttgcgcacaactttaaaagtctgcattacattcctcgataatgttgtggtttgttgccgttgccaagaattgaaaacaaaaagttaaaaaaaataataaattgcatgctgctttaattgtgaattgataataaactgtccctctttcagaaaacagacaaaaaaacaaaaaacaaaaaaaagccaaaaacaaaaatttgaaccaaaacattccgtttacattttagacactaagtatcttcgttcttgttagtactctgttctactgctttcaacttctcatagcgttggaattaaaactatgtcaaggtgctgttgtcattgctttactggcttaggggatggggaacgggaggggtagatttctgtttgttttgtgttttatttcgtttgtttgtttgttttgtttttttagttccacccggagtagggatggagaaaatttcttcactctcctattctggttgataaagcgttacatttgtatgttgtaaaaaatgtttgcaaaatccaatcagatgactggaaaacgaataaaaattaaggcaactgaataaaatgctcacacaacactgcccatgatgtatctcccctggtcccccaggtcactcttctggcatgggtcagggaaagctgcttttattggaaagaccagcatttgtttaaagcacattctttccctccctcctcccattttggtccctttcttttttgttttgttttaagaaagaaaattaagttgcgcgctttgaaatattttatcactgctgtgaacagatgaacaatgtgtgtcatttcatgacactcgtggaaaacagtgattttttttttattttttgccctaaggagaaacaagtaagaataaccgaaaatgttctttttttttaaaggcataaacagtggataagttataatatggcctaacaatgtttgcagataaaagatattgcatacagccagatactagagcaggatcc

SEQ ID NO: 120 - protein, 250 aa, Rattus norvegicus
  misc_feature (1)..(250): Xaa=Unknown amino acid
MTILFLTMVISYFGCMKAAPMKEANVHGQGNLAYPAVRTHGTLESVNGPRAGSRGLTTTSLADTFEHVIEELLDEDQKVRPNEENHKDADLYTSRVMLSSQVPLEPPLLFLLEEYKNYLDAANMSMRVRRHSDPARRGELSVCDSISEWVTAADKKTAVDMSGGTVTVLEKVPVSKGQLKQYFYETKCNPMGYTKEGCRGIDKRHWNSQCRTTQSYVRALTMDSKKRIGWRFIRIDTSCVCTLTIKRGRX

SEQ ID NO: 121 - DNA, 1923 bp, Rattus norvegicus
  ref <308>: DATABASE ACCESSION NUMBER: Refseq / NM_053812
  ref <309>: DATABASE ENTRY DATE: 2003-01-13
ccgggagctgctagctcctctatggtcacaaagtctcgaggcttctcgggctaaaaggcgactcaaggcggcatccagcaccatgaattcactgatagcagttcctgccagtcaggcctgaaaccttggccccgggagcagccaggagcccttccggatctttgtcttcaaactgctgggccattccacatctggagcagtcaggcaggtgacaagtgagggtaccctccaccaagaccggaaaaatggcatccggacaaggaccaggtcctcccaagggggactgcgatgaggccctgtctgcttctgaacagcaagttgcccaggacacagaggaggtctttcgaagctacgttttttacctccaccagcaggaacaagagacccagggggcagccgcccctgctaaccctgagatggacaacttgtccctagaacccaacagtgtcttgggtcaggtgggtcggcagcttgctctcatcggagacgatattaatcggcgctacgacacggagttccagaatttactggaacagcttcagcccaccgctgggaatgcctacgaactcttcaccaagatcgcctccagcctatttaagagcggcatcagctggggccgtgtggtggctctcctgggctttggctaccgtctggccctgtatgtctaccagcgtggtttgactggcttcctgggccaggtgacctgctttttggctgatatcatactacaccattacattgccagatggattgcacagagaggtggttgggtggcagccctgagtttgcgtagagaccccatcctgagtgtagtggtaatttttggtgtggttctgttgggccaatttgtggtacacagattcttcagatcatgactgccccgggagctccagccacatgactgcctggactaaactaaacctctccccaacccactcccctgcaacagtcctctcctgcctctcagggcaaacaggcacccctgctttggaaagccacggcccgggggtcatggaggcagcatgaccaccccaacatcgcatggtgctactgaaccccatcctgtctcagaggggctgacagatgctctgggggggggggggtcgggcaagaggctgggccaccgcttcccagaaagttagttttagttttatactcccctctggatacaatcctcccttttcatccgctctgcccaaagtcagaacattggggaccagtggctctaacctgccttcccagcacacctgctactttggaaggtcggaagggacctaagcacagtcctgaccctccctacataggaccagctgtaggggtgtgtgatctaccctgccctcccacctcatcttccactatcccctcctttatcccccctccttctcccctcccctcccccgatccatttttgcctttgcggctggactctcagggattccgagcccagagtgagggcagaggtgagagctcagaccacagctgtctgaacacgtccatcaaggccctccaaaccccaagtgcctccctgaccactgctaccaacctagtgggtaagggaagaccctcaccttctccccagtgcctccctgctggggagggcagtcactctgacaggggaaggggtgggcattcagtgggaggtgctcacgctagagaactacaccagcaaaagcaactgtggatctggttgcaatgtgaccccccctaaacctgtgaatacttgaaccccaccttcacccatgctcctgttatgcctaggtcctcctcgggtggggtggggggtgtttttctctgtcttgcacaacataggggtgagaaaagtcttgattaagccaaatgtagcaagggtggggggaggcagatggattcccccacctcgccctcggtgtctggaaataaacggtgcaatgcccccaacacccc

SEQ ID NO: 122 - protein, 209 aa, Rattus norvegicus
  ref <308>: DATABASE ACCESSION NUMBER: Refseq / NP_446264
  ref <309>: DATABASE ENTRY DATE: 2003-01-13
MASGQGPGPPKGDCDEALSASEQQVAQDTEEVFRSYVFYLHQQEQETQGAAAPANPEMDNLSLEPNSVLGQVGRQLALIGDDINRRYDTEFQNLLEQLQPTAGNAYELFTKIASSLFKSGISWGRVVALLGFGYRLALYVYQRGLTGFLGQVTCFLADIILHHYIARWIAQRGGWVAALSLRRDPILSVVVIFGVVLLGQFVVHRFFRS

SEQ ID NO: 123 - DNA, 2094 bp, Homo sapiens
  ref <308>: DATABASE ACCESSION NUMBER: Refseq / NM_001188
  ref <309>: DATABASE ENTRY DATE: 2000-10-31
gaggatctacaggggacaagtaaaggctacatccagatgccgggaatgcactgacgcccattcctggaaactgggctcccactcagcccctgggagcagcagccgccagcccctcggacctccatctccaccctgctgagccacccgggttgggccaggatcccggcaggctgatcccgtcctccactgagacctgaaaaatggcttcggggcaaggcccaggtcctcccaggcaggagtgcggagagcctgccctgccctctgcttctgaggagcaggtagcccaggacacagaggaggttttccgcagctacgttttttaccgccatcagcaggaacaggaggctgaaggggtggctgcccctgccgacccagagatggtcaccttacctctgcaacctagcagcaccatggggcaggtgggacggcagctcgccatcatcggggacgacatcaaccgacgctatgactcagagttccagaccatgttgcagcacctgcagcccacggcagagaatgcctatgagtacttcaccaagattgccaccagcctgtttgagagtggcatcaattggggccgtgtggtggctcttctgggcttcggctaccgtctggccctacacgtctaccagcatggcctgactggcttcctaggccaggtgacccgcttcgtggtcgacttcatgctgcatcactgcattgcccggtggattgcacagaggggtggctgggtggcagccctgaacttgggcaatggtcccatcctgaacgtgctggtggttctgggtgtggttctgttgggccagtttgtggtacgaagattcttcaaatcatgactcccaagggtgccctttgggtcccggttcagacccctgcctggacttaagcgaagtctttgccttctctgttcccttgcagggtcccccctcaagagtacagaagctttagcaagtgtgcactccagcttcggaggccctgcgtgggggccagtcaggctgcagaggcacctcaacattgcatggtgctagtgccctctctctgggcccagggctgtggccgtctcctccctcagctctctgggacctccttagccctgtctgctaggcgctggggagactgataacttggggaggcaagagactgggagccacttctccccagaaagtgtttaacggttttagctttttataatacccttgtgagagcccattcccaccattctacctgaggccaggacgtctggggtgtggggattggtgggtctatgttccccaggattcagctattctggaagatcagcaccctaagagatgggactaggacctgagcctggtcctggccgtccctaagcatgtgtcccaggagcaggacctactaggagaggggggccaaggtcctgctcaactctacccctgctcccattcctccctccggccatactgcctttgcagttggactctcagggattctgggcttggggtgtggggtggggtggagtcgcagaccagagctgtctgaactcacgtgtcagaagcctccaagcctgcctcccaaggtcctctcagttctctcccttcctctctccttatagacacttgctcccaacccattcactacaggtgaaggctctcacccatccctgggggccttgggtgagtggcctgctaaggctcctccttgcccagactacagggcttaggacttggtttgttatatcagggaaaaggagtagggagttcatctggagggttctaagtgggagaaggactatcaacaccactaggaatcccagaggtggatcctccctcatggctctggcacagtgtaatccaggggtgtagatgggggaactgtgaatacttgaactctgttcccccaccctccatgctcctcacctgtctaggtctcctcagggtggggggtgacagtgccttctctattggcacagcctagggtcttgggggtcaggggggagaagttcttgattcagccaaatgcagggaggggaggcagatggagcccataggccaccccctatcctctgagtgtttggaaataaactgtgcaatcccctcaaaaaaaaaacggagatcc

SEQ ID NO: 124 - protein, 211 aa, Homo sapiens
  ref <308>: DATABASE ACCESSION NUMBER: Refseq / NP_001179
  ref <309>: DATABASE ENTRY DATE: 2000-10-31
MASGQGPGPPRQECGEPALPSASEEQVAQDTEEVFRSYVFYRHQQEQEAEGVAAPADPEMVTLPLQPSSTMGQVGRQLAIIGDDINRRYDSEFQTMLQHLQPTAENAYEYFTKIATSLFESGINWGRVVALLGFGYRLALHVYQHGLTGFLGQVTRFVVDFMLHHCIARWIAQRGGWVAALNLGNGPILNVLVVLGVVLLGQFVVRRFFKS

SEQ ID NO: 125 - DNA, 1978 bp, Rattus norvegicus
  ref <308>: DATABASE ACCESSION NUMBER: Refseq / NM_057119
  ref <309>: DATABASE ENTRY DATE: 2003-01-13
gtggtgcggagcgagtcgactttggactactctcttagcgtggcgtcgcgcgaggctgcggcggagcctctgtcaggaaggcgggagcttgacagcttcagtaaagaccagcagcggtgacagcaacccggagtcatgagcgacagcggcgagcagaactacggcgagcgggaatcccgttctgcttcccgaagtggaagtgctcatggatcggggaaatctgcacggcacacacctgcaaggtctcgctccaaggaagattcaagacgttctagatcaaagtcaagatccagatctgaatctaggtctagatccagaagaagttctagaaggcattatacaaggtcacgatcacgatctcgctctcatagacgatcccggagcaggtcttacagccgagactatcgcagacgccacagccacagccattctcccatgtctactcgaaggcgtcatgttgggaaccgggcaaatcctgaccccaactgttgtcttggagtgtttggattgagcttgtacaccacagaaagagatctaagagaagtgttctctaagtatggccccattgctgatgtgtctattgtgtatgaccagcagtctagacggtcaagaggatttgcctttgtatattttgaaaatgtagatgatgccaaggaagctaaagaacgtgccaatggaatggagcttgatggacgtcggattagggtcgatttctctataacaaaaaggccccataccccaacaccaggaatttatatggggagacccacttatggcagttcacgacgccgggactattatgaccgaggatatgatcggggttatgatgaccgggactattacagcagatcatacagaggaggaggtggaggaggaggtggatggagagcagctcaagatagagatcagatttacagaaggcggtcaccttctccttactacagtcgtggaggatacaggtctcgttctcgatcaagatcctactcacctcgtcgctattaaagcatgaagttgaagactttctgagacctgccatagagctgggatgttgtttgtggacaatattttctattgtctcctgtttaaaaagtgaacagtgcctagtgaagttaggtgacttttacaccttttatgatgactacttttggtggagttgaaatgctgttttcattctgcatttgtgtagttcggtgctttgttcaaagttaagtgttttcagaaaagtatgttttgcatgtatttttttacagtccaaattttgactgctgagaagtttctattgtacaaaacttcatttaaaaggtttttctactgaatccagggtattctgaagatcgaagcctgtgtgtaaaatgctaccagatggcaaaaagcaacaataaacaagtttgatttttacttttctttctaaatatcaatgcttaacaagaaccattcttaagttatcagtaaaaaataaataaataaaaattttctttcaggagtccatgaaacttgccatattcgatatacctgcaattaagtgttaaaaatacgctgtaactctgtactgctagtattagaacaagaatctttccatacagctaatgcttaatgcttacattaatgtggatttgtcggcctttatgtaatctgtattatatatagcaggggataagagctacagatagatacatgcctttaaaaggctgtttcttaaggctgttacaaggagataatggtatttcaactaatcagcaagtgacaatacattccaccacaaatgtactcttgttcttctagcctttagactatgaaaatactgggtgcttcaaagtatggaatgagagaagggatcaccacacctgtgtcatggatgaagactgcctgttcattttttaaatatgattttcaggtcctttgcttaccaaaggaagcccaattcactcaaatgttttgagaactgtttaaataaacaagcaagaaaaattgctgatgc

SEQ ID NO: 126 - protein, 288 aa, Rattus norvegicus
  ref <308>: DATABASE ACCESSION NUMBER: Refseq / NP_476460
  ref <309>: DATABASE ENTRY DATE: 2003-01-13
MSDSGEQNYGERESRSASRSGSAHGSGKSARHTPARSRSKEDSRRSRSKSRSRSESRSRSRRSSRRHYTRSRSRSRSHRRSRSRSYSRDYRRRHSHSHSPMSTRRRHVGNRANPDPNCCLGVFGLSLYTTERDLREVFSKYGPIADVSIVYDQQSRRSRGFAFVYFENVDDAKEAKERANGMELDGRRIRVDFSITKRPHTPTPGIYMGRPTYGSSRRRDYYDRGYDRGYDDRDYYSRSYRGGGGGGGGWRAAQDRDQIYRRRSPSPYYSRGGYRSRSRSRSYSPRRY

SEQ ID NO: 127 - DNA, 1972 bp, Homo sapiens
  ref <308>: DATABASE ACCESSION NUMBER: Refseq / NM_004593
  ref <309>: DATABASE ENTRY DATE: 2003-01-08
gaattcggcacgagggcgaccggcgcgtcgtgcggggctgcggcggagcctccttaaggaaggtgcaagaggttggcagcttcgattgaagcacatcgaccggcgacagcagccaggagtcatgagcgacagcggcgagcagaactacggcgagcgggaatcccgttctgcttccagaagtggaagtgctcacggatcggggaaatctgcaaggcatacccctgcaaggtctcgctccaaggaagattccaggcgttccagatcaaagtccaggtcccgatctgaatctaggtctagatccagaagaagctcccgaaggcattatacccggtcacggtctcgctcccgctcccatagacgatcacgtagcaggtcttacagtcgagattatcgtagacggcacagccacagccattctcccatgtctactcgcaggcgtcatgttgggaatcgggcaaatcctgatcctaactgttgtcttggagtatttgggctgagcttgtacaccacagaaagagatctaagagaagtgttctctaaatatggtcccattgccgatgtgtctattgtatatgaccagcagtctaggcgttcaagaggatttgcctttgtatattttgaaaatgtagatgatgccaaggaagctaaagaacgtgccaatggaatggagcttgatgggcgtaggatcagagttgatttctctataacaaaaagaccacatacgccaacaccaggaatttacatggggagacctacctatggcagctctcgccgtcgggattactatgacagaggatatgatcggggctatgatgatcgggactactatagcagatcatacagaggaggaggtggaggaggaggaggatggagagctgcccaagacagggatcagatttatagaaggcggtcaccttctccttactatagtcgtggaggatacagatcacgttccagatctcgatcatactcacctcgtcgctattaaagcatgaagactttctgaaacctgccctagagctgggatattgtttgtgggcaatattttttattgtctcttgtttaaaaagtgaacagtgcctagtgaagttaggtgacttttacaccttttacgatgactacttttggtggagttgaaatgctgttttcattctgcatttgtgtagtttggtgctttgttccaagttaagtgttttcagaaaagtatgttttgcatgtatttttttacagtctaaattttgactgctgagaagtttctattgtacaaaacttcatttaaaaggtttttctactgaatccagggtattctgaagatcgaagcctgtgtaaaatgctaccaaatggcaaaaagcaacaataaacagtttgatttttacttttctttctaacatatcaatgcttagcagaactattcagattgtcagtagtaaatttaaagacaaatgcccgttttcctccagtccatgaaacataccatacttatatacctgcaactaagtgtttaaaattatgctctgtaactctgtactgctagtattagaactaaaaatcttaaaatacagccagtgcttaatgcttatatcaatgtggatttgtcggcttttatgtaatctgtaatatgtatagcaggaaatacgaagagttacacagtgtatgccttaaaaggctgtttcttaaaggtgttacaaggggataatggtatttcaactagttatcagcaagtgacaatacattccaccacaaatacactcttgttcttctagcttttagactatatgaaaaaaccgggtgcttcaaagtacatgataagggaacactatacctgtcatggatgaactgaagactttgcctgttcattttttaaatattattttcaggtcctttgcttaccaaaggaggcccaatttcactcaaatgttttgagaactgtgtttaaataaacgcaaatgaaaagaaaaaaaaaaaaaaaaaa

SEQ ID NO: 128 - protein, 288 aa, Homo sapiens; identical to SEQ ID NO: 126
  ref <308>: DATABASE ACCESSION NUMBER: Refseq / NP_004584
  ref <309>: DATABASE ENTRY DATE: 2003-01-08

SEQ ID NO: 129 - DNA, 748 bp, Rattus norvegicus
  ref <308>: DATABASE ACCESSION NUMBER: EMBL / Z34004
  ref <309>: DATABASE ENTRY DATE: 1994-06-01
ctgcggatgccacggaacatcgagccaaatcccaggaacacgctctgaaccccaggagctgcacaccactctattaggtagtttattggcgcatcaaatctggagtctacctccctcggttcacaaatcagttcagagagaggatcaaacttgcccaagattaaagagtaatggtgtcacctgctcctcttccctgaatggcatgatgccagggatgtgactggtgacctgaaagggagggaaatcaaggcaggaacggctgggtgtgatggagacctcaaggctgttgtgagccccccaagaacagactctctggaggcaggctttatcgagcaggtcgttcaactggggagcacaaaggctacttaaatttttggggagtgagtaggggcactcagggcaaacggatgtcattgtccaagaccaaggtgtagggaatgctttactgcatgaaaaggaatttgaggtgcttgctgtctggacgtgactttgtccagagaggaaatttaacctataacctggccaccggttatgactacctcaaggattgcagaggtggggccaaaaggctatgtacgtgctctggaacatgcaggcccaggacggagaaggaggcgtcctgctcctgccagccttaagatgggaattttagggtctggacatcactggtgctccaggtcagctttcctggttgcagatctctcctggtcaaggctcccagctcgcctggatcccacaactgcacagt

SEQ ID NO: 130 - DNA, 776 bp, Rattus norvegicus
  ref <308>: DATABASE ACCESSION NUMBER: EMBL / L46593
  ref <309>: DATABASE ENTRY DATE: 2000-03-04
atgagttcccagcagcagaagcagccttgcactgtaccccctcagctgcaccagcacgaggtgaaacagccttgccagccaccaccccaggaaccttgtgctcccaaaactaaggagccctgtcaccctattcctgagccctgcaaccccaaggtgccagagccctgccagcctaaggtgccagagccttgtcaacctaaggtgccagagccttgccagcctaaggtgccagagccttgccagcctaaggtgccagagccttgccagcctaaggtgccagagccctgccagcctaaggtgccagagccctgccatcccaaggcacctgagccctgccaccctgttgttcccgagccctgccagcctgttgctcctgagccctgccagcctgttgttcctgagccctgccccccaactgtcactccatcaccataccagcagaagacaaagcagaagtaatattgtccatagccaagcctgaagatctgatcaccagatgctgaggctgctttccatcctgcttatgagtcccattgccttgtgctacacatgctgtgacctccagtcttaatcctccatccttgcaccacctggggggttgtctctcatcctcatcctcaagaagttctcgagccactcaacattacccaaagtctcatgaatggctaatctttggattcatctgaatgggggtggggaataagacaagtatatgttcaatattcttcccctctaaaaacaccttttaactcaaaaaaaaaaaaaaaaaaaaaaaa

SEQ ID NO: 131 - protein, 153 aa, Rattus norvegicus
  misc_feature (1)..(153): Xaa=Unknown amino acid
MSSQQQKQPCTVPPQLHQHEVKQPCQPPPQEPCAPKTKEPCHPIPEPCNPKVPEPCQPKVPEPCQPKVPEPCQPKVPEPCQPKVPEPCQPKVPEPCQPKVPEPCHPKAPEPCHPVVPEPCQPVAPEPCQPVVPEPCPPTVTPSPYQQKTKQKX

SEQ ID NO: 132 - DNA, 1748 bp, Rattus norvegicus
  ref <308>: DATABASE ACCESSION NUMBER: Refseq / NM_031035
  ref <309>: DATABASE ENTRY DATE: 2003-01-13
ggcgggcgggaaggcgcctcccgcagtcgctcggaactgcggacctgagagcttcccgcagagggccggcggtgggagcggagtgggtcgggcggggccgagccgggccgtgggccgtgtgggggccaggccgggccggcggacggcaggatgggctgcaccgtgagcgccgaggacaaggcggcagccgagcgctctaagatgatcgacaagaacctgcgggaggacggcgagaaggcggcacgggaggtgaagttgcttctgttaggtgctggagaatcagggaagagcaccatcgtcaagcagatgaagatcatccacgaggatggctactcagaggaggagtgccggcagtaccgtgcggttgtctacagcaacaccatccagtctatcatggccatcgtcaaagccatgggcaacctgcagatcgactttgctgacccccagcgtgcggatgatgccaggcagctgttcgcactgtcctgtgctgccgaggagcaaggcatgcttccggaagacctgtcgggcgtcatccggaggctctgggctgaccatggtgtgcaagcctgctttggccgctcacgggaatatcaactcaatgactcagccgcttactacctgaatgacctggagcgcatagcacagagtgactatatccctacacagcaggatgtgctgcggacccgtgtgaagaccacaggcatcgtcgaaacacacttcaccttcaaggacttacacttcaagatgtttgatgtgggtggtcagcgatctgagcggaagaagtggatccactgctttgagggtgtcacggccatcatcttctgtgtcgccttgagcgcgtacgacttggtgctggctgaggatgaggagatgaatcgcatgcatgagagcatgaagctgtttgatagcatctgcaataataagtggttcacagacacctccatcatcctcttcctcaacaagaaggacctgtttgaagagaagatcacacagagccccctgaccatctgtttccctgagtacacaggggccaacaagtatgacgaggcagccagctacatccagagcaagtttgaggacctgaataaacgcaaagacaccaaggagatctacacgcacttcacatgcgccaccgacaccaagaacgtgcagtttgtgtttgatgccgtcactgacgtcatcatcaagaacaacctgaaggactgtggcctcttctgaggggcagtgggcctggcaggatgggccaccgctgactctgctccccactacctgtgaggaagatgggggcaagaagaccatgctccctgcctgttcccccagctgcttctcccctgtctcttctctctgttctcagctcccctgtcccctccctcggctctagacttgggggaggggttgccacaggcctccctgtctaaaacccacctttgtctgaggtgccgggagtggccatggtacctccttactgggcatccattcgggttttctaaccattgtcttgttctgggggtgagcggggagcgcatgcagagtttcccaaggcctatgtctggaggagtaccaattcctccagcctagacccctggctttgtccaacaccagccctgacccaagtccaaatgtttacagggagcctcctgcctaccccactctctgccgcttggaggccccaaaggaaaaagcacaagaagcgtgagagacaccaccattcctggagacaaagcccacctgctcattctcgtagcttt

SEQ ID NO: 133 - protein, 355 aa, Rattus norvegicus
  ref <308>: DATABASE ACCESSION NUMBER: Refseq / NP_112297
  ref <309>: DATABASE ENTRY DATE: 2003-01-13
MGCTVSAEDKAAAERSKMIDKNLREDGEKAAREVKLLLLGAGESGKSTIVKQMKIIHEDGYSEEECRQYRAVVYSNTIQSIMAIVKAMGNLQIDFADPQRADDARQLFALSCAAEEQGMLPEDLSGVIRRLWADHGVQACFGRSREYQLNDSAAYYLNDLERIAQSDYIPTQQDVLRTRVKTTGIVETHFTFKDLHFKMFDVGGQRSERKKWIHCFEGVTAIIFCVALSAYDLVLAEDEEMNRMHESMKLFDSICNNKWFTDTSIILFLNKKDLFEEKITQSPLTICFPEYTGANKYDEAASYIQSKFEDLNKRKDTKEIYTHFTCATDTKNVQFVFDAVTDVIIKNNLKDCGLF

SEQ ID NO: 134 - DNA, 1702 bp, Homo sapiens
  ref <308>: DATABASE ACCESSION NUMBER: Refseq / NM_002070
  ref <309>: DATABASE ENTRY DATE: 2000-10-31
ccggcagtcccgagtgcttcccgcagagggctggtggtgggagcggagtggagtcgggcggggccgaagccgggccgtgggcgtagatgggggccgggcggcggcggagcggcggaacgcgggatgggctgcaccgtgagcgccgaggacaaggcggcggccgagcgctctaagatgatcgacaagaacctgcgggaggacggagagaaggcggcgcgggaggtgaagttgctgctgttgggtgctggggagtcagggaagagcaccatcgtcaagcagatgaagatcatccacgaggatggctactccgaggaggaatgccggcagtaccgggcggttgtctacagcaacaccatccagtccatcatggccattgtcaaagccatgggaaacctgcagatcgactttgccgacccctccagagcggacgacgccaggcagctatttgcactgtcctgcaccgccgaggagcaaggcgtgctccctgatgacctgtccggcgtcatccggaggctctgggctgaccatggtgtgcaggcctgctttggccgctcaagggaataccagctcaacgactcagctgcctactacctgaacgacctggagcgtattgcacagagtgactacatccccacacagcaagatgtgctacggacccgcgtaaagaccacggggatcgtggagacacacttcaccttcaaggacctacacttcaagatgtttgatgtgggtggtcagcggtctgagcggaagaagtggatccactgctttgagggcgtcacagccatcatcttctgcgtagccttgagcgcctatgacttggtgctagctgaggacgaggagatgaaccgcatgcatgagagcatgaagctattcgatagcatctgcaacaacaagtggttcacagacacgtccatcatcctcttcctcaacaagaaggacctgtttgaggagaagatcacacacagtcccctgaccatctgcttccctgagtacacaggggccaacaaatatgatgaggcagccagctacatccagagtaagtttgaggacctgaataagcgcaaagacaccaaggagatctacacgcacttcacgtgcgccaccgacaccaagaacgtgcagttcgtgtttgacgccgtcaccgatgtcatcatcaagaacaacctgaaggactgcggcctcttctgaggggcagcggggcctggcgggatgggccaccgccgaatttgtaccccccaacccctgaggaagatgggggcaagaagatcacgctccccgcctgttcccccgccgcttttctcctctttcctctctttgttctcagctccccctgtcccctcagctccaaacgtaggggaggggttcgcacaggcctccctgtttgaagcctgcccttgtctgagatgctggtaatggccatggtacccccttctgggcatctgttctggtttttaaccattgtcttgttctgtgatgaggggaggggggcacatgctgagtctcccaaggctgcgtctggaggggcccctgcttctccagcctggacccccagctttgcccaacaccagcccctgccccagcccaagtccaaatgtttacgggagcctcctgcccagtcccccaaccccagccgctcggaggccccaaaggaaaaagcacaagaagcgtgagacgccaccattcctggaaaccacagtcc

SEQ ID NO: 135 - protein, 355 aa, Homo sapiens
  ref <308>: DATABASE ACCESSION NUMBER: Refseq / NP_002061
  ref <309>: DATABASE ENTRY DATE: 2000-10-31
MGCTVSAEDKAAAERSKMIDKNLREDGEKAAREVKLLLLGAGESGKSTIVKQMKIIHEDGYSEEECRQYRAVVYSNTIQSIMAIVKAMGNLQIDFADPSRADDARQLFALSCTAEEQGVLPDDLSGVIRRLWADHGVQACFGRSREYQLNDSAAYYLNDLERIAQSDYIPTQQDVLRTRVKTTGIVETHFTFKDLHFKMFDVGGQRSERKKWIHCFEGVTAIIFCVALSAYDLVLAEDEEMNRMHESMKLFDSICNNKWFTDTSIILFLNKKDLFEEKITHSPLTICFPEYTGANKYDEAASYIQSKFEDLNKRKDTKEIYTHFTCATDTKNVQFVFDAVTDVIIKNNLKDCGLF

SEQ ID NO: 136 - DNA, 2068 bp, Rattus norvegicus; identical to SEQ ID NO: 42
  ref <308>: DATABASE ACCESSION NUMBER: Refseq / NM_017327
  ref <309>: DATABASE ENTRY DATE: 2003-01-14

SEQ ID NO: 137 - protein, 354 aa, Rattus norvegicus; identical to SEQ ID NO: 43
  ref <308>: DATABASE ACCESSION NUMBER: Refseq / NP_059023
  ref <309>: DATABASE ENTRY DATE: 2003-01-14

SEQ ID NO: 138 - DNA, 3636 bp, Rattus norvegicus
  ref <308>: DATABASE ACCESSION NUMBER: Refseq / NM_012504
  ref <309>: DATABASE ENTRY DATE: 2002-11-05
ggagcctcggcgggaggaggcggacacgtggcagcggcggcggcagcggcagcagcagcggcggcagcagcggcggcctcggtccggggcgccggccgtcctccctctttcctccggcggcagccctagttcccgcctctcggctcccccggctccactctcccagccgggagctgctctctcctctttctagtctccagccacaggacccggcgcggggcccgcagcgccgccaccatggggaagggggttggacgagacaagtatgagcccgcagctgtatcagaacatggggacaagaagagcaagaaggcgaagaaggaaagggacatggacgaactcaagaaggaagtgtctatggacgaccataaactcagcctggatgaactccatcgtaaatacggaacagatttgagccgaggcctaacacccgcaagggccgctgagatcctggctcgggatggccccaacgccctcacgccccctcccactactcccgagtgggtcaaattctgtcggcagctgttcggtggcttctccatgttactgtggattggagccattctttgtttcttggcttatggcatccgaagtgctacagaagaggaaccaccaaatgatgatctgtacctcggggtcgtgctgtctgctgtcgtcatcataactggctgtttctcctattatcaagaagcaaaaagctccaagatcatggaatccttcaagaacatggtccctcagcaagccctcgtgattcgaaatggagagaagatgagcatcaacgcagaggatgtcgtcgttggtgatctggtggaggtgaagggcggagaccgaatccctgctgatctcagaatcatatctgcaaatggctgcaaggtggataactcctcactcactggtgaatcagaaccccagactcggtccccggatttcacaaacgagaaccccttggagacaaggaacattgccttcttctcaaccaactgtgttgaaggaactgcacgtggcatcgttgtgtacactggggatcgcaccgtgatgggcaggatcgccacccttgcttctgggctggaaggcggccagacccccattgctgaagaaatcgagcacttcatccacctcatcacgggtgtggccgtgttcctgggggtgtctttcttcattctctctctgatccttgagtacacctggctcgaggctgtcatcttcctcattggtatcatcgtagccaacgtgccggaaggtttgctggccaccgtcacggtatgtctgacgctcactgccaagcgcatggcgaggaagaactgcctggtgaagaacctggaagctgtggagaccttggggtccacatccaccatctgctccgacaagactggaactctgactcagaaccggatgacagtggctcacatgtggtttgacaatcaaatccatgaagctgacaccacagagaatcagagtggggtctcctttgacaagacgtcagccacctggttcgctctgtccagaattgctggtctctgtaacagggcagtgtttcaggctaaccaagaaaacctgcctatccttaagcgtgcagtagcgggagatgcttccgagtcggcgctcttaaagtgcatcgaggtctgctgtggctccgtgatggagatgagggagaagtacaccaagatagtggagattcctttcaactccaccaacaagtaccagctctccattcacaagaacccaaacgcatcggagcctaagcacctgctagtgatgaagggcgccccagaaaggatcctggaccgatgcagttctatcctcctccacggcaaggagcagcccctggacgaagagctgaaggacgcctttcagaatgcctacctagagctggggggccttggagagcgtgtgctaggtttctgccacctccttctgcctgacgaacagtttcccgaaggcttccagtttgacactgatgaagtcaatttccccgtggataacctctgcttcgtgggtcttatctccatgattgaccctcctcgagctgctgtccccgatgctgtgggcaaatgccgcagcgctgggattaaggtcatcatggtcacaggagaccatccaatcacagccaaagccattgctaagggggtgggcattatctcagaaggtaacgagaccgtggaagacattgctgcccgcctcaacattccagtgaaccaggtgaaccccagagatgccaaggcctgtgtagtacatggcagtgacttgaaggacatgacctctgaggagctggatgacattttgcggtaccacacggagattgtctttgctaggacctctcctcaacagaagctcatcattgtggagggctgccagcggcagggtgccatcgtggctgtcacaggggatggtgtcaatgactctccagctttgaaaaaggcagatattggggttgccatggggattgttggctcggatgtgtccaagcaagctgctgacatgattcttctggatgacaactttgcctccatcgtgactggagtagaagaaggtcgtctgatatttgataacttgaagaaatccattgcttacaccctaacaagtaacattccggaaatcacccccttcttgatatttattattgcaaacattccactgcccctgggcaccgtgaccatcctctgcattgacttgggcactgacatggttcccgccatctctctggcctatgaacaggctgaaagtgacatcatgaagaggcagcccagaaatcccaaaacggacaaacttgtgaacgagcgtctgatcagcatggcctatggacagatcggtatgatccaggccctgggaggcttcttcacttattttgtgattctggctgagaacggtttcctgccctttcacctgttgggcatccgagagacctgggatgaccgctggatcaatgatgtggaggacagctacgggcagcagtggacctacgagcagaggaagattgtggagttcacctgccacacggccttctttgtcagtatcgtggtagtgcagtgggctgacttggtcatctgcaagaccagaaggaattctgtcttccagcagggaatgaagaacaagatcttaatatttggcctctttgaagagacagctcttgctgctttcctgtcctactgccctgggatgggtgcagcccttaggatgtatcccctcaaacctacttggtggttctgtgccttcccctactcccttctcatcttcgtgtatgacgaggtgcggaagctcatcatcaggcgacgccctggcggctgggtggagaaggaaacctactactagcccactgccctgcacgccgtggaacattgtgccacacactgcacctacccctaccccccctttgtgtacttcaagtcttggagctcggaactctaccctggtaggaaagcaccaaagcatgtggggatccagacgtcctggaatgaagcatgtagctgtaatggggggcggggggagggctgcccgaaaaacaccgtggacggggacgacagcggggaaggtttatatgtgcctttttgtttttgtaaaaaaggaaaacctggaaagactgaaagattacgttttatatctggatttttacaaataaagatggctattataacggaa

SEQ ID NO: 139 - protein, 1023 aa, Rattus norvegicus
  ref <308>: DATABASE ACCESSION NUMBER: Refseq / NP_036636
  ref <309>: DATABASE ENTRY DATE: 2002-11-05
MGKGVGRDKYEPAAVSEHGDKKSKKAKKERDMDELKKEVSMDDHKLSLDELHRKYGTDLSRGLTPARAAEILARDGPNALTPPPTTPEWVKFCRQLFGGFSMLLWIGAILCFLAYGIRSATEEEPPNDDLYLGVVLSAVVIITGCFSYYQEAKSSKIMESFKNMVPQQALVIRNGEKMSINAEDVVVGDLVEVKGGDRIPADLRIISANGCKVDNSSLTGESEPQTRSPDFTNENPLETRNIAFFSTNCVEGTARGIVVYTGDRTVMGRIATLASGLEGGQTPIAEEIEHFIHLITGVAVFLGVSFFILSLILEYTWLEAVIFLIGIIVANVPEGLLATVTVCLTLTAKRMARKNCLVKNLEAVETLGSTSTICSDKTGTLTQNRMTVAHMWFDNQIHEADTTENQSGVSFDKTSATWFALSRIAGLCNRAVFQANQENLPILKRAVAGDASESALLKCIEVCCGSVMEMREKYTKIVEIPFNSTNKYQLSIHKNPNASEPKHLLVMKGAPERILDRCSSILLHGKEQPLDEELKDAFQNAYLELGGLGERVLGFCHLLLPDEQFPEGFQFDTDEVNFPVDNLCFVGLISMIDPPRAAVPDAVGKCRSAGIKVIMVTGDHPITAKAIAKGVGIISEGNETVEDIAARLNIPVNQVNPRDAKACVVHGSDLKDMTSEELDDILRYHTEIVFARTSPQQKLIIVEGCQRQGAIVAVTGDGVNDSPALKKADIGVAMGIVGSDVSKQAADMILLDDNFASIVTGVEEGRLIFDNLKKSIAYTLTSNIPEITPFLIFIIANIPLPLGTVTILCIDLGTDMVPAISLAYEQAESDIMKRQPRNPKTDKLVNERLISMAYGQIGMIQALGGFFTYFVILAENGFLPFHLLGIRETWDDRWINDVEDSYGQQWTYEQRKIVEFTCHTAFFVSIVVVQWADLVICKTRRNSVFQQGMKNKILIFGLFEETALAAFLSYCPGMGAALRMYPLKPTWWFCAFPYSLLIFVYDEVRKLIIRRRPGGWVEKETYY

SEQ ID NO: 140 - DNA, 946 bp, Rattus norvegicus
  ref <308>: DATABASE ACCESSION NUMBER: EMBL / M35826
  ref <309>: DATABASE ENTRY DATE: 2000-03-04
attaatatcctaacactcctaatcccaatcttaattgccataggccttctcaccctagtagaacggaaaatcctaggctacatacaattacgcaaaggccccaacaacgaaggcccatatggtaaactacaaccatttgcagatgccataaaactattcataaaagaacccatacgccctctaaccacctcaatatcactatttattatcgccccaaccctctcccttacactagctctaagcctatgaattcccttaccaataccccacccccttatcaacctcaacctaggcataccatttattctagccacatccagcctttcggtctactccattctatgatcgggatgagcctcaaattcaaaatactccctattcggagccctacgagccgttgcccaaaccatctcttacgaagtcacaatagccttatacctcttatccgtcctcctaataagcggctccttctccctacaaatacttatcactacacaagaacatatctgactattaatccccgcctgaccaatagccataatatgatacatttcaaccctcgcagaaacaaatcgagctcccttcgacttaacagaaggagaatcagaattagtctcaggctttaacgtcgaatacgccgcaggaccattcgccctattcttcatagccgagtacaccaacattattctaataaacgccctaacatcaattgtattcctaggccccttatatcatatcaattaccctgaattatactcaaccagcttcataacagaaacactacttctatccacaactttcctatgaattcgagcatcctacccccgttttcgatatgaccaactaatgcacctcctatgaaaaaatttcctcccactaacactagcattctgcatatgatacatttccctgccaattttcctagcaggaattccaccctacacat

SEQ ID NO: 141 - DNA, 1617 bp, Rattus norvegicus
  ref <308>: DATABASE ACCESSION NUMBER: Refseq / NM_022298
  ref <309>: DATABASE ENTRY DATE: 2003-01-13
gcgctgtaagaagcaacacctcctcctcgcctccgccatccacccggcagccgcgaagcagcaaccatgcgtgagtgtatctccatccacgtcggccaggctggtgtccagatcggcaatgcctgctgggagctctactgcctggaacatggcatccagcctgatggccagatgccaagcgacaagaccattgggggaggagatgactccttcaacaccttcttcagtgagacaggagctggcaagcacgtgccccgggcggtgttcgtagacctggaacccacagttattgatgaagttcgcactggcacctaccgccagctcttccacccagagcagctcatcacaggcaaggaagatgctgccaataactatgcccgtggccactacaccattggcaaggagatcattgaccttgtcttggacagaattcgcaagctggctgaccagtgcacgggtctccagggcttcttggttttccacagctttggtgggggaactggctctgggttcacctccctgctgatggagaggctctctgtcgactacggaaagaagtccaagctggagttctccatttacccagccccccaggtttccactgctgtggttgagccctacaattccatcctcaccacccacaccaccctggagcactctgattgtgccttcatggtagacaatgaggccatctatgacatctgtcgtagaaacctcgacattgagcgcccaacctacactaacttaaacaggttgataggtcaaattgtgtcttccatcactgcttccctcagatttgatggggccctgaatgttgatctgacagaattccagaccaacctggtgccctaccctcgcatccacttccctctggccacttatgcccctgtcatctctgctgagaaagcctaccatgaacagctttctgtagcagagatcaccaatgcctgctttgagccagccaaccagatggtgaaatgtgaccctcgccatggtaaatacatggcttgctgcctgctgtaccgtggtgatgtggtccccaaagatgtcaatgctgccattgccaccatcaagaccaagcgtaccatccagtttgtggactggtgccccactggcttcaaggttggcattaattaccagcctcccactgtggtccctggtggcgacctggccaaggtccagagagctgtgtgtatgctgagcaacaccacagccattgctgaggcctgggctcgcctggatcacaagtttgatctgatgtatgccaagcgtgcctttgtgcactggtacgtgggtgagggcatggaggagggagagttctctgaggcccgtgaggacatggctgccctagagaaggattatgaggaggttggtgtggattctgtggagggtgagggtgaggaagaaggagaggaatactaaattaaatgtcacaaggtgctgctttcacagggatgtttattctggtccaacatagaaagttgtgggctgatcagttaatttgtatgtggcaatgtgtgctttcatacagttactgactttaagtgtgaatgatttgtcagagacccgagccgtccacttcactgatgggttttaaataaaatactccctgtctta

SEQ ID NO: 142 - protein, 451 aa, Rattus norvegicus
  ref <308>: DATABASE ACCESSION NUMBER: Refseq / NP_071634
  ref <309>: DATABASE ENTRY DATE: 2003-01-13
MRECISIHVGQAGVQIGNACWELYCLEHGIQPDGQMPSDKTIGGGDDSFNTFFSETGAGKHVPRAVFVDLEPTVIDEVRTGTYRQLFHPEQLITGKEDAANNYARGHYTIGKEIIDLVLDRIRKLADQCTGLQGFLVFHSFGGGTGSGFTSLLMERLSVDYGKKSKLEFSIYPAPQVSTAVVEPYNSILTTHTTLEHSDCAFMVDNEAIYDICRRNLDIERPTYTNLNRLIGQIVSSITASLRFDGALNVDLTEFQTNLVPYPRIHFPLATYAPVISAEKAYHEQLSVAEITNACFEPANQMVKCDPRHGKYMACCLLYRGDVVPKDVNAAIATIKTKRTIQFVDWCPTGFKVGINYQPPTVVPGGDLAKVQRAVCMLSNTTAIAEAWARLDHKFDLMYAKRAFVHWYVGEGMEEGEFSEAREDMAALEKDYEEVGVDSVEGEGEEEGEEY

SEQ ID NO: 143 - DNA, 478 bp, Rattus norvegicus
  ref <308>: DATABASE ACCESSION NUMBER: EMBL / AA893202
  ref <309>: DATABASE ENTRY DATE: 2000-03-03
agaagggaggggaatgtaaccggatggggatgcccagtggctttcattctccttcctttgaagaagcaatggcaaccccagctgtcattggtcctccccgtgtcccgaattgctgtaaatatataaatatgtcaggttaaagggaaaaggtttccagggctcttttctcccctctgcccccaaacctacctccatccctccccagaaccagtcagggcagcctctctgcctcggagggaggggctttcttctcccgggccccacttcctcctgggctcagtgtctagccagagccaggggaggagccacacagttaatgtttttctaaccttgctacttggagggaagggaaggttggggaaggacctgctttcagggacactgaccctgttccccttcctcctctccacgttatgggtgtggcaggagccaagcgggtggggtgggccaagtggctgcctttatttcctttcttctg

SEQ ID NO: 144 - DNA, 457 bp, Rattus norvegicus
  ref <308>: DATABASE ACCESSION NUMBER: EMBL / AA963449
  ref <309>: DATABASE ENTRY DATE: 2000-03-03
gagggggaacctcagttgaggaaatgctgtaaggatgcttagtggtcaatgagagagggcccagcccactgtggctggttccacccctaggctggtcatcctgggtcctaagaaagcaggctacatagcaagacttaacaccctccccaaaataaaaccttttttctctaaagtatgtgtactggctggtcttaggtgacaacctgacacacgctagggtcatcagagaaaagggaacctcagttgagttcccgtcctgactttctttgataatgaacagtagtatggaagtgtaagccaaataacccacccccaccctcccaacttgctttttgctcatggtgttttgtggcaatagaaaccctaactgttacagctgtaagaggcttttgaagactcttcaaatgaaggcccaaatctctgctgttaaaggtttcagattaaaattctctatgag

SEQ ID NO: 145 - DNA, 3019 bp, Rattus norvegicus
  ref <308>: DATABASE ACCESSION NUMBER: Refseq / NM_030990
  ref <309>: DATABASE ENTRY DATE: 2003-01-13
agagagaaaaagtaaaggacagaagaaggagactggagagaccaggatccttccagctgaacaaagtcagccgcaaaacagactagccagcaggctgcaattggagccagagtgccaaagacatgggtttgttagagtgctgtgctagatgtctggtaggggccccctttgcttccctggtggccactggattgtgtttctttggagtggcactgttctgtggatgtggacatgaagctctcactggtacagaaaagttaattgagacctatttctccaaaaactaccaggactatgagtatctcattaatgtgattcatgctttccagtatgtcatctatggaactgcctctttcttcttcctttatggggccctcctgctggccgagggcttctacaccaccggcgctgtcaggcagatctttggcgactacaagaccaccatctgcggcaagggcctgagcgcaacggtaacagggggccagaaggggaggggttccagaggccaacatcaagctcattctttggagcgggtgtgtcattgtttgggaaaatggctaggacatcccgacaagtttgtgggcatcacctatgccctgactgttgtatggctcctggtgtttgcctgctctgctgtgcctgtgtacatttacttcaatacctggaccacctgccagtctattgccttccctagcaagacctctgccagtataggcagtctctgcgctgatgccagaatgtatggtgttctcccatggaatgcttttcctggcaaggtttgtggctccaaccttctgtccatctgcaaaacagccgagttccaaatgaccttccacctgtttattgctgcatttgtgggtgctgcagccacactagtttccctgctcaccttcatgattgctgccacttacaactttgccgtccttaaactcatgggccgaggcaccaagttctgatctcccatagaaatccccctttgtctaatagcgaggctctaaccacacagcctatagtgttgtgtctcctgtcttaactctgcctttgccactgattggccctcttcttacttgatgagtataacaagaaaggagagtattgcagtgattaatctctctctgtggactctccctcttatgtacctctttcagtcattttgctccacagtgggctcctgctagaaatggggaatacctgagaaggtgattcccccgctgcaagtcgcagaggaatgaaagctctaattgagtttgcaagcatctcctgaaggccaggatgtgcttccttctcaaagggcacttccattgaggaaaacaaagtggaaagaaagattctcaggtagaaagcaggaatgtccttggtctccttgccatcagtaggagtcaaatatattctctttgatgcacaaaaccaagaactcactcttttcttcctagttccactgaagacagaaggaaataagcaatagcatttgcccaaatctgcctcctgcagctaggagaagggggtcaaagcaaggatctttcacccttagaaagagagctctgacgccagtggcaatggactatttaagccctaactcagccaaccttccttacagcattagggagcacagtgtctatttagacaaagtggggcctggaggaggggggcctcatctgtccttacagctcattaggaagagaaacagagtgttgtcaggatcgactcactcccttctccctgataacagctaccatgacaaccttgtggtttccaaggagctgagaatagaagggaactagcttatataaaataagactgtgacctaaggagcatcagttgggggatgctaaaggtgtaaattgagatgccctctggcagatgcaaaacacttaactctttggatagcatctccccccaccccatcagttgtgtcctcttggcctctggcacaatatcttcacaatggtgctcttttccttgggttttatccattcacttacagcaggtgattagaggattttgattagtttcagaatgactcctgtttcatatttcccagttgtttatctcttgtttggagctgtaccagaaagaactggagaatgattctttgagcttagttctttttcaaaagaaaaaagaaaaactggacagtaagcatcacaaaaatatttgaaattgtgtagtcccatgaaatgattgggattttccccaagtattctaccttttgtagaactaggcttggtaaatttgaacctccatttgaataacctgtccaatattttcttttctaataaatgacagatgattttgcttgctaatattatctcagcattttgaaagtttaggcttagcatagaggttattgtgtcttggtatatataggtcacataatagatttcagcaactgccagctgtttagttggtgagcttccagagagctctggagacatggtgaggacagacagaattggaaacctgaagaactcccagatttcaggcttatcctgtacttgttaactttgggtgaaagaaagaaaagcaaagaaagaaaggaaaagcctctgatctgtttttactgaaggaaaagttactgtagattttttttttttgtagatttgtgctgtcattccccaaagtgcttttgtcatgttgaaagagatataaggatttagaagaagatacttgagacttgttcttgggccagtatataaggtaaactagcaggatgcacagtagtgaggagagcttaaaggacctggaagaaaccaatcaagataaaggaaggtgaaataatctatatcttttatttggtttgattttaatatcataacagataaccaaccactccctgaaaacctcacacgtatatatacacacacgcatgcacatacaaagagagttaatcaactgcaagtgtttccttcatttctgatatagaattttgattttaacaacataaaggataaactcttagaaactcatcttacaaaatgtattttataaaattaaagaaaataaaattaagaatgttctc

SEQ ID NO: 146 - protein, 277 aa, Rattus norvegicus
  ref <308>: DATABASE ACCESSION NUMBER: Refseq / NP_112252
  ref <309>: DATABASE ENTRY DATE: 2003-01-13
MGLLECCARCLVGAPFASLVATGLCFFGVALFCGCGHEALTGTEKLIETYFSKNYQDYEYLINVIHAFQYVIYGTASFFFLYGALLLAEGFYTTGAVRQIFGDYKTTICGKGLSATVTGGQKGRGSRGQHQAHSLERVCHCLGKWLGHPDKFVGITYALTVVWLLVFACSAVPVYIYFNTWTTCQSIAFPSKTSASIGSLCADARMYGVLPWNAFPGKVCGSNLLSICKTAEFQMTFHLFIAAFVGAAATLVSLLTFMIAATYNFAVLKLMGRGTKF

SEQ ID NO: 147 - DNA, 2938 bp, Homo sapiens
  ref <308>: DATABASE ACCESSION NUMBER: Refseq / NM_000533
  ref <309>: DATABASE ENTRY DATE: 2002-11-05
gagagaaaaagtaaaagaccgaagaaggaggctggagagaccaggatccttccagctgaacaaagtcagccacaaagcagactagccagccggctacaattggagtcagagtcccaaagacatgggcttgttagagtgctgtgcaagatgtctggtaggggccccctttgcttccctggtggccactggattgtgtttctttggggtggcactgttctgtggctgtggacatgaagccctcactggcacagaaaagctaattgagacctatttctccaaaaactaccaagactatgagtatctcatcaatgtgatccatgccttccagtatgtcatctatggaactgcctctttcttcttcctttatggggccctcctgctggctgagggcttctacaccaccggcgcagtcaggcagatctttggcgactacaagaccaccatctgcggcaagggcctgagcgcaacggtaacagggggccagaaggggaggggttccagaggccaacatcaagctcattctttggagcgggtgtgtcattgtttgggaaaatggctaggacatcccgacaagtttgtgggcatcacctatgccctgaccgttgtgtggctcctggtgtttgcctgctctgctgtgcccgtgtacatttacttcaacacctggaccacctgcgactctattgccttccccagcaagacctctgccagtataggcagtctctgtgctgacgccagaatgtatggtgttctcccatggattgctttccctggcaaggtttgtggctccaaccttctgtccatctgcaaaacagctgagttccaaatgaccttccacctgtttattgctgcatttgtgggggctgcagctacactggtttccctgctcaccttcatgattgctgccacttacaactttgccgtccttaaactcatgggccgaggcaccaagttctgatcccccgtagaaatccccctttctctaatagcgaggctctaaccacacagcctacaatgctgcgtctcccatcttaactctttgcctttgccaccaactggccctcttcttacttgatgagtgtaacaagaaaggagagtcttgcagtgattaagtctctctttggactctcccctcttatgtacctcttttagtcattttgcttcatagctggttcctgctagaaatgggaaatgcctaagaagatgacttcccaactgcaagtcacaaaggaatggaggctctaattgaattttcaagcatctcctgaggatcagaaagtaatttcttctcaaagggtacttccactgatggaaacaaagtggaaggaaagatgctcaggtacagagaaggaatgtctttggtcctctcgccatctataggggccaaatatattctctttggtgtacaaaatgaattcattctggtctctctattaccactgaagatagaagaaaaaagaatgtcagaaaaacaataagagcgtttgcccaaatctgcctattgcagctgggagaagggggtcaaagcaaggatctttcacccacagaaagagagcactgaccccgatggcgatggactactgaagccctaactcagccaaccttacttacagcataagggagcgtagaatctgtgtagacgaagggggcatctggccttacacctcgttagggaagagaaacagggtgttgtcagcatcttctcactcccttctccttgataacagctaccatgacaaccctgtggtttccaaggagctgagaatagaaggaaactagcttacatgagaacagactggcctgaggagcagcagttgctggtggctaatggtgtaacctgagatgccctctggtagacacaggatagataactctttggatagcatgtctttttttctgttaattagttgtgtactctggcctctgtcatatcttcacaatggtgctcatttcatggggtattatccattcagtcatcgtaggtgatttgaaggtcttgatttgttttagaatgatgcacatttcatgtattcccagtttgtttattacttatttgggttgcatcagaaatgtctggagaataattctttgattatgactgttttttaaactaggaaaattggacattaagcatcacaaatgatattaaaaattggctagttgaatctattgggattttctacaagtattctgcctttgcagaaacagatttggtgaatttgaatctcaatttgagtaatctgatcgttctctctagctaatgggaaaatgattttacttagcaatgttatcttggtgtgttaagagttaggtttaacataaaggttattttctcctgatatagatcacataacagaatgcaccagtcatcaggctattcagttggtaagcttccaggaaaaaggacaggcagaaacgagtttgagacctgaatagctcccagatttcagtcttttcctgtttttgttaactttgggttaaaaaaaaaaaaaagtctgattggttttaattgaaggaaagatttgtactacagttcttctgttgtaaagagttgtgttgttcttttcccccaaagtggtttcagcaatatttaaggagatgtaagaggctttacaaaaaaacacttgatacttgttttcaaaccagtatacaagataagcttccaggctgcatagaaggaggagagggaaaatgttttgtaagaaaccaatcaagataaaggacagtgaagtaatccgtaccttgtgttttgttttgatttaataacataacaaataaccaacccttccctgaaaacctcacatgcatacatacacatatatacacacacaaagagagttaatcaactgaaagtgtttccttcatttctgatatagaattgcaattttaacacacataaaggataaacttttagaaacttatcttacaaagtgtattttat

SEQ ID NO: 148 - protein, 277 aa, Homo sapiens
  ref <308>: DATABASE ACCESSION NUMBER: Refseq / NP_000524
  ref <309>: DATABASE ENTRY DATE: 2002-11-05
MGLLECCARCLVGAPFASLVATGLCFFGVALFCGCGHEALTGTEKLIETYFSKNYQDYEYLINVIHAFQYVIYGTASFFFLYGALLLAEGFYTTGAVRQIFGDYKTTICGKGLSATVTGGQKGRGSRGQHQAHSLERVCHCLGKWLGHPDKFVGITYALTVVWLLVFACSAVPVYIYFNTWTTCDSIAFPSKTSASIGSLCADARMYGVLPWIAFPGKVCGSNLLSICKTAEFQMTFHLFIAAFVGAAATLVSLLTFMIAATYNFAVLKLMGRGTKF

SEQ ID NO: 149 - DNA, 404 bp, Rattus norvegicus
  ref <308>: DATABASE ACCESSION NUMBER: Refseq / NM_139099
  ref <309>: DATABASE ENTRY DATE: 2002-05-16
ggaattccggggctcaggctactctgaagcgacccagcgttctgcctgacacgccccgctcgagacaccatggtggcgtactggcgacaggctggactcagctacatccggttctcccagatctgtgcaaaagcagtgagggatgccctgaagactgagttcaaagcgaacgctgagaagacttcgggcaccagcataaaaacagtgaaaataaagaaggagtagccgagcctgactgaagcctgacgtgcggagtcttccaggtgaagcatgtgggcacctgttccggcagatggaggtcagccgtacctcctggagacagacacccatcttgttgatgaattgactatgccaataaattaacacggttcactctcggcaaaaaaaaaaaaaaaaaaaaaaaa

SEQ ID NO: 150 - protein, 51 aa, Rattus norvegicus
  ref <308>: DATABASE ACCESSION NUMBER: Refseq / NP_620799
  ref <309>: DATABASE ENTRY DATE: 2002-05-16
MVAYWRQAGLSYIRFSQICAKAVRDALKTEFKANAEKTSGTSIKTVKIKKE

SEQ ID NO: 151 - DNA, 363 bp, Homo sapiens
  ref <308>: DATABASE ACCESSION NUMBER: EMBL / BM695007
  ref <309>: DATABASE ENTRY DATE: 2002-03-06
ggttctgcctgacacgccccgctcgagacaccatggtggcgtactggcgacaggctggactcagctacatccggttctcccagatctgtgcaaaagcagtgagggatgccctgaagactgagttcaaagcgaacgctgagaagacttcgggcaccagcataaaaacagtgaaaataaagaaggagtagccgagcctgactgaagcctgacgtgcggagtcttccaggtgaagcatgtgggcacctgttccggcagatggaggtcagccgtacctcctggagacagacacccatcttgttgatgaattgactatgccaataaattaacacggttcactctcggcaaaaaaaaaaaaaaaaagac

SEQ ID NO: 152 - DNA, 1925 bp, Rattus norvegicus
  ref <308>: DATABASE ACCESSION NUMBER: EMBL / S87522
  ref <309>: DATABASE ENTRY DATE: 2000-03-04
catgcccgaggtcgaggatacttgttccttggcttctccagcctcggtctgccgaacccagcacctccatcttcgctgcagcgtcgacttcgctcgccgggcactgaccgggaccgccgcgctcacggtccagtcacaggaggataatctgcgcacgctgactttggatacaaaagaccttacgatagaaaaagtggtgatcaacggacaagaagtcaaatacactcttggagaaagccagggttacaaaggatcgccgatggaaatctcccttcccatcgctctgagcaaaaatcaagaggtcgttatagagatttccttcgagacgtctcccaagtcctcggcccttcagtggctcactcccgagcagacttcaggaaagcagcatccatacctcttcagtcagtgggaggccatccactgcagggcaatcctcccttgccaagacacttctgtgaagttaacctacaccgcagaggtatctgtccccaaagaactggtggctctcatgagtgccatccgtgatggagaagcccctgacccagaagaccccagcaggaagatatacagatttaaccagagggttcccataccgtgctacctgattgctttagtcgttggcgctttagaaagcaggcaaattggcccaagaactctggtgtggtctgagaaagagcaggtggagaagtctgcttatgaattctctgagactgaatccatgcttaaaattgcagaagatctggggggaccctatgtttggggacagtacgacctgttggtcctgcccccatccttcccgtacggaggcatggagaatccttgtctcacattcgtaacgcctactctattggcaggtgacaagtcactctctaatgttattgcacacgaaatatcgcatagctggacagggaacctagtgactaacaagacttgggatcacttctggttaaacgaaggacataccgtctatttagagcgccacatttgtgggcggttgtttggggaaaaattcagacatttccacgctttaggaggatggggagagctacagaacacgataaagactttcggggagtcccatcccttcaccaagctcgtggtcgatctgaaggacgtagaccccgatgtggcctactcctccattccctacgagaagggcttcgccttgctcttctacctggaacaacttcttgggggaccggaggtgttcctaggattcttaaaggcttatgtggagaagttttcctaccagagcgtaaccactgatgactggaagagtttcctgtatgctcactttaaagataaggtggatcttctcaatcaagttgattggaatgcctggctctatgctcctggcctgcctcctgtcaaacccaattacgatgtgactctcacgaatgcctgcatcgccttaagtcaaagatgggtcactgccaaagaggaagatttaaattcattcagcatcgaagacctgaaggacctctcgtcccatcagctgaatgagttcctggcacaggtgcttcagagggcacctcttcccttggggcacataaagcgaatgcaagaggtgtacaacttcaatgccattaacaattctgaaatacgattcagatggttacggctctgcattcaatcgaagtgggaagaagcaattcctttggccctaaagatggcaactgaacaaggaaggatgaaatttacacgacctctattcaaggacctcgctgccttcgacaaatcccacgatcaagctgtccgcacctaccaggaacataaagcctgtatgcatcccgtgaccgccatgctggtggggaaagatctgaaagtggattaaggaactgagtgttgctgatttcagaaaattcctttttttaagaaaaaaaatcgaacctattaagaaatacaaaattttagctctcgttgta

SEQ ID NO: 153 - DNA, 3070 bp, Rattus norvegicus
  ref <308>: DATABASE ACCESSION NUMBER: Refseq / NM_017029
  ref <309>: DATABASE ENTRY DATE: 2003-01-14
cggacgcgtgggcagccacacaccccaaggcctccaagatgagctacacgctggactcgctgggcaacccgtccgcctaccggcgcgtcaccgagaccccgtccagcttcagtcgtgtgagcggttccccgtccagcggcttccgctcgcagtcctggtcccgcggctcgcccagcaccgtgtcctcctcctacaagcgcagcgcgctcgccccgcgcctcgcctacagctcggctatgctcagctcggccgagagcagcctcgacttcagccagtcctcttcgctgcttaacggcggctccggcggcgactacaagctgtcccgctcaaacgagaaagagcagctgcaggggctgaacgaccgtttcgccggctacatcgagaaagtgcactacttggaacaacagaacaaggagatcgaggcagagatccacgcgctgcggcagaagcaggcctcgcacgcccagctgggtgacgcttacgaccaggagatccgagagctgcgcgccaccctggagatggtgaatcacgagaaggctcaagtgcagctggactctgatcacttggaggaagacatccaccggctcaaggagcgcttcgaggaggaggcgcggctgcgggacgacaccgaggctgccatccgggcgctgcgcaaagacatagaggagtcgtcgatggttaaggtggagctggacaagaaggtgcagtcgctgcaggatgaggtggccttcctgcggagcaatcacgaagaggaggtggccgacctgctggcccagatccaggcgtcgcacatcaccgtagagcgcaaagactacctgaagacagacatctccacggcgctgaaagagatccgctcccagctcgagtgtcactccgaccagaacatgcaccaggccgaagagtggttcaaatgccgctacgccaagctcaccgaggcggccgagcagaacaaggaggccatccgctccgctaaagaagagatcgccgagtaccggcgccagctgcagtccaagagcattgagctcgagtcggtgcgaggcactaaggagtccctggaacggcagctcagcgacatcgaggagcgccacaaccacgacctcagcagctaccaggacaccatccagcagctggaaaatgagcttcggggaacaaagtgggaaatggctcgtcatttgcgagaataccaggatctccttaacgtcaagatggctctggacatcgagatcgccgcatataggaaactactggagggtgaagagaccagatttagcacattttcaggaagcatcactgggcctctgtacacacaccgacagccctcagtcacaatatccagtaagattcagaagaccaaagtcgaggcccccaagctcaaggtccaacacaaatttgtggaggagatcattgaggagactaaagtggaagatgagaagtcagaaatggaagacgccctcacagtcattgcagaggaattggcagcctctgccaaagaggagaaagaagaggcagaagaaaaggaagaggaaccggaagttgaaaagtctcccgtgaagtctcctgaggctaaggaagaggaggaaggggaaaaggaggaagaagaggaaggccaagaggaagaagaggaggaagatgaaggtgtcaagtcagaccaggcagaagagggaggatctgagaaggaaggctcgagtgaaaaggatgaaggtgagcaagaagaagaaggggaaactgaggcagaaggtgaaggagaggaagcagaagctaaggaggaaaagaaaacagagggaaaggtcgaggaaatggctatcaaggaggaaatcaaggtcgagaagcccgagaaagccaagtcccctgtgccaaaatcacccgtggaagaagtaaagccaaaaccagaagccaaagccggaaaggatgagcagaaggaggaagagaaagttgaggagaagaaggaggtagccaaggaatcacccaaggaagagaaggtggagaaaaaggaggagaagccaaaagatgtcccagataaaaagaaggctgagtccccagtgaaagaaaaggccgtagaggaaatgatcaccattactaagtcggtaaaggtgagcctggagaaagacaccaaagaggagaagcctcagcagcaggagaaggtgaaggagaaggcagaggaggaggggggtagtgaggaggaagtgggtgacaaaagcccgcaagaatccaagaaggaagacatagctatcaatggggaggtggaaggaaaagaggaggaggagcaggaaactcaggagaagggcagtgggcaagaggaggagaaaggggtggtcactaatggcttagatgtgagccctgcggaggaaaagaaaggggaggatagaagtgatgacaaagtggtggtgaccaagaaggtagaaaaaatcaccagcgagggaggcgatggtgctaccaaatacatcaccaaatctgttactgtcactcaaaaggttgaagagcatgaggagacctttgaggagaagctggtgtcaactaaaaaggtagaaaaggtcacttcacatgccatagtcaaggaagtcacccagggtgactaagatcggagtccattgcaaaaggttaagccatacaacaatttcaaaatgcatgtgattgacagcttcaaaacagaatgggttctcccatgagggctccagacattgtattttcctttgtgcaatatgagggaactgcatgcaagctcagggtgcccccctcctcagtccttgggggaattcaaatgcatgttcatgtatgtacctagggaatttgccagtttcctaagctgttgaaagaggggcactcggggggatgtcttgagatgtattacgcaaagtaccaactgagccaaaaataataagtgaaacagaactctcttagccttaagaaagctatatatgaatacttatgtttacctcactggtgcatttaaaatggacttcagttcatgggagaaccttgctgacctgcacagttcgcaaccttatgttgattgatgttaaatgtcacagcagttcttgctcaataaaggtcatactggaaccataaaaaa

SEQ ID NO: 154 - protein, 845 aa, Rattus norvegicus
  ref <308>: DATABASE ACCESSION NUMBER: Refseq / NP_058725
  ref <309>: DATABASE ENTRY DATE: 2003-01-14
MSYTLDSLGNPSAYRRVTETPSSFSRVSGSPSSGFRSQSWSRGSPSTVSSSYKRSALAPRLAYSSAMLSSAESSLDFSQSSSLLNGGSGGDYKLSRSNEKEQLQGLNDRFAGYIEKVHYLEQQNKEIEAEIHALRQKQASHAQLGDAYDQEIRELRATLEMVNHEKAQVQLDSDHLEEDIHRLKERFEEEARLRDDTEAAIRALRKDIEESSMVKVELDKKVQSLQDEVAFLRSNHEEEVADLLAQIQASHITVERKDYLKTDISTALKEIRSQLECHSDQNMHQAEEWFKCRYAKLTEAAEQNKEAIRSAKEEIAEYRRQLQSKSIELESVRGTKESLERQLSDIEERHNHDLSSYQDTIQQLENELRGTKWEMARHLREYQDLLNVKMALDIEIAAYRKLLEGEETRFSTFSGSITGPLYTHRQPSVTISSKIQKTKVEAPKLKVQHKFVEEIIEETKVEDEKSEMEDALTVIAEELAASAKEEKEEAEEKEEEPEVEKSPVKSPEAKEEEEGEKEEEEEGQEEEEEEDEGVKSDQAEEGGSEKEGSSEKDEGEQEEEGETEAEGEGEEAEAKEEKKTEGKVEEMAIKEEIKVEKPEKAKSPVPKSPVEEVKPKPEAKAGKDEQKEEEKVEEKKEVAKESPKEEKVEKKEEKPKDVPDKKKAESPVKEKAVEEMITITKSVKVSLEKDTKEEKPQQQEKVKEKAEEEGGSEEEVGDKSPQESKKEDIAINGEVEGKEEEEQETQEKGSGQEEEKGVVTNGLDVSPAEEKKGEDRSDDKVVVTKKVEKITSEGGDGATKYITKSVTVTQKVEEHEETFEEKLVSTKKVEKVTSHAIVKEVTQGD

SEQ ID NO: 155 - DNA, 1065 bp, Rattus norvegicus
  ref <308>: DATABASE ACCESSION NUMBER: EMBL / Z12298
  ref <309>: DATABASE ENTRY DATE: 1997-02-17
atgaaggcaactctcgtcttattccttctggcgcaagtctcttgggctggaccatttgagcagagaggattatttgacttcatgctagaagatgaggcctctggcataatcccttacgaccctgacaatcccctgatatctatgtgcccctaccgatgccaatgccatctccgagtggtgcagtgttctgatctgggtctggacaaagtaccctgggagtttccacctgacacaacattgctagacctgcaaaacaacaaaataacagagatcaaagagggggcctttaagaacctgaaggacttgcataccttgatccttgtcaacaacaagatcagcaagatcagcccagaggcatttaaacctctagtgaagttggaaaggctttatctgtctaagaaccacctaaaggagctgcccgaaaaattgcccaaaacactccaggagcttcgactccacgacaatgagatcaccaaactgaagaaatctgtgttcaatggactgaaccgtatgattgtcatagaactgggcggcaacccactgaaaaactctgggattgaaaatggagccttgcagggaatgaagggtctcggatacatccgcatctcagacaccaacataactgctattcctcaaggtctgcccacttctatcagtgaactgcatctggatggcaacaagatcgccaaagttgatgcagccagcctgaaaggaatgtctaatttgtctaagctgggtttgagcttcaatagcatcaccgttgtggaaaatggcagtctggctaatgttcctcatctgagggagctccacttggacaacaacaaactcctcagagtgcctgctgggctggcacagcataaatatgtccaggtcgtctaccttcataacaacaacatctccgaagttgggcagcatgacttctgcctcccttcataccagactaggaagacttcctacactgccgtgagtctttatagcaaccctgtccggtattggcaaattcacccacacaccttcagatgtgtcttcgggcgctctaccattcaacttgggaactacaagtaa

SEQ ID NO: 156 - DNA, 1874 bp, Rattus norvegicus
  ref <308>: DATABASE ACCESSION NUMBER: Refseq / NM_134346
  ref <309>: DATABASE ENTRY DATE: 2003-01-13
gccggccgccccgaagactgccggcgacggcgacggggtactgacagcgcgagaggtactaagtgtaacaagtgtgcatcatgcgtgaatataagctagtcgttcttggctcaggaggtgttgggaagtcggctctgactgtacagtttgttcaaggaatttttgttgaaaaatatgatcctacgatagaagattcttatagaaagcaagttgaagtagatgcacagcagtgtatgcttgaaatcctggatgctgcaggaacggagcagtttacagccatgagagatctgtacatgaagaacgaacaaggctttgcgttggtttactccatcacaacgcaaatcgactgtaatgacttacaaggtctgagagagcagattcttcgggttaaagacactgacgatgtcccaatgattctggttggtaacaaatgcgacctggaagacgaaagagttgtccccaaggaacaaggtcagaacctggcaagacagtggagcaactgcgctttcttagagtcctccgccaagtccaagataaatgttaacgagatcttttatgacctagtgcggcaaattaacagaaaaaccccagtgcctgggaaccgtcgcaaaaagtcaccatgtcagctgctttaatgtactgaatgcattgtagctctgagccaggtctgaagaactgttgcccaattcagcagtgccagcattccaactttgttaaacctaccaacatcttaaatggactttcccgtggtggtaccctgtaagaggcggacgaaagctactctatcagtttgcacattctaatcactttccagtatcacgagaggtttgacttatatgatagttctagagtatcgagctggtaaaaccagaggctacatccagtattactgctaagagacattcttcatccaccaatgttgtacatgtatgaaaatggtgtactgtatactttaacacacccatactttgtattggagagtacaataatgtaaatcctaaaagcaccactattttagcataataaaagaaagtccaaagagctcctatatagactactccagataactttgcttctttgatacttgtagcttactgtaattttttttaaattcaaggtcattatcattgtattatacaaaataagcgctttgattaacacagctatatagtttttttaatttttcaaaaacctgtggagacagtgatcttgtctttaaaatatgatagtcctttcagtataatgtcttagattaaagacgttgcctttaatatctgttgggaaggaaatgtccagactttcaaatctccttattattatgtttccttttatcgtttacatagggaacaatgtttatagttgtgtgtacagtgggggtctacaacaagaagtgtatattttcaaacagttttttaatgatttaacaactttgtaaatcattttcaggcttctgcagctgtagattctcactgtgcctcccttgcttgctcgtgcacacgtgtgtctgcaataccaaatacacaggtttagtatcttcgcctgttagtgactgtttccatgtgtaacgttttggttgagatgttaaatggtgacgagtactgtgatgtgaatgtggttgtaatttaatcatgtgtaattggtcacaaggctaatctgcagtaactcttgctgttctatttaacaatgccttgttgccgtttgtatcgattaacgtttgggtgtaaacattgtgtgtccatccaacagggagccacagtatttaaattgaccaacctgatgttgaggtggccaaatgtaaactaaaagccttaattaaagaggagcaattttgtataacttagcatccgtgttcaataaatttggattgccgtgca

SEQ ID NO: 157 - protein, 184 aa, Rattus norvegicus
  ref <308>: DATABASE ACCESSION NUMBER: Refseq / NP_599173
  ref <309>: DATABASE ENTRY DATE: 2003-01-13
MREYKLVVLGSGGVGKSALTVQFVQGIFVEKYDPTIEDSYRKQVEVDAQQCMLEILDAAGTEQFTAMRDLYMKNEQGFALVYSITTQIDCNDLQGLREQILRVKDTDDVPMILVGNKCDLEDERVVPKEQGQNLARQWSNCAFLESSAKSKINVNEIFYDLVRQINRKTPVPGNRRKKSPCQLL

SEQ ID NO: 158 - DNA, 1194 bp, Rattus norvegicus
  ref <308>: DATABASE ACCESSION NUMBER: EMBL / A03913
  ref <309>: DATABASE ENTRY DATE: 1993-05-24
atgaattggcattttcccttcttcatcttgaccacagtgactttatcctctgtgtactcccagctcaactctctgtcactcgaggaactaggctctgacacagggatccaggttttcaatcagatcatcaaatcacagcctcatgagaacgttgtcatttctccgcacgggattgcgtccatcttgggcatgctgcagctgggggctgacggcaggacgaagaagcagctctcaacggtgatgcgatacaatgtgaacggagtcggaaaagtgctgaagaagatcaacaaggctatagtctccaaaaagaataaagacatagtgaccgtggccaatgctgtgtttgtcaggaatggctttaaagtggaagtgccttttgcagcaaggaacaaagaggtgtttcagtgtgaagtacagagtgtgaacttccaggacccggcctctgcttgtgatgccatcaatttttgggtcaaaaatgagacgaggggcatgattgacaacctactttccccaaatctgatcgatagtgtccttaccaaactggtcctcgttaacgcagtgtatttcaagggtttgtggaaatcccggtttcaacctgagaacacgaagaaacggaccttcgtggcaggtgatggaaaatcctaccaagtacccatgctagcccagctctccgtgttccgctctgggtctaccaaaaccccaaatggcttatggtacaacttcattgagctaccctaccatggtgagagcatcagcatgttgatcgccctgccaacagagagctccaccccactgtccgccatcatccctcacatcagtaccaagaccatcaatagctggatgaacaccatggtacccaagaggatgcagctggtcctgcccaagttcacagctctggcacaaacagatctgaaggagccactgaaagcccttggcattactgagatctttgaaccgtcaaaggcaaattttgcaaaaataacaaggtcagagagccttcacgtctctcacatcttgcagaaagcaaaaattgaagtcagcgaagatgggaccaaagccgcagtagtgacaactgcaatcctaattgcaaggtcatcgcctccctggtttatagtagacaggcctttcctgttctgcatccgacacaatcccacaggtgccatcttgttcctggggcaggtgaacaagccctga

SEQ ID NO: 159 - protein, 398 aa, Rattus norvegicus
  misc_feature (1)..(398): Xaa=Unknown amino acid
MNWHFPFFILTTVTLSSVYSQLNSLSLEELGSDTGIQVFNQIIKSQPHENVVISPHGIASILGMLQLGADGRTKKQLSTVMRYNVNGVGKVLKKINKAIVSKKNKDIVTVANAVFVRNGFKVEVPFAARNKEVFQCEVQSVNFQDPASACDAINFWVKNETRGMIDNLLSPNLIDSVLTKLVLVNAVYFKGLWKSRFQPENTKKRTFVAGDGKSYQVPMLAQLSVFRSGSTKTPNGLWYNFIELPYHGESISMLIALPTESSTPLSAIIPHISTKTINSWMNTMVPKRMQLVLPKFTALAQTDLKEPLKALGITEIFEPSKANFAKITRSESLHVSHILQKAKIEVSEDGTKAAVVTTAILIARSSPPWFIVDRPFLFCIRHNPTGAILFLGQVNKPX

SEQ ID NO: 160 - DNA, 3754 bp, Rattus norvegicus
  ref <308>: DATABASE ACCESSION NUMBER: EMBL / X65036
  ref <309>: DATABASE ENTRY DATE: 1992-05-13
ttcaacctggatgtgatgggtgccatacgcaaggagggagaacctggcagcttattcggcttttcggtggccctacaccgacaattacagccccgaccccagagctggctgctggtgggtgccccccaggccctggactcttacccggacagcaggcaaatcgcacatgggaggcctctttgcttgtccctgagcctagaggagacagactgctacagagtggacatcgacaggggagctaatgtgcagaaggaaagcaaggagaaccagtggctgggagtcagcgtgcgaccgagggagtccgggggcaaggttgttacctgtgcacaccgatatgagtctcgacaggaagtggaccaggttttggagactcgagatgtgattggtcgttgctttgtgctgagccaggacctggccatccgtgatgagttggatggtggggagtggaagttctgtgaagggcgcccccagggccacgaacaatttgggttctgccagcagggcacagctgccaccttctcccccgacagccactacctcatttttggggctccaggaacctataactggaagggcacagccagggtggagctctgtgcgcagggctcgtcggacctggcacaggtggatgatgggccctacgaggcggggggcgagaaggaccaagacccccgtccttcaccggtccctgccaacagctaccttggtttctccattgattctgggaagggtctcatgcgctcagaagagctgagttttgtggcaggggccccacgtgccaaccacaaaggggctgtggtcattctgcgcaaggatagtgccagccgcctgattcctgaggttgtgctgtctggggagcgcctgacctctggctttggctactccctggctgtgactgacctcaacagtgatggctgggcagacctgattgtgggtgctccctacttctttgaacgccaagaagaacttggaggagccgtgtatgtgtacatgaaccagggtggccattgggcagatatctctcctctccgactctgtggctcccctcactccatgtttgggatcagtttggctgtactgggggacctcaatcaagatggcttcccagacattgctgtaggagctccctttgatggagatgggaaagtctttatctatcatgggagcagcctgggggtggtcaccaaaccttcacaggtgctggagggtgaggctgtgggtatcaagagctttggttactccctgtctggtggcctggatgtggacggaaatcactacccggacctgcttgtgggctccctggctgatactgctgctctgttcagggccagacctgttctacatgtctcccaagaaatcttcattgatccaagagccatcgatctggaacagcccaactgtgccgacggacgcttggtctgcgtgcacgtaaaggtctgtttcagttatgttgctgtgcccagcagctacagccctattgtggtcctagattatgtgttagatggggacacagaccggaggctccggggccaggctccacgtgtgactttcccgggccgaggcccggatgatctcaagcatcagtcctcgggcaccgtgtcgttgaagcaccaacatgacagagtctgtggagacacatgtgttccagctgcaggaaaacgtaaagacaagctacgggccattgtggtgaccctgtcatatggtctccaaacccctcgattaaggaggcaagcgcctgaccaggggctcccccttgtggctgggatcctcaacgctcaccagcccagtacacagaggactgagatccacttcctgaagcaaggctgtggtgacgataagatctgtcagagcaacctccagcttgtgcaggcccagttctgttcccggatcagcgacacagagttccaggctctgcccatggatctggatgggaccgccctgtttgcgcatggcgggcagccattcataggcctggagctgacagtcaccaacctgccctctgacccagcccggcctcaggcagatggggatgatgctcatgaagcccagctcctggccaccctcccagcctctcttcgatactcgggagtccgcactctggactctgtggagaagccgctctgcctgtccaacgagaatgcctctcatgtcgagtgtgagctcgggaaccctatgaagagaggcactcaggtcaccttttacctcatcctcagcacctctggaatcaccattgagaccacagagctgaaggtggaattgctcttagccacgatcagtgagcaggacctgcatccggtctccgttcgggctcatgtcttcattgaattgccgctgtccatttcaggggtggccactcctcagcaactcttcttctctggcaaggtgaagggggagagcgccatgcggtctgagtgggacgagggcagcaaggtcaagtacgaggtcacggtctccaatcaaggccagtcactcaatactctgggctctgccttcctcaacatcatgtggccccatgagatcgccaatgggaaatggctgttgtaccccatgcgggtggagctggagggtggacaggggcctgagaagaaagggatctgctccccaagacccaacatcctccacctggatgtggacagcagggataggaggcggcgagagctggggcagccggagcctcaggagcctccagagaaggtggaacctagcacatcttggtggccagtgtcctccgctgagaagagaaacgtgactctggactgcccaggcacggccaagtgtgtggtattcagctgcccactctacagctttgaccgtgcagccgtgcttcatgtctggggccgcctctggaacagcacctttctggaggagtacatgtccgtgaagtccctggaggtgatcgtccgagccaacatcacagtgaaatcctccattaagaacttgctgctcagagatgcatccacagtgatcccagtgatggtatacttggacccggtggctgtggttgcagaaggagtcccctggtgggtcatcctcctggcggtgctggctgggctgctagtactggccctgctggtgctgctgctgtggaagctgggattcttcaagcgggcgaagcaccctgaggccactgtaccccagtaccacgcagtgaagatccttcgggaagaccggcagcagttcaaggaggagaagacaggcaccattcagaggagtaactggggcaattcccagtgggagggctccgacgcacaccctatcctggctgccgactggcaccctgagttgggtcctgatggacatcctgtgtcagtcactgcctaacttctcctgtcccaagccagcctctgggttccttccaccctttcccaagatggctctttgggggtggagatagtggagtaggttgctggcttcatgttgaaataaggcaggttctgctttctcaggggcacagatctttcccaccgtgagaaccaccccttcccatcttctccgtacaatgctgtgagacacggggcatggctggaaggacaggcatgacctggtgcaggatggagaagaaggggtactgagctgcctctctcacccaccctgtaagaccgtcttccccaaagtgccttagacagagggtcagggaagagatcgtgtcactgtctcaggggcccttccctcctaagtctttcctgtgctctggccttagtgtgctgtaccagcccagcggatcttgtctatttattaaaaagtatttgacaat

SEQ ID NO: 161 - DNA, 4079 bp, Homo sapiens
  ref <308>: DATABASE ACCESSION NUMBER: Refseq / NM_002206
  ref <309>: DATABASE ENTRY DATE: 2000-10-31
ggagcggcgggcgggcgggagggctggcggggcgaacgtctgggagacgtctgaaagaccaacgagactttggagaccagagacgcgcctggggggacctggggcttggggcgtgcgagatttcccttgcattcgctgggagctcgcgcagggatcgtcccatggccggggctcggagccgcgacccttggggggcctccgggatttgctacctttttggctccctgctcgtcgaactgctcttctcacgggctgtcgccttcaatctggacgtgatgggtgccttgcgcaaggagggcgagccaggcagcctcttcggcttctctgtggccctgcaccggcagttgcagccccgaccccagagctggctgctggtgggtgctccccaggccctggctcttcctgggcagcaggcgaatcgcactggaggcctcttcgcttgcccgttgagcctggaggagactgactgctacagagtggacatcgaccagggagctgatatgcaaaaggaaagcaaggagaaccagtggttgggagtcagtgttcggagccaggggcctgggggcaagattgttacctgtgcacaccgatatgaggcaaggcagcgagtggaccagatcctggagacgcgggatatgattggtcgctgctttgtgctcagccaggacctggccatccgggatgagttggatggtggggaatggaagttctgtgagggacgcccccaaggccatgaacaatttgggttctgccagcagggcacagctgccgccttctcccctgatagccactacctcctctttggggccccaggaacctataattggaaggggttgctttttgtgaccaacattgatagctcagaccccgaccagctggtgtataaaactttggaccctgctgaccggctcccaggaccagccggagacttggccctcaatagctacttaggcttctctattgactcggggaaaggtctggtgcgtgcagaagagctgagctttgtggctggagccccccgcgccaaccacaagggtgctgtggttatcctgcgcaaggacagcgccagtcgcctggtgcccgaggttatgctgtctggggagcgcctgacctccggctttggctactcactggctgtggctgacctcaacagtgatggctggccagacctgatagtgggtgccccctacttctttgagcgccaagaagagctggggggtgctgtgtatgtgtacttgaaccaggggggtcactgggctgggatctcccctctccggctctgcggctcccctgactccatgttcgggatcagcctggctgtcctgggggacctcaaccaagatggctttccagatattgcagtgggtgccccctttgatggtgatgggaaagtcttcatctaccatgggagcagcctgggggttgtcgccaaaccttcacaggtgctggagggcgaggctgtgggcatcaagagcttcggctactccctgtcaggcagcttggatatggatgggaaccaataccctgacctgctggtgggctccctggctgacaccgcagtgctcttcagggccagacccatcctccatgtctcccatgaggtctctattgctccacgaagcatcgacctggagcagcccaactgtgctggcggccactcggtctgtgtggacctaagggtctgtttcagctacattgcagtccccagcagctatagccctactgtggccctggactatgtgttagatgcggacacagaccggaggctccggggccaggttccccgtgtgacgttcctgagccgtaacctggaagaacccaagcaccaggcctcgggcaccgtgtggctgaagcaccagcatgaccgagtctgtggagacgccatgttccagctccaggaaaatgtcaaagacaagcttcgggccattgtagtgaccttgtcctacagtctccagacccctcggctccggcgacaggctcctggccaggggctgcctccagtggcccccatcctcaatgcccaccagcccagcacccagcgggcagagatccacttcctgaagcaaggctgtggtgaagacaagatctgccagagcaatctgcagctggtccacgcccgcttctgtacccgggtcagcgacacggaattccaacctctgcccatggatgtggatggaacaacagccctgtttgcactgagtgggcagccagtcattggcctggagctgatggtcaccaacctgccatcggacccagcccagccccaggctgatggggatgatgcccatgaagcccagctcctggtcatgcttcctgactcactgcactactcaggggtccgggccctggaccctgcggagaagccactctgcctgtccaatgagaatgcctcccatgttgagtgtgagctggggaaccccatgaagagaggtgcccaggtcaccttctacctcatccttagcacctccgggatcagcattgagaccacggaactggaggtagagctgctgttggccacgatcagtgagcaggagctgcatccagtctctgcacgagcccgtgtcttcattgagctgccactgtccattgcaggaatggccattccccagcaactcttcttctctggtgtggtgaggggcgagagagccatgcagtctgagcgggatgtgggcagcaaggtcaagtatgaggtcacggtttccaaccaaggccagtcgctcagaaccctgggctctgccttcctcaacatcatgtggcctcatgagattgccaatgggaagtggttgctgtacccaatgcaggttgagctggagggcgggcaggggcctgggcagaaagggctttgctctcccaggcccaacatcctccacctggatgtggacagtagggataggaggcggcgggagctggagccacctgagcagcaggagcctggtgagcggcaggagcccagcatgtcctggtggccagtgtcctctgctgagaagaagaaaaacatcaccctggactgcgcccggggcacggccaactgtgtggtgttcagctgcccactctacagctttgaccgcgcggctgtgctgcatgtctggggccgtctctggaacagcacctttctggaggagtactcagctgtgaagtccctggaagtgattgtccgggccaacatcacagtgaagtcctccataaagaacttgatgctccgagatgcctccacagtgatcccagtgatggtatacttggaccccatggctgtggtggcagaaggagtgccctggtgggtcatcctcctggctgtactggctgggctgctggtgctagcactgctggtgctgctcctgtggaagatgggattcttcaaacgggcgaagcaccccgaggccaccgtgccccagtaccatgcggtgaagattcctcgggaagaccgacagcagttcaaggaggagaagacgggcaccatcctgaggaacaactggggcagcccccggcgggagggcccggatgcacaccccatcctggctgctgacgggcatcccgagctgggccccgatgggcatccagggccaggcaccgcctaggttcccatgtcccagcctggcctgtggctgccctccatcccttccccagagatggctccttgggatgaagagggtagagtgggctgctggtgtcgcatcaagatttggcaggatcggcttcctcaggggcacagacctctcccacccacaagaactcctcccacccaacttccccttagagtgctgtgagatgagagtgggtaaatcagggacagggccatggggtagggtgagaagggcaggggtgtcctgatgcaaaggtggggagaagggatcctaatcccttcctctcccattcaccctgtgtaacaggaccccaaggacctgcctccccggaagtgccttaacctagagggtcggggaggaggttgtgtcactgactcaggctgctccttctctagtttcccctctcatctgaccttagtttgctgccatcagtctagtggtttcgtggtttcgtctatttattaaaaaatatttgagaacaaaaaaaaaaaaaaaaaa

SEQ ID NO: 162 - protein, 1137 aa, Homo sapiens
  ref <308>: DATABASE ACCESSION NUMBER: Refseq / NP_002197
  ref <309>: DATABASE ENTRY DATE: 2000-10-31
MAGARSRDPWGASGICYLFGSLLVELLFSRAVAFNLDVMGALRKEGEPGSLFGFSVALHRQLQPRPQSWLLVGAPQALALPGQQANRTGGLFACPLSLEETDCYRVDIDQGADMQKESKENQWLGVSVRSQGPGGKIVTCAHRYEARQRVDQILETRDMIGRCFVLSQDLAIRDELDGGEWKFCEGRPQGHEQFGFCQQGTAAAFSPDSHYLLFGAPGTYNWKGLLFVTNIDSSDPDQLVYKTLDPADRLPGPAGDLALNSYLGFSIDSGKGLVRAEELSFVAGAPRANHKGAVVILRKDSASRLVPEVMLSGERLTSGFGYSLAVADLNSDGWPDLIVGAPYFFERQEELGGAVYVYLNQGGHWAGISPLRLCGSPDSMFGISLAVLGDLNQDGFPDIAVGAPFDGDGKVFIYHGSSLGVVAKPSQVLEGEAVGIKSFGYSLSGSLDMDGNQYPDLLVGSLADTAVLFRARPILHVSHEVSIAPRSIDLEQPNCAGGHSVCVDLRVCFSYIAVPSSYSPTVALDYVLDADTDRRLRGQVPRVTFLSRNLEEPKHQASGTVWLKHQHDRVCGDAMFQLQENVKDKLRAIVVTLSYSLQTPRLRRQAPGQGLPPVAPILNAHQPSTQRAEIHFLKQGCGEDKICQSNLQLVHARFCTRVSDTEFQPLPMDVDGTTALFALSGQPVIGLELMVTNLPSDPAQPQADGDDAHEAQLLVMLPDSLHYSGVRALDPAEKPLCLSNENASHVECELGNPMKRGAQVTFYLILSTSGISIETTELEVELLLATISEQELHPVSARARVFIELPLSIAGMAIPQQLFFSGVVRGERAMQSERDVGSKVKYEVTVSNQGQSLRTLGSAFLNIMWPHEIANGKWLLYPMQVELEGGQGPGQKGLCSPRPNILHLDVDSRDRRRRELEPPEQQEPGERQEPSMSWWPVSSAEKKKNITLDCARGTANCVVFSCPLYSFDRAAVLHVWGRLWNSTFLEEYSAVKSLEVIVRANITVKSSIKNLMLRDASTVIPVMVYLDPMAVVAEGVPWWVILLAVLAGLLVLALLVLLLWKMGFFKRAKHPEATVPQYHAVKIPREDRQQFKEEKTGTILRNNWGSPRREGPDAHPILAADGHPELGPDGHPGPGTA

SEQ ID NO: 163 - DNA, 314 bp, Rattus norvegicus
  ref <308>: DATABASE ACCESSION NUMBER: EMBL / AA859612
  ref <309>: DATABASE ENTRY DATE: 2000-03-03
tttttttttttttttatattgttatgcctgtgatgagtttagggttgattgttaatagtatgaggggaataatgtgtacagctatgagtgttaattctcgtgtgtgggaaggttggaagttgtttatatggctggttggtggaagcccttctttgcgcagttgaaattaaatcttgctgactaattaacttttttgttgatcacaataagggcaaagaaaaaagatcaaattagctggacacatttctgtaaatatttttaaaaaaatgctgccaaatgttctgtatctatgggtttcgtatgatcgtcaacat

SEQ ID NO: 164 - DNA, 878 bp, Rattus norvegicus
  ref <308>: DATABASE ACCESSION NUMBER: EMBL / U17837
  ref <309>: DATABASE ENTRY DATE: 2000-03-04
gtaggcactctgtctgctccttaacagcacctgaagtgacctggaatcagtgaagccaaagggaccagcagtctgccctgcagagagcactgacctctcccagttgtgagagtgagagaacgagagagagagagagagagagagagagagagagagagagagagaatgagaatgtgtgtgtgtgtgtgctggtgcatgtgtgtggtcttcaagccaaggtcccagcctcaggagcaggaccttcccatttcccgtcatcctctggatgatccttggacgtggcccagaaccgtgctctgtggtgcagccatcctgcccgggaggggcatctccttctatgcaatttttttaaagagttccttggccctgctttgtgcttcttgagctgtccgtttgccaccactgggacttggatctggccctgaggggtggggaagagggcctatctaaggataacctttcagaggtcaagctccccttcatgccacccctcccccctgccctcaccgaccttttccccacactgtctctgggaatcaatagcagatagcatatagatccatcagggttgagcctgaacctcggccctagcactaggaaatcccccttttctccctaagcaactggagccgccagctttcaagtcatttcctcctttgaggttctagagtccgagagtctgctccgaagtctctcctgggaacccgggagccctcgcacccaggacgcagactctgtgcccattcttagacctgaggtagaagaagcagtgttttgggacgatagggtggaggcgtgcctactttgtctcctctggtgggacctcctacatcattggcatctgaaccttgcaagttcgctgcaaagagaagcaaagg

SEQ ID NO: 165 - DNA, 604 bp, Rattus norvegicus
  ref <308>: DATABASE ACCESSION NUMBER: Refseq / NM_030832
  ref <309>: DATABASE ENTRY DATE: 2003-01-13
cggagttttgtgaattacggtagtgggtaagacctgagttcctccagctcctacctactttcagctgactagaagggcaaggatggtagatgctttctgtgccacctggaagctgacagacagccagaattttgatgagtacatgaaggctctgggcgtgggctttgccactaggcaagtgggaaatgtgaccaaaccaacggtgattatcagtcaggaaggcggcaaagtggtgatccggacacaatgcacattcaagaacacagagatcagtttccagctgggagaagagtttgaggaaacaagcatagatgacaggaactgtaagtctgtgattcggttggatggagacaagctcattcatgtgcagaagtgggatggcaaagaaacaaattgtgtcagagaaattaaggatggcaaaatggttgtgactctcacctttggggatgtcgttgctgttcgctgttatgaaaaggcatagaagaaatgccgggtcttttgaaaacttggtttcctgaagttccagagttatccagctactgaagcactggtcactaattataagtttgtctttggtgtggaggcagaaaattataatttaagg

SEQ ID NO: 166 - protein, 132 aa, Rattus norvegicus
  ref <308>: DATABASE ACCESSION NUMBER: Refseq / NP_110459
  ref <309>: DATABASE ENTRY DATE: 2003-01-13
MVDAFCATWKLTDSQNFDEYMKALGVGFATRQVGNVTKPTVIISQEGGKVVIRTQCTFKNTEISFQLGEEFEETSIDDRNCKSVIRLDGDKLIHVQKWDGKETNCVREIKDGKMVVTLTFGDVVAVRCYEKA

SEQ ID NO: 167 - DNA, 888 bp, Homo sapiens
  ref <308>: DATABASE ACCESSION NUMBER: Refseq / NM_001446
  ref <309>: DATABASE ENTRY DATE: 2001-11-16
cagcctcttggaaagagggacactggaggggtgtgtttgcaatttaaatcactggatttttgcccaccctctttccaaataagaaggcaggagctgcttgctgaggtgtaaagggtcttctgagctgcagtggcaattagaccagaagatccccgctcctgtctctaaagaggggaaagggcaaggatggtggaggctttctgtgctacctggaagctgaccaacagtcagaactttgatgagtacatgaaggctctaggcgtgggctttgccactaggcaggtgggaaatgtgaccaaaccaacggtaattatcagtcaagaaggagacaaagtggtcatcaggactctcagcacattcaagaacacggagattagtttccagctgggagaagagtttgatgaaaccactgcagatgatagaaactgtaagtctgttgttagcctggatggagacaaacttgttcacatacagaaatgggatggcaaagaaacaaattttgtaagagaaattaaggatggcaaaatggttatgacccttacttttggtgatgtggttgctgttcgccactatgagaaggcataaaaatgttcctggtcggggcttggaagagctcttcagtttttctgtttcctcaagtctcagtgctatcctattacaacatggctgatcattaattagaaggttatccttggtgtggaggtggaaaatggtgatttaaaaacttgttactccaagcaacttgcccaattttaatctgaaaatttatcatgttttataatttgaattaaagttttgtccccccccccttttttttataaacaagtgaatacattttataatttcttttggaatgtaaatcaaatttgaataaaaatcttacacgtg

SEQ ID NO: 168 - protein, 132 aa, Homo sapiens
  ref <308>: DATABASE ACCESSION NUMBER: Refseq / NP_001437
  ref <309>: DATABASE ENTRY DATE: 2001-11-16
MVEAFCATWKLTNSQNFDEYMKALGVGFATRQVGNVTKPTVIISQEGDKVVIRTLSTFKNTEISFQLGEEFDETTADDRNCKSVVSLDGDKLVHIQKWDGKETNFVREIKDGKMVMTLTFGDVVAVRHYEKA

SEQ ID NO: 169 - DNA, 1575 bp, Rattus norvegicus
  ref <308>: DATABASE ACCESSION NUMBER: Refseq / NM_019354
  ref <309>: DATABASE ENTRY DATE: 2003-01-13
atcgcttgcttcttgggcagccaccgccgccgtcggacctagccgtctgcactcctgtgttctcctgtgtattctcctgcggtccggacacaatagtatgatctttaagtgtttcgtctcccagacattttctatgggaaatcaaggggatcaggccatgatagccactggcagctttgaagaacgggacacctttagagaagcttgatcttggaggcctcagcgtgagacctcaaagcaccctcccgactccggcagagttcctctgtctcgtcttgacgattgaaggtccccactgcttcagtttttctccatcttctgggaggtagcaggaagtcagaatcatggttggtttcaaggccaccgatgtgccccccacagccaccgtgaagttcctgggggctgggacagcagcctgtattgcagatctcatcactttccctctagacaccgccaaagtccggctgcagatccaaggagagagtcaagggctagcgcgcaccgccgccagcgcccagtaccgcggcgtgctgggcaccatcctaaccatggtgcgcactgagggtccgcgcagcctctacaatgggctggtcgccggcctacagcgccagatgagctttgcctccgtccgcattggcctctacgactctgtaaagcagttctacaccaagggctcagagcatgcaggcattgggagccgcctcctggcaggtagcaccacaggtgccctggctgtggctgtggcccaacctacagatgtggtaaaggtccgcttccaggcccaggcccgggctggcggtggtcggagataccagagcactgtcgaagcctacaagaccattgcacgagaggaagggatccggggcctctggaaagggacctctcccaatgttgcccgaaatgccattgtcaactgtactgagctggtgacctatgacctcatcaaagatactctcctgaaagccaacctcatgacagacgacctcccttgccacttcacttctgccttcggggcgggcttctgcaccaccgtcattgcctcccccgttgatgtggtcaagacgagatatatgaactctgccttgggccagtaccacagcgccggccactgtgccctgaccatgctccggaaggaggggccccgaaccttctacaaggggttcatgccttccttcctccgcttgggatcctggaacgtagtaatgtttgtcacctatgagcagctcaaaagggccctgatggctgcctatgaatcccgggaggcacccttttgagcctctccagctgatgacctggaccctgctccccattcctgccctgtcttttccttcatcctctgcccagccccaacctcttcccatttcccacactccaactcccttcccagctcatctccctatacctcctcagcaaggaggccttaccctagcacatctcactatgcctcctcagcgaggaggcctgaccccggaccctgcaccctcagtcctgctaacagttaagcccaaatcttttgtcctcattcccagcccagcttagccagccttcgcccataaagcaagctccaatgtaaaa

SEQ ID NO: 170 - protein, 309 aa, Rattus norvegicus
  ref <308>: DATABASE ACCESSION NUMBER: Refseq / NP_062227
  ref <309>: DATABASE ENTRY DATE: 2003-01-13
MVGFKATDVPPTATVKFLGAGTAACIADLITFPLDTAKVRLQIQGESQGLARTAASAQYRGVLGTILTMVRTEGPRSLYNGLVAGLQRQMSFASVRIGLYDSVKQFYTKGSEHAGIGSRLLAGSTTGALAVAVAQPTDVVKVRFQAQARAGGGRRYQSTVEAYKTIAREEGIRGLWKGTSPNVARNAIVNCTELVTYDLIKDTLLKANLMTDDLPCHFTSAFGAGFCTTVIASPVDVVKTRYMNSALGQYHSAGHCALTMLRKEGPRTFYKGFMPSFLRLGSWNVVMFVTYEQLKRALMAAYESREAPF

SEQ ID NO: 171 - DNA, 1182 bp, Homo sapiens
  ref <308>: DATABASE ACCESSION NUMBER: Refseq / NM_022803
  ref <309>: DATABASE ENTRY DATE: 2001-03-09
agagacaacagtgaatgacaaggaggggccatccaatccctgctgccacctcctgggatggagccctagggagcccctgtgctgcccctgccgtggcaggactcacagccccaccgctgcactgaagcccagggctgtggagcagcctctctccttggacctcctctcggccctaaagggactgggcagagccttccaggactatggttggactgaagccttcagacgtgcctcccaccatggctgtgaagttcctgggggcaggcacagcagcctgttttgctgacctcgttacctttccactggacacagccaaggtccgcctgcagatccagggggagaaccaggcggtccagacggcccggctcgtgcagtaccgtggcgtgctgggcaccatcctgaccatggtgcggactgagggtccctgcagcccctacaatgggctggtggccggcctgcagcgccagatgagcttcgcctccatccgcatcggcctctatgactccgtcaagcaggtgtacacccccaaaggcgcggacaactccagcctcactacccggattttggccggctgcaccacaggagccatggcggtgacctgtgcccagcccacagatgtggtgaaggtccgatttcaggccagcatacacctcgggccatccaggagcgacagaaaatacagcgggactatggacgcctacagaaccatcgccagggaggaaggagtcaggggcctgtggaaaggaactttgcccaacatcatgaggaatgctatcgtcaactgtgctgaggtggtgacctacgacatcctcaaggagaagctgctggactaccacctgctcactgacaacttcccctgccactttgtctctgcctttggagccggcttctgtgccacagtggtggcctccccggtggacgtggtgaagacccggtatatgaactcacctccaggccagtacttcagccccctcgactgtatgataaagatggtggcccaggagggccccacagccttctacaaggggtgagcctcctcctgcctccagcactccctcccagagaacaggggcttctttcttttcgaatgtggctaccgtgggtcaacctgggatgtagcggtgaagagtacagatgtaaatgccacaaagaagaagtttaaaaaaccatgcaaaaaaaaaa

SEQ ID NO: 172 - protein, 275 aa, Homo sapiens
  ref <308>: DATABASE ACCESSION NUMBER: Refseq / NP_073714
  ref <309>: DATABASE ENTRY DATE: 2001-03-09
MVGLKPSDVPPTMAVKFLGAGTAACFADLVTFPLDTAKVRLQIQGENQAVQTARLVQYRGVLGTILTMVRTEGPCSPYNGLVAGLQRQMSFASIRIGLYDSVKQVYTPKGADNSSLTTRILAGCTTGAMAVTCAQPTDVVKVRFQASIHLGPSRSDRKYSGTMDAYRTIAREEGVRGLWKGTLPNIMRNAIVNCAEVVTYDILKEKLLDYHLLTDNFPCHFVSAFGAGFCATVVASPVDVVKTRYMNSPPGQYFSPLDCMIKMVAQEGPTAFYKG

SEQ ID NO: 173 - DNA, 2677 bp, Rattus norvegicus
  ref <308>: DATABASE ACCESSION NUMBER: Refseq / NM_138845
  ref <309>: DATABASE ENTRY DATE: 2003-01-13
tcacacgtgccaaggggctggctcatcagcctggggtgagccaaatgaaagcagtcctgggtggggtgagatggatgatgcaggagcattcagccacaggctggggaaacacacctgccagcgctcccaatgccatgaaacccaattccaaatctatgcaagacggctggggggagagtgatggcccagtcacaggagctcgccatcctagctgggaagaggaagatgatggaggagtctggaacaccgccggctctcagggaagcacttcctcccacaactcagcaagctggggacaaggaggaaagaaacaaatgaagtgctcgataaaaggaaacaatgattcgtggatgaatcctcttgccaaacagttttcaaatatgggattgctgagtcaaactgaggataacccaagcagcaaaatggatttgtctgtagataagaaatttgatgtggacaagagaacaatgaatctcggggattttaatgatatcatgaggaaggatcgacctgggttccgtccacctaattccaaagacttgggaaccacagacagtgggccttattttgagaagggcggcagtcatggtttgtttggaaacagcacagcacagtcaagaggcctgcacactccagtgcagccactgagttcttctcctggtctccgggcgcaagtgcctccccagtttatctccccccaggtttctgcctcaatgctcaagcagttccccaacagtggcctgaatccaggtctctttaatgtggggccccagttatctcctcaacaaattgccatgctgagccagcttccacagattccccagtttcagttggcttgtcagcttcttctgcagcagcagcagcagcagcagttgctacagaaccagagaaagatctctcaagcagtgcgccagcagcaagagcagcagctggcaagaatggtgagtgctctccagcagcagcagcagcagcagcagcagcagcagcagcagcagcagcagcagcagcagaggcaacctagcatgaagcattcaccttctcatcctgttgggcctaagccacatttggacaacatggtacccaacacgctgaatgtggggctcccagaccttccgaccaaaggaccaatccctggatatggttctggctttagctctggtggaatggactatggtatggttggtggcaaggaggctggaactgagtctcgcttcaaacagtggacctccatgatggaagggctgccatctgtggccacacaagaagctaccatgcacaaaaacggcgctatagtggcccctggtaagacccgaggagggtcaccatacaaccagtttgatataatcccaggtgacacactgggtggccatacgggtcctgctggtgatagctggttacctgccaaatctccaccgactaataaaatcggaagtaaatccagcaatgccagttggcctccagaattccaacaggagtgccatggaaaggtatccaaaatatcgaccctgaatctgacccctatgtcaccccaggaagtgtgctggggggcacagccacatcgcccattgtagatactgaccaccaactgctgcgggataacaccacagggtctaattcttccctcaacacctcgctgccttcacctggtgcctggccctacagtgcctctgacaactcctttaccaacgttcatagcacttcagcaaagttccctgattacaaatccacgtggtccccagatcccataggacacaaccccactcatctctccaacaagatgtggaaaaaccacatctcctccaggaacactacaccgctgccccgcccacctcctggcctgaccaaccccaaaccggcatctccttggagcagcacagcacccagatcggtcagggggtggggaacacaggactcccggattgcctcagcctctacctggagtgatggtggctctgttcgtcctagttactggctggttcttcacaatctcactccacagattgatgggtcaaccttgagaacgatctgcatgcagcatggcccactgctgacattccatctgaacctaacccagggcacagccctgatccgatatagcaccaaacaagaggcagccaaggcccagactgcactgcacatgtgtgtgttgggaaacactaccatcctggccgagtttgccactgaggatgaagtcagccgctttctggctcaagctcagccccctacacctgcagcaaccccgagtgcacctgccacagggtggcagtcactggagaccagccagaaccaagcagaccccgttggacctgcgctgaaccttttcggtgggtccaccgggctcgggcagtggagcagcagcgctggtggcagcagtggggccgatcttgccggcacttccttatggggccccccaaactattcttctagcttgtggggagtcccgacggtggaagatccccataggatgggcagccctgctcctttactacctggtgaccttctgggaggagggtcggattcaatctgaacttagaactttcaactctgacctcgtgaccttttttggaacagcagcagcactaacttgaccttttcgttttttttttcaacttgcaataaatacatttttaaaaggaaaaaagaaaaaaaaaaaaaaaaaaaaaaaaaaaaaaaaaaa

SEQ ID NO: 174 - protein, 249 aa, Rattus norvegicus
  ref <308>: DATABASE ACCESSION NUMBER: Refseq / NP_620200
  ref <309>: DATABASE ENTRY DATE: 2003-01-13
MWKNHISSRNTTPLPRPPPGLTNPKPASPWSSTAPRSVRGWGTQDSRIASASTWSDGGSVRPSYWLVLHNLTPQIDGSTLRTICMQHGPLLTFHLNLTQGTALIRYSTKQEAAKAQTALHMCVLGNTTILAEFATEDEVSRFLAQAQPPTPAATPSAPATGWQSLETSQNQADPVGPALNLFGGSTGLGQWSSSAGGSSGADLAGTSLWGPPNYSSSLWGVPTVEDPHRMGSPAPLLPGDLLGGGSDSI

SEQ ID NO: 175 - DNA, 5481 bp, Homo sapiens
  ref <308>: DATABASE ACCESSION NUMBER: Refseq / XM_039385
  ref <309>: DATABASE ENTRY DATE: 2003-01-05
gagagagcaagagggagagtgtgtgagagagagttagttcaagccaaaatggccgacagagtctctgctggtttctgaatatttaaaatacaaaaaaacagatagacaaaaagaattcattttttggaccttttttcatttccatttctaccttgtatgcctcaatttgctggatttaagcactgctgcactttatgagagagaaggagcaagaaagggaagaacagttaatggaagacaagaaaaggaagaaagaggataaaaagaaaaaagaagccactcagaaggtcacggaacaaaaaaccaaagtgcccgaagtgacgaaaccaagtttaagccaaccaacggccgccagcccaattggcagctctccatcgccaccagtcaatggtggcaacaatgccaaaagggtggcagtgccgaacggacaaccgccaagcgccgcccgctacatgcctcgggaggtgccgccgcgattccgttgccagcaggaccacaaagtgttactaaaacgtgggcagccccctccaccgtcctgcatgctccttgggggtggggcagggcctcctccctgcacagcacctggagcaaacccaaacaacgcacaagtgacaggagcgctgctgcagagtgagagtgggactgcgccagactcaacccttggaggtgctgctgcttcaaattatgcaaattccacttggggctcgggagcctcctccaacaacggcacctcccccaacccaattcacatctgggacaaggtgattgtagacgggtctgacatggaagagtggccttgtattgccagcaaagacactgaatcttcttccgaaaacaccaccgataacaacagtgcctcgaaccctggctctgagaagagcactctgccaggaagcaccactagtaacaaaggaaaagggagccagtgccagtctgcaagttctgggaacgaatgtaatcttggggtctggaaatctgaccctaaggctaaatctgttcaatcttccaactctactacagagaacaacaatggactaggaaattggaggaatgtgagtggtcaggatagaattggacctggctctggcttcagcaactttaacccaaatagcaacccatctgcctggccagcactggtccaagaaggaacttctaggaaaggggcattggaaacagataatagtaattccagtgcacaggttagcacagtaggtcagacatccagggaacagcagtcaaagatggaaaatgcgggtgttaattttgttgtctctggcagagaacaggctcaaattcataacactgatggaccaaaaaatggaaacactaactccttgaacttaagttcaccaaaccccatggagaataagggaatgccctttggaatgggcttggggaacacctccaggagcactgatgccccttcacaaagcactggagatcgaaagactgggagtgttggatcttggggtgcagctagggggccttctggaactgacacagtctctggacaaagcaattctggaaacaatgggaacaatggaaaagagagagaggactcctggaaaggagcttctgttcagaaatcaactgggtcaaaaaatgactcttgggacaacaataacaggtctacgggtgggtcctggaactttggcccccaggactctaatgacaacaaatggggtgaagggaacaaaatgacatctggggtctctcagggagaatggaaacagccgactgggtctgatgagttgaaaattggagaatggagtggtccaaaccaaccaaattctagcactggagcatgggacaatcaaaagggccaccccctccctgaaaaccaaggcaatgcccaggctccctgttggggaagatcttccagctccacaggaagtgaagttggaggtcaaagcactggaagcaaccacaaagcaggaagtagtgacagtcataactctggccgtcggtcgtacaggcccacacatcctgattgtcaggctgtcttgcagactcttttgagccgaactgatttggaccccagggtgctctcaaacactggctggggccaaactcaaattaagcaggacacagtgtgggacattgaagaggtgccaaggcctgaggggaaatctgacaaaggaactgaggggtgggagagcgctgccacacagaccaagaactcagggggctggggagatgcacccagccaaagcaatcaaatgaagtctggatggggggagctctcagcctctacagagtggaaagaccccaagaacacaggaggctggaatgactacaagaacaacaactcttccaactggggaggaggacgacctgatgaaaagacaccttcctcttggaatgagaatcccagcaaggatcaggggtggggaggtggacgccagcccaatcaaggatggtcttctggaaagaatggttggggggaggaagtcgatcagacaaaaaacagcaattgggaaagttctgcaagtaaacctgtgtctgggtggggtgaaggagggcagaatgaaatcgggacttggggtaatggtggcaatgcaagcctagcttcaaaaggtgggtgggaggattgcaaaagatccccagcatggaatgagacgggccgacagcccaattcctggaataaacaacaccaacagcagcagcccccacagcagccgccgccaccacaaccagaggcttctggttcgtggggaggcccacccccaccacctccaggcaacgttcgaccttccaattccagctggagcagcgggccacagcctgcaacacctaaggatgaggaacccagtggttgggaagagccatccccacagtcaattagtcggaaaatggacattgatgatggcacttcagcatggggagaccctaacagttataactacaagaatgtgaatctgtgggataagaattcccaagggggcccagcacctcgagaaccaaacctgcccaccccaatgaccagtaaatcggcatcagattccaaatctatgcaagacggctggggggagagtgacgggccagtcacaggagctcgccatcccagctgggaagaggaggaggatggaggagtctggaacaccactggctctcagggcagtgcttcctcccacaactcagcaagctggggacaaggaggaaagaaacaaatgaagtgctcactcaaaggaggaaacaatgattcatggatgaatcctcttgccaaacagttttcaaatatgggattgctgagtcagactgaagataatccaagcagcaaaatggatttgtctgtaggaagcctttcagataaaaaatttgatgtggacaagcgagcgatgaatctcggggattttaatgatatcatgaggaaggatcgatctgggttccgtccacctaattccaaagacatgggaaccacagatagtgggccttattttgagaagggcggtagtcatggtttgtttggaaacagcacagcacaatcgagaggtctgcacacacccgtgcagccactaaattcttctcccagtctccgggcgcaagtgcctccccagtttatttccccccaggtttctgcctcaatgctcaagcagtttcccaacagtggcctgagtccaggtcttttcaatgtggggccccagttatctcctcaacaaattgccatgctgagccagcttccacaaattccccagtttcagttggcatgtcagcttctcttgcagcagcagcaacagcagcagttgttacagaaccagagaaagatttctcaagctgtacgccaacagcaagagcagcagctggctcgaatggtgagtgcactgcagcagcagcagcagcagcagcagaggcagccaggcatgaagcactcgccctctcatcctgttgggcccaagccgcatctggacaacatggtacccaacgcattgaatgtggggctcccagaccttcaaaccaaagggccaatacctggatatggttctggcttcagctctggcggcatggactatggcatggttggtgggaaggaggctggaaccgagtctcgctttaaacagtggacctccatgatggaggggctgccctctgtagccacacaggaagccaatatgcacaaaaatggcgctatagtggcccctggtaaaacccggggagggtcaccgtacaaccagtttgatatcatccctggtgacacactgggtggccatacgggtcctgctggtgatagctggttacctgccaaatctccaccaacaaataaaatcggaagtaaatccagcaatgccagttggcctccagaattccaaccaggagtgccatggaaaggtatccaaaacattgaccctgaatctgacccctatgtcaccccaggaagtgtgctggggggtacagccacatctcccattgtagatactgaccaccaactgctgcgggataacaccacagggtctaattcttccctcaacacctcgctgccttcacctggtgcctggccctacagtgcctctgacaactcctttaccaacgttcatagcacttcagcaaagttccctgattacaaatcaacatggtccccagatcccataggacacaaccccactcatctctccaacaagatgtggaaaaaccatatttcctccaggaacactacaccgctgccccgcccacctcctggtctgaccaaccccaaaccatcatctccctggagcagcacagcaccccgatcagtcagggggtgggggacacaggactcacggctcgcctcggcctctacctggagtgatggtggctcagttcgtcctagttactggctggttcttcacaatctcaccccacagattgatgggtcaaccttgagaacgatctgcatgcagcatggcccactgctgacattccatctgaatctaacccagggcactgccctgatccgatacagcaccaaacaggaggcggccaaggcccaaactgcactgcacatgtgtgtgttgggaaacactaccatccttgctgagtttgccactgatgatgaagtcagccgctttctggcacaagctcagccccctacacctgcagcaaccccaagtgcgccagctgcggggtggcagtcgctggagaccggccagaaccagtcagatcccgtgggacctgctctgaatctttttggtgggtccactgggctcgggcagtggagcagcagcgctggtggcagcagcggggccgatcttgctggcgcttcattgtgggggcccccaaactattcttctagcttatggggagtcccaacggtggaagatccccataggatgggcagccctgctcctttactacctggtgaccttctgggaggagggtcggattcaatctgaacttagaactttcaactctgacctcgtgaccttttttggaacagcagcagcactaacttgaccttttcgttttttttttcaacttgcaataaatacatttttaaaaggaaaaaag

SEQ ID NO: 176 - protein, 1723 aa, Homo sapiens
  ref <308>: DATABASE ACCESSION NUMBER: Refseq / XP_039385
  ref <309>: DATABASE ENTRY DATE: 2003-01-05
MREKEQEREEQLMEDKKRKKEDKKKKEATQKVTEQKTKVPEVTKPSLSQPTAASPIGSSPSPPVNGGNNAKRVAVPNGQPPSAARYMPREVPPRFRCQQDHKVLLKRGQPPPPSCMLLGGGAGPPPCTAPGANPNNAQVTGALLQSESGTAPDSTLGGAAASNYANSTWGSGASSNNGTSPNPIHIWDKVIVDGSDMEEWPCIASKDTESSSENTTDNNSASNPGSEKSTLPGSTTSNKGKGSQCQSASSGNECNLGVWKSDPKAKSVQSSNSTTENNNGLGNWRNVSGQDRIGPGSGFSNFNPNSNPSAWPALVQEGTSRKGALETDNSNSSAQVSTVGQTSREQQSKMENAGVNFVVSGREQAQIHNTDGPKNGNTNSLNLSSPNPMENKGMPFGMGLGNTSRSTDAPSQSTGDRKTGSVGSWGAARGPSGTDTVSGQSNSGNNGNNGKEREDSWKGASVQKSTGSKNDSWDNNNRSTGGSWNFGPQDSNDNKWGEGNKMTSGVSQGEWKQPTGSDELKIGEWSGPNQPNSSTGAWDNQKGHPLPENQGNAQAPCWGRSSSSTGSEVGGQSTGSNHKAGSSDSHNSGRRSYRPTHPDCQAVLQTLLSRTDLDPRVLSNTGWGQTQIKQDTVWDIEEVPRPEGKSDKGTEGWESAATQTKNSGGWGDAPSQSNQMKSGWGELSASTEWKDPKNTGGWNDYKNNNSSNWGGGRPDEKTPSSWNENPSKDQGWGGGRQPNQGWSSGKNGWGEEVDQTKNSNWESSASKPVSGWGEGGQNEIGTWGNGGNASLASKGGWEDCKRSPAWNETGRQPNSWNKQHQQQQPPQQPPPPQPEASGSWGGPPPPPPGNVRPSNSSWSSGPQPATPKDEEPSGWEEPSPQSISRKMDIDDGTSAWGDPNSYNYKNVNLWDKNSQGGPAPREPNLPTPMTSKSASDSKSMQDGWGESDGPVTGARHPSWEEEEDGGVWNTTGSQGSASSHNSASWGQGGKKQMKCSLKGGNNDSWMNPLAKQFSNMGLLSQTEDNPSSKMDLSVGSLSDKKFDVDKRAMNLGDFNDIMRKDRSGFRPPNSKDMGTTDSGPYFEKGGSHGLFGNSTAQSRGLHTPVQPLNSSPSLRAQVPPQFISPQVSASMLKQFPNSGLSPGLFNVGPQLSPQQIAMLSQLPQIPQFQLACQLLLQQQQQQQLLQNQRKISQAVRQQQEQQLARMVSALQQQQQQQQRQPGMKHSPSHPVGPKPHLDNMVPNALNVGLPDLQTKGPIPGYGSGFSSGGMDYGMVGGKEAGTESRFKQWTSMMEGLPSVATQEANMHKNGAIVAPGKTRGGSPYNQFDIIPGDTLGGHTGPAGDSWLPAKSPPTNKIGSKSSNASWPPEFQPGVPWKGIQNIDPESDPYVTPGSVLGGTATSPIVDTDHQLLRDNTTGSNSSLNTSLPSPGAWPYSASDNSFTNVHSTSAKFPDYKSTWSPDPIGHNPTHLSNKMWKNHISSRNTTPLPRPPPGLTNPKPSSPWSSTAPRSVRGWGTQDSRLASASTWSDGGSVRPSYWLVLHNLTPQIDGSTLRTICMQHGPLLTFHLNLTQGTALIRYSTKQEAAKAQTALHMCVLGNTTILAEFATDDEVSRFLAQAQPPTPAATPSAPAAGWQSLETGQNQSDPVGPALNLFGGSTGLGQWSSSAGGSSGADLAGASLWGPPNYSSSLWGVPTVEDPHRMGSPAPLLPGDLLGGGSDSI

SEQ ID NO: 177 - DNA, 774 bp, Rattus norvegicus
  ref <308>: DATABASE ACCESSION NUMBER: Refseq / NM_053589
  ref <309>: DATABASE ENTRY DATE: 2003-01-13
gccaccatggcaactacaccgtacaactactcttacatctttaagtatattattatcggggatatgggagtaggaaaatcttgcttgcttcatcaatttacagaaaaaaagtttatggctgattgtcctcacacaattggtgttgaatttggtacaagaataattgaagttagtggccaaaaaatcaaactgcagatttgggatacagcaggacaggagaggttcagagctgttacacggagctactatagaggagctgcaggtgcgctcatggtgtatgacatcaccagaagaagtacatataaccacttaagcagctggttgacagatgcaaggaacctcaccaacccaaacactgtaataattctcataggaaataaagcagatttggaagcacagagagatgttacctatgaagaagccaaacagtttgctgaagaaaacggcttattgttccttgaagcaagtgcaaaaacgggagagaatgtagaagatgcttttcttgaggctgccaagaaaatctatcagaacattcaggatggaagcctggatctgaatgctgccgagtctggtgtacaacacaaaccctcagccccgcagggaggacggctaaccagtgaaccccaaccccagagagaaggctgtggctgctagtgacctctttgctctggtccctcattttgacctttcacctcttgtctgttggaagcagtactttttactgccttcttgtcttctgtacatcttactggggtttaattaaaaaaaaaaaaa

SEQ ID NO: 178 - protein, 215 aa, Rattus norvegicus
  ref <308>: DATABASE ACCESSION NUMBER: Refseq / NP_446041
  ref <309>: DATABASE ENTRY DATE: 2003-01-13
MATTPYNYSYIFKYIIIGDMGVGKSCLLHQFTEKKFMADCPHTIGVEFGTRIIEVSGQKIKLQIWDTAGQERFRAVTRSYYRGAAGALMVYDITRRSTYNHLSSWLTDARNLTNPNTVIILIGNKADLEAQRDVTYEEAKQFAEENGLLFLEASAKTGENVEDAFLEAAKKIYQNIQDGSLDLNAAESGVQHKPSAPQGGRLTSEPQPQREGCGC

SEQ ID NO: 179 - DNA, 1525 bp, Rattus norvegicus
  ref <308>: DATABASE ACCESSION NUMBER: Refseq / NM_032080
  ref <309>: DATABASE ENTRY DATE: 2003-01-13
ggccaagagaacgaagtcttttttttttttttcttgcgggagaacttaatgctgcatttattattaacctagtaccctaacataaaacaaaaggaagaaaaggattaaggaaggaaaaggtgaatcgagaagagccatcatgtcggggcgaccgagaaccacctcctttgcggagagctgcaagccagtgcagcagccttcagcttttggtagcatgaaagttagcagagataaagatggcagcaaggtaaccacagtggtggcaactcctggacagggtcctgacaggccacaggaagtcagttacacagacactaaagtcattggaaatgggtcatttggtgtggtatatcaagccaaactttgtgactcaggagaactggtggccatcaagaaagttcttcaggacaagcgatttaagaaccgagagctccagatcatgagaaagctagatcactgtaacatagtccgattgcggtatttcttctactcgagtggcgagaagaaagatgaggtctaccttaacctggtgctggactatgttccggaaacagtgtacagagtcgccagacactatagtcgagccaagcagacactccctgtgatctatgtcaagttgtatatgtaccagctgttcagaagtctagcctatatccattcctttgggatctgccatcgagacattaaaccacagaacctcttgctggatcctgatacagctgtattaaaactctgcgactttggaagtgcaaagcagctggtccgaggagagcccaatgtttcatatatctgttctcggtactacagggcaccagagctgatctttggagccaccgattacacgtctagtatagatgtatggtctgcaggctgtgtgttggctgaattgttgctaggacaaccaatatttcctggggacagtggtgtggatcagttggtggaaataataaaggtcctaggaacaccaacaagggagcaaattagagaaatgaacccaaattatacagaattcaaattcccccaaatcaaggcacatccttggacgaaggtctttcggccccgaactccaccagaggcaatcgcactgtgtagccgtctcctggagtacacgccgaccgcccggctaacaccactggaagcttgtgcacattcattttttgatgaattacgggacccaaatgtcaaactaccaaatgggcgagacacacctgccctcttcaactttaccactcaagaactgtcaagtaacccacctctggccaccatccttatccctcctcacgctcggattcaggcagctgcttcaccgcctgcaaacgccacagcagcctcagatactaatgctggagaccgtggacagaccaataacgccgcttctgcatcagcctccaactctacctgaacagccccaagtagccagctgcgcagggaagaccagcacttacttgagtgccactcagcaacactggtcacgtttggaaagaaaattaaaaagaggaaaacaaaaacaaaaacaaaaaacccc

SEQ ID NO: 180 - protein, 420 aa, Rattus norvegicus
  ref <308>: DATABASE ACCESSION NUMBER: Refseq / NP_114469
  ref <309>: DATABASE ENTRY DATE: 2003-01-13
MSGRPRTTSFAESCKPVQQPSAFGSMKVSRDKDGSKVTTVVATPGQGPDRPQEVSYTDTKVIGNGSFGVVYQAKLCDSGELVAIKKVLQDKRFKNRELQIMRKLDHCNIVRLRYFFYSSGEKKDEVYLNLVLDYVPETVYRVARHYSRAKQTLPVIYVKLYMYQLFRSLAYIHSFGICHRDIKPQNLLLDPDTAVLKLCDFGSAKQLVRGEPNVSYICSRYYRAPELIFGATDYTSSIDVWSAGCVLAELLLGQPIFPGDSGVDQLVEIIKVLGTPTREQIREMNPNYTEFKFPQIKAHPWTKVFRPRTPPEAIALCSRLLEYTPTARLTPLEACAHSFFDELRDPNVKLPNGRDTPALFNFTTQELSSNPPLATILIPPHARIQAAASPPANATAASDTNAGDRGQTNNAASASASNST

SEQ ID NO: 181 - DNA, 1639 bp, Homo sapiens
  ref <308>: DATABASE ACCESSION NUMBER: Refseq / NM_002093
  ref <309>: DATABASE ENTRY DATE: 2002-11-05
atcatctatatgttaaatatccgtgccgatctgtcttgaaggagaaatatatcgcttgttttgttttttatagtatacaaaaggagtgaaaagccaagaggacgaagtctttttctttttcttctgtgggagaacttaatgctgcatttatcgttaacctaacaccccaacataaagacaaaaggaagaaaaggaggaaggaaggaaaaggtgattcgcgaagagagtgatcatgtcagggcggcccagaaccacctcctttgcggagagctgcaagccggtgcagcagccttcagcttttggcagcatgaaagttagcagagacaaggacggcagcaaggtgacaacagtggtggcaactcctgggcagggtccagacaggccacaagaagtcagctatacagacactaaagtgattggaaatggatcatttggtgtggtatatcaagccaaactttgtgattcaggagaactggtcgccatcaagaaagtattgcaggacaagagatttaagaatcgagagctccagatcatgagaaagctagatcactgtaacatagtccgattgcgttatttcttctactccagtggtgagaagaaagatgaggtctatcttaatctggtgctggactatgttccggaaacagtatacagagttgccagacactatagtcgagccaaacagacgctccctgtgatttatgtcaagttgtatatgtatcagctgttccgaagtttagcctatatccattcctttggaatctgccatcgggatattaaaccgcagaacctcttgttggatcctgatactgctgtattaaaactctgtgactttggaagtgcaaagcagctggtccgaggagaacccaatgtttcgtatatctgttctcggtactatagggcaccagagttgatctttggagccactgattatacctctagtatagatgtatggtctgctggctgtgtgttggctgagctgttactaggacaaccaatatttccaggggatagtggtgtggatcagttggtagaaataatcaaggtcctgggaactccaacaagggagcaaatcagagaaatgaacccaaactacacagaatttaaattccctcaaattaaggcacatccttggactaaggattcgtcaggaacaggacatttcacctcaggagtgcgggtcttccgaccccgaactccaccggaggcaattgcactgtgtagccgtctgctggagtatacaccaactgcccgactaacaccactggaagcttgtgcacattcattttttgatgaattacgggacccaaatgtcaaactaccaaatgggcgagacacacctgcactcttcaacttcaccactcaagaactgtcaagtaatccacctctggctaccatccttattcctcctcatgctcggattcaagcagctgcttcaacccccacaaatgccacagcagcgtcagatgctaatactggagaccgtggacagaccaataatgctgcttctgcatcagcttccaactccacctgaacagtcccgagcagccagctgcacaggaaaaaccaccagttacttgagtgtcactcagcaacactggtcacgtttggaaagaatattaaaaaaaaaaaaaaaaaa

SEQ ID NO: 182 - protein, 433 aa, Homo sapiens
  ref <308>: DATABASE ACCESSION NUMBER: Refseq / NP_002084
  ref <309>: DATABASE ENTRY DATE: 2002-11-05
MSGRPRTTSFAESCKPVQQPSAFGSMKVSRDKDGSKVTTVVATPGQGPDRPQEVSYTDTKVIGNGSFGVVYQAKLCDSGELVAIKKVLQDKRFKNRELQIMRKLDHCNIVRLRYFFYSSGEKKDEVYLNLVLDYVPETVYRVARHYSRAKQTLPVIYVKLYMYQLFRSLAYIHSFGICHRDIKPQNLLLDPDTAVLKLCDFGSAKQLVRGEPNVSYICSRYYRAPELIFGATDYTSSIDVWSAGCVLAELLLGQPIFPGDSGVDQLVEIIKVLGTPTREQIREMNPNYTEFKFPQIKAHPWTKDSSGTGHFTSGVRVFRPRTPPEAIALCSRLLEYTPTARLTPLEACAHSFFDELRDPNVKLPNGRDTPALFNFTTQELSSNPPLATILIPPHARIQAAASTPTNATAASDANTGDRGQTNNAASASASNST

SEQ ID NO: 183 - DNA, 2851 bp, Rattus norvegicus
  ref <308>: DATABASE ACCESSION NUMBER: Refseq / NM_031049
  ref <309>: DATABASE ENTRY DATE: 2003-01-13
ggtaaagggctggccggccggtggtccagagctgtgctgtcatgaccgagggcacgtgtctgcggcgtcgtgggggaccctataaaactgagcccgccaccgatctcacccgctggcggctccataatgagttgggtcggcagagatggacttattatcaagcggaggaggaccctggtcgagaacagacggggctagaggcccactctttgggactggacacaacaagttatttcaagaacttacctaaagctcaaacagcccatgagggggccctgaacggagtaaccttttatgccaagctgcaggctgaggatggacactgggctggtgattatggtggtccactcttcctcttgccaggtctcctgattacgtgtcacatagcacacatccccctgccggctggatacagagaggaaatggtacggtacttgcgctcagtgcagcttcccaatggcggctggggcttgcacattgaggacaagtccacggtgtttgggactgccctgagctatgtgtctctcagaatcctgggtattggacctgatgatcctgaccttgtgcgtgctcggaacattcttcacaaaaaaggtggtgcagtggccatcccttcctgggggaagttctggctggctgtcctgaatgtttacagctgggaaggaatcaataccctcttccctgagatgtggctgcttcctgaatggtttcctgcacatccctccactctgtggtgtcactgccggcaggtctatctgcccatgagctactgctacgccactcggctaagtgcctcagaggacccactggttcagagcctccgccaggaactctatgtggaggattatgccagcatcgattggccagcacagaagaacaacgtgtgccccgatgacatgtacacgccacacagctggctgctgcacgtggtatatggactcctcaacctgtatgaacgtttccacagtaccagcctgcggaagtgggccatccagttgctgtatgaacatgtcgcagctgatgatcggttcacgaaatgcatcagcattggcccgatctcaaaaactgtcaacatgcttattcgttggtcagtggacggaccatcctcccctgccttccaggagcacgtctcgaggatcaaagattatctttggctgggccttgacggcatgaaaatgcagggcaccaatggatcacagacctgggacacttcatttgctgtccaagccctgctggaggcaggtgcacaccgaagacctgagtttttgccctgcctgcagaaggctcacgagttcctgcggctttcccaggtcccagacaacaatcctgactaccagaagtattatcgccatatgcacaagggtggtttccccttcagcacactggactgtggctggatcgttgctgactgcacggccgaggctttgaaggctgtgctgctcctgcaggagcggtgtccctcaatcaccgagcatgtcccccgagagcgactctacgatgctgtggctgtgttgttgagcatgaggaattccgatggagggtttgctacctatgagactaagcgtggcgggtatttgctggagctgctgaacccctcagaggtctttggagacatcatgattgactacacgtatgtagagtgtacctccgcagtgatgcaggccctgaggcacttccgcgagtacttcccagaccacagggctacagagatcagggagaccctcaatcaaggcctggacttctgccgaaagaagcagagagcggatggctcgtgggagggctcctggggggtttgcttcacctatggcacctggtttggcttggaagcattcgcttgcatgggacatatctaccaaaataggactgcttgtgcagaagtagctcaggcctgccacttcctcctgtcgcggcagatggcggatgggggctggggggaggactttgagtcctgtgagcagcggcggtacgtgcagagtgccgggtcccaggtccatagtacgtgctgggccctgctgggtttgatggctgtcaggcatcccgacatctctgctcaggagagaggaatcagatgtctgctagggaaacagctccccaacggagactggcctcaggagaacatctctggggtcttcaacaagtcctgtgccatcagctacacaaattacagaaacatcttccccatctgggccctgggccgcttctccagcctgtatcctgacaatacccttgctggccacatttgagcatgtgtgcgcctgtgcggcacctggccagcgtcagcactgtacaggcccaggcagcccggtttctcagctgggtgataagcgtcctcctagcccactttggcatggttctctatttctgtagacatgaggctggggatagggtcagagtcggtgtctagacactgggcagcatgcgctcggttctgacgctagcttcagtgaggaagggaagaagttgagcttgagatccagagaggcacagtgtactccgaggctcctgggtgtcctccttgagggaacaagactgtagagctttcatgatcagtgacttccctgtgagggagcagctggcttcttcacttcctcccttgttgactgtggagtgggccccgtggtgcaggcatgctcagagaaaggctcaatggaggaggcaggccccttgctcattgtgtcctgagcagtgtctgttgtcccaggcacttacccatgactgcatcactgcacgaaataccagttttccagaaaggaagtacaaactcgctctgtactaaaaatgctactaaaagtcgtttgaatgatcaccaactcccttaataaacagacccctgatggcccagtagtaaaca

SEQ ID NO: 184 - protein, 733 aa, Rattus norvegicus
  ref <308>: DATABASE ACCESSION NUMBER: Refseq / NP_112311
  ref <309>: DATABASE ENTRY DATE: 2003-01-13
MTEGTCLRRRGGPYKTEPATDLTRWRLHNELGRQRWTYYQAEEDPGREQTGLEAHSLGLDTTSYFKNLPKAQTAHEGALNGVTFYAKLQAEDGHWAGDYGGPLFLLPGLLITCHIAHIPLPAGYREEMVRYLRSVQLPNGGWGLHIEDKSTVFGTALSYVSLRILGIGPDDPDLVRARNILHKKGGAVAIPSWGKFWLAVLNVYSWEGINTLFPEMWLLPEWFPAHPSTLWCHCRQVYLPMSYCYATRLSASEDPLVQSLRQELYVEDYASIDWPAQKNNVCPDDMYTPHSWLLHVVYGLLNLYERFHSTSLRKWAIQLLYEHVAADDRFTKCISIGPISKTVNMLIRWSVDGPSSPAFQEHVSRIKDYLWLGLDGMKMQGTNGSQTWDTSFAVQALLEAGAHRRPEFLPCLQKAHEFLRLSQVPDNNPDYQKYYRHMHKGGFPFSTLDCGWIVADCTAEALKAVLLLQERCPSITEHVPRERLYDAVAVLLSMRNSDGGFATYETKRGGYLLELLNPSEVFGDIMIDYTYVECTSAVMQALRHFREYFPDHRATEIRETLNQGLDFCRKKQRADGSWEGSWGVCFTYGTWFGLEAFACMGHIYQNRTACAEVAQACHFLLSRQMADGGWGEDFESCEQRRYVQSAGSQVHSTCWALLGLMAVRHPDISAQERGIRCLLGKQLPNGDWPQENISGVFNKSCAISYTNYRNIFPIWALGRFSSLYPDNTLAGHI

SEQ ID NO: 185 - DNA, 487 bp, Rattus norvegicus
  ref <308>: DATABASE ACCESSION NUMBER: EMBL / AA893793
  ref <309>: DATABASE ENTRY DATE: 2000-03-03
tgtgaccttgagacatttgtaaacagcgaggcgaatgcagaatttcatgttgacagtcaaatggagaacaatagacatacccatggattgtaggtttccttacgctgtttttactgtgcactttttaaaattaggatttaatttcagtatgtaagaacaacaaatattttgtatattttcaaactcaattatatggtaatggatttggtatctgtggaatagatatatgtttctggataaaatgcttaaattgtcagatgtcaccacttcctgtattgtcatttcttcttataattgaaaaattgaaagacatctcagattccttttaaaagactctctccttgccctctctccgtcctttgccttccctttcctctgtcccctgggggtgacaagccttacagccctttagagcctgtggctttgctgtcatgtctgcagctgtacaaataactgtgttcaaataactgctaaaggaaatcctgtc

SEQ ID NO: 186 - DNA, 2261 bp, Homo sapiens
ccactccacaataggagacaccagctgaagatgcgagatattgctgggcaggccctggcttttgttcaggatcttgtgacggctcttctaaactttcatacctacacagaacagaggattcaaatttttcctgttgattctgccattgacactatatctccattgaatcagaagttctcacaataccttcatgaaaatgcgtcctatgtccgccctcttgaggaaggaatgcttcatttatttgaaagtatcactgaggatactgtgactgtcttggagacaactgtgaaattgaaaactttttcagaacacttaacctcctacatatgttttcttaggaagattcttccctatcagttaaaaagtttagaagaagaatgtgaatcctctctttgcacatctgcgttaagagccaggaatctagagctgtcccaggacatgaaaaaaatgacagctgtgtttgagaagctgcagacttacatagctcttcttgccttgccaagtacagagccagatggactccttcggacaaactacagttctgtgttaacaaatgttggtgctgctctgcatggatttcatgacgttatgaaagatatttccaaacattatagtcaaaaagctgcaatagagcatgaacttccaacagcaacacagaagctgataacaactaatgactgtatcctgtcatcagtagtggcattaacaaatggagcaggaaagattgcatccttcttcagcaacaatttggactacttcattgcttcactgagctatggacctaaggcagcgagtggattcattagtcctctttcagctgaatgcatgctacagtataagaaaaaagctgctgcctatatgaagtctttgagaaagcccctcttggagtctgtgccttatgaagaagcactggcaaaccgccgcatccttctcagctctactgaaagtcgagaaggccttgcacagcaagttcaacagagtttggaaaagatttctaaactggagcaggaaaaagaacattggatgttggaagcacaattagccaaaatcaagctagagaaagaaaaccagcgaattgcagataagctgaagaatacaggtagtgcccagctggttgggctggcccaggaaaatgctgctgtgtcaaatactgctggccaggatgaagccacagctaaggctgtgttggagcccattcagagcaccagtctaattgggactttaaccaggacatctgacagtgaggttccagatgtggaatctcgtgaagacttaattaaaaatcactacatggcaaggatagtggaacttacgtctcagttgcagctggctgacagtaagtcagtgcatttttatgccgagtgccgagcactgtctaaaagactggccttggctgaaaagtctaaggaagcattgacagaagaaatgaaacttgccagtcagaacatcagcagacttcaggatgagctgacaactaccaagaggagttacgaggatcagttaagtatgatgagtgaccacctgtgcagcatgaatgagacattatctaaacagagagaagagattgacacactaaagatgtccagtaaggggaattctaaaaagaacaagagtcgatagttttgaaatagctggttggcgactgttctttccagacctgctcctgctgcacagagccgcagggctgagaccacgtccatgctggctgccttcaggaagctaaagtattgttggacctagtaaactagtcagtgttggaaacggccttgaaatatttaaaacatatttgtaaccagtgaggcaaatacagaagttgatgtcggcagtaaatggaaaacaatacgtatgtcatggatattgtaggtttccttatgctgtttttactgtgcactttttaaaattaggttttaatttcagtatgtaagaacaaatattttgtatactttcaaactcaattatatggtaatcgatttggtatctatggaatagatatatgtttctggaaaaaaatgcttaaattgtcaaactgtcattacttcttattatagttgaaggcattctccagattctttttaaaagatttgttcatatttctctctctctctctctctctctctctctcttctttctctctgagggagagggagccctccaaacttcagatcctgtgggtttagtatcattatcttcagctctttgataccctgtgttagagtaatagctaaaggaagttcatgtcaataaattcatacttatatcac

SEQ ID NO: 187 - protein, 529 aa, Homo sapiens [sequence omitted]

SEQ ID NO: 188 - DNA, 3442 bp, Rattus norvegicus
  ref <308>: DATABASE ACCESSION NUMBER: Refseq / NM_012720
  ref <309>: DATABASE ENTRY DATE: 2003-01-14
agggaacctttcacagcagccaatacctgcagggcaacaaagaatcaaatgagagcgagacaagctgggaatgaagtcctggttgccagatgggagcttgaaaacacagtaagatgagtcaaaaagtggccaaggagggccccaggctctccaagaaccagaagttctcagagcacttcagcatccactgctgcccacccttcaccttcctcaactccaagcgtgagatcgtggaccgcaagtacagcatctgcaagagcggttgcttttaccagaagaaggaggaggactggatctgctgtgcctgccagaagaccagattgagaaggaggagcaggtcaaccccaagaaaaaagtgaccgagaagggacttctcgtgaatggacagcctctgcttgtggatttactgcttcaccgcaacccatctgccctcagacttatctggcctcgagtatgacgcaggggtggacacctgctgatgtaacaactacagatgccctcagtccccatggtgtgggagccttagggcagcctgcctggaggtgaggagggagctcttcatgccttactctagccacagagtcctggaaggacccctcgggctccagagctcagggaatgggtcttttggtttcatctggagcccttttctctctggcaggtgcacagttcctcagggtctttggcaaaggtgattacagagtcaatccacacacattcctcctccttccaattcccctctctccctgggtcaggttgacaacctggctctttttcctttccttcctaattctctgcctggcctctcttgatcacgtgacatctgtctcccattgaccttcttaatcaggagtggtcagagccaacgtccacactggtgaaggctcaggttatttttggagtaagatacagagttgctgtatgatccttaaatgcagcaatgttctcataagaatgggatcccgttaaatcttcacgtcaactgtaggtaacttgtgtcagaaacagagaaaagggggcatcttcctccctccccctctgcaggcccagtctccagcgttacacagggctttgtgagcaccagctcctgccccagtctggggataacaaccctctaaacactgactttgacttgtccccagtgcagttggcactcagcctcacagactctcagtgcagctctgactgctctcaattatataatttaggaaggtcatgtggcttcagccctgtcccccattccccatcacctcccttgaggcatcctggacaagtcccatgtgcacttgtataggtctagaaagaatgcttggagagtttctgtctccaggtcaaaattcctcaaattcctgggaagggcagaggcttgatgctccagtgttttccgtggctgaccctccacatctgggtctgtggtaagggagaagtcaagaaaaaggggaaaggaacttgactttctataaaggaaggtagtgtgtgtgtgtgtgtgtgtgtgtgtgtgtgtgtgtgtgtgtgtgtgtgtacgtgtgcacatgtgtgtgttagagagctagcaatccaagagtccttcccagactaggaggccaatccatggtatgaaggagtttgtgctcaactgtctatgtggagcagggttgggctgagtttctgtctccttgctctagtttgcctccacgatctgtagctcagactcttgggaaagaatgagcttcggtatggacacttgttctagaccataggagccaaccctcccccatggcacttgcttgtacctcatctgcactcttgctgtgaggacagagattgggccagatgtaaccgccttgtactgccttgtactcgtgtggactggcgtgtgggtgtcggcgttgggattagcttggggagatatttgccagctctcggttttcttgcccaagtgcagatgctagagagcccctccaagtcccaacttaattcttgcctccctgaagacctcaaccgtagaaggtcatcatgaaaaggccaccacttcagagtcctggcctaaactcagagtccacatgccttcccagcaggggccacagaggtgatccacttgggcctctttccccactcagcccagatgggtgggggtggagggtggagggtggaaggagaggagttggagaaaatccatgtctattcaggctccgtctgggtctgctgcacaacaacttcagcttgtttgagcccaaacttacataagttataatcacaaagctggaactagagaaagagagaaggacacacacacacacacacacacacacacacacacatacacacacactcatatatacacatacacacatatacacatatatacacatacacacgcatacacacatacacacatatacacacatacataacacacatacacatgcatacacacactcatatatacacatacacacatatacacatatatatacgcatacacacatacacacatatacacacatacataacacacatacacatgcatacacacacacacacacacacacacacacacacacacacacacaccctcgtcactcctcatccctcctaacattttctccttaggaggctagtagaagggaaggaagccgtttctatttacaaggaagtccggctcacggcccgggagatgactgccttgcaggcatgggggatagagttcggatccccgtgacccacgtgaaggctgggtaggcctggcagtggacctctaaatccaaactcagaaagtggagacaggagatgccagagcaagtcaagaggccatatccatgaactctgggactgatggagaaacccttccttcctccagtgaatatgattagaagacataggctgactcccagtgtcaaactcagggactccatgcacacacacccctgcatgctcctgcacatacacttgcaaacatgagcacacacacttcatacatccacatggaaatgggggtaagagaaacgagagagtacctggctcatggttcctctaggatgggcccaccctgcccaggacttagaagccctttccacacctagcaggaccacacgatttcttctgcctgttctctctcttgtacgtgtgaacaaacgggatgtgtcatccaccatggggctgtgtgcgcactcctagggcctcttgtgctctgacctccctgtcctacatggatgccctcggctcaaatatcaccccagagattcttccacggtcaccgactccgtcattctagtttgtcttcaggaatcatcactcacttgtttaattattgtttaattctcgctccaatgctttgcttaatgtaaatcccatggctgcccctttgatttctcctgtcttcccttgtctggcactaacaagacgtcaataaattcttgccgactgaaaaaaaaaaaaaaaaaaaaaaaaaaaaaaaaaaaaa

SEQ ID NO: 189 - protein, 81 aa, Rattus norvegicus
  ref <308>: DATABASE ACCESSION NUMBER: Refseq / NP_036852
  ref <309>: DATABASE ENTRY DATE: 2003-01-14
MSQKVAKEGPRLSKNQKFSEHFSIHCCPPFTFLNSKREIVDRKYSICKSGCFYQKKEEDWICCACQKTRLRRRSRSTPRKK

SEQ ID NO: 190 - DNA, 915 bp, Homo sapiens
  ref <308>: DATABASE ACCESSION NUMBER: Refseq / NM_006501
  ref <309>: DATABASE ENTRY DATE: 2002-02-10
acagtgagatgagtcagaaaccggccaaggagggtcccagactctccaaaaaccagaagtactccgaacacttcagcatacactgctgcccgccgttcaccttcctcaattccaagaaggagatagtggatcggaaatacagcatctgtaagagcggctgcttctaccagaagaaagaggaggactggatctgctgcgcctgccagaagaccagaaccagccgccgtgccaagtcccctcagaggcccaagcaacagccagctgcgccccccgcggtggtcagagcgccagccaagccacggtcccctccgaggtctgagcgtcagccacggtcccctccgaggtctgagcgtcagccacggtcccctccgaggtctgagcgtcagccacggtcccctccgaggtctgagcgtcagccacgtccccgcccagaggtccgaccaccgccagccaagcagcgtccccctcagaagtccaagcaacagccgcgcagcagccccctcagagggccaggcgccagccgtggggggtcccccgtcaaagcttctaggttctgattgaaaaggaggatcaggccaaccccaaagaagaagtgaccaaggaggagtttaaactgaatgaacaacctcggctcctggactcattgcttcacaacccatctacccctggatgaagttatctggcttcaaatattatgcaggggcaaacacctgctgatgtggcaactgctgatgctcatggtccccatggcatgggggcctcagggcagcctgcctggagtactttgaagatgtcatcccattgtcttctgacctctataattgccactgagagatctgctgtcagtctgcttatccttccacggactcaagtttcttcaatctgaagatacatgtctttctccagggacatgtg

SEQ ID NO: 191 - protein, 182 aa, Homo sapiens
  ref <308>: DATABASE ACCESSION NUMBER: Refseq / NP_006492
  ref <309>: DATABASE ENTRY DATE: 2002-02-10
MSQKPAKEGPRLSKNQKYSEHFSIHCCPPFTFLNSKKEIVDRKYSICKSGCFYQKKEEDWICCACQKTRTSRRAKSPQRPKQQPAAPPAVVRAPAKPRSPPRSERQPRSPPRSERQPRSPPRSERQPRSPPRSERQPRPRPEVRPPPAKQRPPQKSKQQPRSSPLRGPGASRGGSPVKASRF

SEQ ID NO: 192 - DNA, 2040 bp, Rattus norvegicus
  ref <308>: DATABASE ACCESSION NUMBER: Refseq / NM_017354
  ref <309>: DATABASE ENTRY DATE: 2003-01-14
caacttaagaaagtgctggatttcccgttgttcgattgaggaaccgtagaccacatctgggtagctggattcagcccagccacagccccgttggataccaaagtgcttactcctgtccaaagtgccatgcctgaactgctacggggaagaggcagcttctgagacccgcacctgtgcgcctgcttgcctgccttgcgcttctctctcctggccaccttcctggccacaggcagcacggagaaagtccgcctcggatgtgtgtggaaactggttctcagaggctgcgagctgaggctggatttaggggaggaatattagacttggaggagtctgcgcgcttttctcctcccagtgcatcgcgcggtcgccgctagttcatcgctgggtccccgcgctcactccccaccccacccacttcctgtgctcgcccggggggcgtgtgcgtgccactaccggagttctgggaagttgtggctgtcgagaatgggggtctgtgggtacctgttcctgccctggaagtgcctcgtggtcgtgtctctcaggctgctgttccttgtacccacaggagtgccggtgcgtagcggagatgccacctttcccaaagctatggacaacgtgacggtcaggcagggggagagcgccaccctcaggtgcacaattgacaaccgagtcacccgggtggcctggctaaaccgcagtaccatcctctatgctggaaatgacaagtggtgcctagatcctcgtgtggttctcctgagtaacacccagacccagtacagcattgagatccagaatgtggatgtgtatgatgagggcccttatacctgctcggtgcagacagacaaccaccctaagacctccagggtccacctcattgtacaagtatctcccaaaattgtagagatttcttcagatatctccattaatgaagggaacaacatcagcctcacttgcatagccacaggtagaccggagcctacagtaacctggagacatatttctcccaaagctgtcggctttgtgagtgaggatgagtacctggagatccagggcatcactcgggagcagtcaggcgagtatgagtgcagcgcctccaacgacgtggcagcaccagtcgtacgaagagtgaacgtcaccgtgaactatccaccatacatctcagaagctaagggtacaggtgtccccgtggggcagaaggggactctgcagtgtgaagcctcggcagtcccttcagcagaatttcagtggttcaaggatgacaaaagactggttgaagggaagaagggagtcaaagtggaaaacagacctttcctttcaagactcacctttttcaacgtctctgaacacgactatgggaactacacatgtgtggcatccaacaagttgggccacaccaatgccagcatcatgctatttggcccaggtgctgtcagcgaggtcaacaatgggacgtcaaggagggcaggctgcatttggctcctccctcttctggtcttacacctgctcctcaaattttgatgtgagtgccccttccctgccggggagagctgctgccaccgcatctcaattcaacagcactgcaacatgaagcaacaagtcagaatcaaatgaaattccgagaatcacagccaatgagacagaaattcgagggaggggaacaaagcatactgtggtaaaggggaaaaaaaaagtctaaaaaaaggaaatttgaaaattgccttgcagacatttcggtaccactgagttttctttcttttcccaaatgggaagaaggcgcacctagcttggacccacccacaagctgcactgtgtgacctctctgttgccagggtgggcaagggctcagccactctgcccactaaagtgccccaccatggaacattctggagtcggccatcccaaatttcatcggtccatagacacaagcacagagtgagaaacaggggcccagaagtgccacggagggccctttggtgggctgcgcgatggtggcgtgtgtcatgaagtgtgaaatccgaagtagaaaaaaaacaagaataa

SEQ ID NO: 193 - protein, 344 aa, Rattus norvegicus
  ref <308>: DATABASE ACCESSION NUMBER: Refseq / NP_059050
  ref <309>: DATABASE ENTRY DATE: 2003-01-14
MGVCGYLFLPWKCLVVVSLRLLFLVPTGVPVRSGDATFPKAMDNVTVRQGESATLRCTIDNRVTRVAWLNRSTILYAGNDKWCLDPRVVLLSNTQTQYSIEIQNVDVYDEGPYTCSVQTDNHPKTSRVHLIVQVSPKIVEISSDISINEGNNISLTCIATGRPEPTVTWRHISPKAVGFVSEDEYLEIQGITREQSGEYECSASNDVAAPVVRRVNVTVNYPPYISEAKGTGVPVGQKGTLQCEASAVPSAEFQWFKDDKRLVEGKKGVKVENRPFLSRLTFFNVSEHDYGNYTCVASNKLGHTNASIMLFGPGAVSEVNNGTSRRAGCIWLLPLLVLHLLLKF

SEQ ID NO: 194 - DNA, 3735 bp, Rattus norvegicus
  ref <308>: DATABASE ACCESSION NUMBER: EMBL / X67241
  ref <309>: DATABASE ENTRY DATE: 1993-12-03
atgcagaaagccatccgactgaacgatggccacgtcgtgtccctgggactgctggcccagagagacggtacgcgcaaaggctacctgagcaagaggagttcggacaacccaaaatggcaaaccaagtggtttgcgctgctgcagaacctgctcttctacttcgaaagtgactcgagctctcggccctcggggctctacctgctggagggcagtatctgcaaacgcatgccctcccccaagcgagggacctcctccaaggagtccgacaaacagcatcattacttcacagtgaacttctccaatgacagccagaagtccctagagctgaggaccgatgactccaaggactgtgacgagtgggtggcagcgattgctcgcgccagctacaagatactggccacagagcatgaggcgctcatgcagaagtacctgcacctgctgcaggtggtggagacagagaagaccgtggctaagcagctgcgacagcagctcgaggatggcgaggtcgagatcgagcgcctgaaggcagagattgcaaacctgatcaaggacaatgaacgtatccagtccaaccagctggttgcccctgaggatgaggacagtgacatcaagaaaattaagaaggtacagagtttccttcgcggatggctgtgccggcgaaagtggaagaacatcatccaggactacatccggtctcctcatgccgacagcatgcgcaagaggaaccaggtggtgttcagcatgctggaagctgaggccgagtacgtgcagcaactacacatccttgtcaacaattttctgcgcccactgcgcatggccgccagctctaagaaaccccctataacacatgacgacgtcagcagtatctttctgaacagtgagaccatcatgttcctgcaccagatcttctaccaaggcctgaaggcccgtatcgccagctggcccaccctggttctggcggacctgttcgacatcctgctgccaatgcttaacatctaccaggagttcgtccgcaaccaccagtacagtctccagatcctagcacactgcaagcaaaaccgggactttgacaagctcctcaagcagtatgaggccaagccagactgcgaggagcgcacactggagaccttcctcacctatccaatgttccagatccccaggtacatcctgacactccatgagctgctggcccacacacctcatgagcatgtggagcgcaacagcctggactatgccaaatccaaactagaggagctgtccagggtcatgcacgacgaagtcagtgagaccgagaacatccgcaaaaacctggccattgagcgtatgatcaccgagggctgtgagatcctccttgacaccagccagacctttgtgcgccaaggttccctcatccaggtgcccatgtcagaaaagggcaagatcaacaagggccgcctggggtctctgtcccttaagaaagaaggtgagcgccagtgtttcctgttctccaagcatctcatcatctgcaccagaggctctggtagcaaactgcacctaaccaagaatggcgtgatttccctcattgactgcactctactggatgatccagaaaacatggatgatgacggcaaaggacaagaggtagatcacctggactttaagatttgggtggagccaaaggattccccacccttcacagtcatcctggtggcctcatccaggcaggagaaggcggcatggaccagtgacatcatccagtgcgtggataatatccgctgcaacgggctcatgatgaatgcctttgaagaaaattccaaggtcaccgtgccgcagatgatcaagtctgatgcttccttatactgtgatgatgttgacattcgcttcagcaaaaccatgaattcttgcaaagtgctgcagatccgctatgccagcgtggagcgcctgctggagcgcctgactgatcttcgcttcctgagtattgactttctcaacaccttcctgcactcctatcgagtcttcaccgatgctgtggtggtcctagacaagctgatcagcatctacaaaaagcccatcactgcgattcctgccaggtcactggaactcctgttctccagtagccacaacaccaaacttctgtacggagatgcccccaagtcgcctcgtgccagccgcaagttctcctcgccgccgcccttggccatcggcacttcgtccccagtccgccgccggaagttgtctctcaacattcccatcatcacaggcggcaaggcgctggaactggcttcgctcgggtgcccctccgacggctacaccaacatacactcgcccatatctcccttcggcaaaaccacgctggacaccagcaagctctgtgtggccagcagcttgaccagaacgccggaggagattgatatgaccactctagaggagtcatcaggcttcaggaagccgacctcagacatcttgaaagaagagtctgatgatgaccagagtgatgtagacgacacagaagtgtctccaccaacaccgaaatcattcagaaacagaatcactcaagagttcccactctttaactacaacagtggaatcatgatgacatgtcgcgatctgatggacagtaaccgcagccctctgtcagctacctctgcctttgccatagcgactgcaggagccaatgaaagccccgcaaacaaggagatatatcgaaggatgtctttggccaacacagggtattcctctgaccagagaaatatcgacaaagagttcgtgatccgcagagcggccaccaaccgtgtactgaatgtgttgcgccactgggtcaccaagcactcccaggactttgaaactgacgacctcctcaaatacaaggtgatctgctttctggaagaggtcatgcatgacccagaccttctaccacaagagcgaaaggcagcagccaacatcatgaggactctgacccaggaagaaataactgaaaaccatagcatgctggatgagctcttactaatgacggagggtgtgaagactgagcccttcgaaaaccactcagccatggagatagcagagcagctgaccctgctggatcaccttgtcttcaagagtattccttatgaggaattctttggccagggctggatgaaggcagataagaatgaaaggacaccttacattatgaaaaccaccagacatttcaaccatatcagtaacttgatcgcttcagaaattctccgaaacgaggaggtcagtgcaagggcaagcaccatcgagaagtgggtggctgttgccgacatttgccgctgcctgcacaactacaatgctgtgctggagatcacttcctccatcaaccgcagcgcaatcttccgactcaagaagacatggctcaaagtttctaagcagacgaaatctctgtttgacaagctccaaaagcttgtgtcatcagatggccgatttaagaacctcagagaaactttgcgaaattgtgatccaccctgtgtcccttacctggggatgtacctgaccgacttggcattcctcgaggaaggaacacccaattacacagaggacggcctggtcaacttctccaagatgaggatgatctcccatattatccgcgagattcgccagtttcagcagactacttacaaaatcgagccccagccaaaggtaactcagtacttagtggatgaaacctttgtgttggacgacgaaagtctgtatgaggcctccctccgaattgaaccaaaactccccacatga

SEQ ID NO: 195 - DNA, 1446 bp, Rattus norvegicus
  ref <308>: DATABASE ACCESSION NUMBER: Refseq / NM_017139
  ref <309>: DATABASE ENTRY DATE: 2003-01-14
ctcggaaggacaggatgccatgccatcgggaagacaggactccccaaggagaacaggatgccatcagggagacaggactcccccgtggaagataggatacctccaggaagacagaatgccccccaggcagccctgggacagcgggaaacactagggaccaagctatccctggttcactcgggattttgttgggttgtgggcggggctcaggaaagattgtccctgctggtcctgctccacgaccacccacccggcaaggttccctcctagagaaccttgtcagagacagaacgggtccccacaggcgcattcttctttccaacacccatggcgcagttcctgagactttgcatctggctcgtagcgcttgggtcctgcctcctggctacagtgcaggcagactgcagccaggactgcgctaaatgcagctaccgcctggtacgtcccggcgacatcaacttcctggcatgcacactcgaatgtgaagggcagctgccttctttcaaaatctgggagacctgcaaggatctcctgcaggtgtccaagcccgagttcccttgggataacatcgacatgtacaaagacagcagcaaacaggatgagagccacttgctagccaagaagtatggagggttcatgaaacggtatggaggcttcatgaagaagatggatgagctttaccccgtggagccagaagaagaggccaatggaggcgagatccttgccaagaggtatggcggtttcatgaagaaggatgcagatgagggagacaccttggccaactcctccgacctgctgaaagagctactgggaacaggagacaaccgtgcgaaagatagccaccaacaggaaagcaccaacaatgatgaagacagcacgagcaagaggtatgggggcttcatgagaggcctcaaaagaagcccccagctggaagacgaagcaaaggagctgcagaagcgctatgggggcttcatgagaagggtcgggcgccccgagtggtggatggactatcagaagagatacggaggcttcctgaagcgctttgctgagtctctaccctcggatgaagaaggcgaaagttactctaaagaagttcccgagatggaaaaaagatacggaggctttatgcggttttgaagcccttcccagcagtgatcccgggcccccactagcctgctccatcccccgtgagcaactgccccatcagtgatgtttcttgtcatgtgctgcttgtgctgtacagttgccctcgtggtctggataactgctgcctgaaagctgtgatttttagggggttgtctgtattcttttgagtcttgaagctcagtattggtctcttgtggctatgttatcatgctgaaacagtctgttacctcatcccttctgacaaaacgtcaataaatgcttatttgtatataaaaataataaacccgtgaacccaactgc

SEQ ID NO: 196 - protein, 269 aa, Rattus norvegicus
  ref <308>: DATABASE ACCESSION NUMBER: Refseq / NP_058835
  ref <309>: DATABASE ENTRY DATE: 2003-01-14
MAQFLRLCIWLVALGSCLLATVQADCSQDCAKCSYRLVRPGDINFLACTLECEGQLPSFKIWETCKDLLQVSKPEFPWDNIDMYKDSSKQDESHLLAKKYGGFMKRYGGFMKKMDELYPVEPEEEANGGEILAKRYGGFMKKDADEGDTLANSSDLLKELLGTGDNRAKDSHQQESTNNDEDSTSKRYGGFMRGLKRSPQLEDEAKELQKRYGGFMRRVGRPEWWMDYQKRYGGFLKRFAESLPSDEEGESYSKEVPEMEKRYGGFMRF

SEQ ID NO: 197 - DNA, 3123 bp, Rattus norvegicus
  ref <308>: DATABASE ACCESSION NUMBER: EMBL / X89963
  ref <309>: DATABASE ENTRY DATE: 1998-01-29
ataacaattcacacagaacacgtatgaccatgattacgccaagctcgaaattaaccctcactaaagggaacaaaagctggagctccacgcggtgcggcgccttcctcctactgcacctggtcctgcagccgtggcagcgggcgggcgcccaggccacaccccaggtctttgaccttctgccatcctccagccagaggctgaacccggccgccctgcagccagtcctgacagaccccaccctgcacgagctctatgtcatctccaccttcaagctgcagagtaagagctcagccaccatctttggcctctactcctcgagtgacaacagcaaatactttgaattcactgtgatgggacgcctgaacaaagccatcctccgttacctaaaggatgatgggaagattcatctggtggttttcaacaacctgcagctggcggatgggaggcgccaccggattctcctgagactcagcaatttgcagagaggggccggctccgtagaactctacttggactgtgtccaggttgattcagtgaacaacctccccagagccttctctggtctcacccagaacccacaggccattgaattgagaacattccagaggaagccccaggacttcttggaagagctgaagctggtggtgaggggctctctgttccaggtggccagcctacaagactgtttcctgcagcagagtgagccgctggctgccacaggcacaggagactttaatcgacagtttttgggtcaaatgacacaattaaaccagctccttggagaggtgaaagatcttctgaggcagcaggtcaaggaaacatcatttttgcgaaacactattgctgagtgccaggcttgtggccctctcagcttccagtccccaaccccaaacacgctggtgcccatagctcctccagcacccccaacccgaccaacacgtcgctgtgactccagcccttgtttccgaggtgtccgatgcacggacaccagggacggcttccaatgtggaccctgcccagatggctacacggggaacgggatcacctgttctgacgtggatgagtgtaaataccatccctgctaccctggtgtgcgctgcacaaatttggctccgggtttcagatgtgacgcctgtccagtaggcttcacggggcccatggtgcagggcgtggggatcaactttgccaaaacaaacaagcaggtgtgcactgatgttgacgagtgtcggaacggagcgtgtgttctgaactccatctgcattaacactctgggctcttaccgctgtgggccttgcaagccagggtacactggtgaccagacgaggggatgcaggaccgaaaggagctgccggaacccagagcagaacccgtgcagtgtgcatgcgcagtgcattgaggaacggcaaggggatgtgacgtgtgtgtgcggtgttggttgggccgggcgagcgggctatgtctgtggaaaggatgtggacatcgacagttaccccgatgaagaactgccgtgctcagccaggaactgcaagaaggataactgcaagtatgtgccaaactccggccaagaagacgcagacagagatggcattggagacgcctgtgatgaggatgcggatggagacgggatcttgaatgagcaggacaactgtgtcctgactcacaatgtggaccagaggaacactgataaagatatctttggggatgcctgtgacaactgccggggcgtcctgaataatgaccagaaggacactgacggggatgggaaaggagacgcctgtgatgacgacatggatggagacggaataaaaaacattttggacaactgtccccgagttcccaaccgcgaccaacaggatcgggatggcgatggtgtcggagacgcctgtgacagctgtcctgatgtcagtaaccctaaccagtcggatgtggataacgatctggttggggactcctgtgacaccaaccaagacagtgatggggatggccaccaggacagcacagacaactgccccaccgtcattaacagcgcccagctggacaccgacaaggacgggattggcgatgaatgcgatgacgatgacgataatgacggcatgccagacctgttcccccctggcccagacaactgcaggcttgttcccaacccagcccaggaagatagcaacaatgatggagtaggagatatctgtgaagctgacttcgaccaggacaaggtcattgatcgcattgatgtgtgtcctgagaatgcggagatcaccctgactgacttcagggcctatcagactgtggtcctggaccctgaaggggatgcccagatcgaccccaactgggtggtcctgaaccagggcatggagattgtgcagaccatgaacagtgaccctggcctagcagtcgggtacacggcatttaatggagttgactttgaagggaccttccacgtaaacacccagacagatgacgactatgccggctttatttttggttaccaagacagttccagcttctatgtcgtcatgtggaaacagacagagcagacatactggcaggctacgccattccgtgcagtagcagaacctggtattcagctcaaggccgtgaagtctaaaactggcccaggggaacatctccgaaactccctgtggcacacaggggacaccagcgaccaggtcaggctgctgtggaaggactccaggaatgtgggctggaaggacaaggtgtcctaccgctggttcctgcagcataggccccaggtgggctacatcagggtgcggttttatgaaggctcagagttggtggctgactccggggtcactatagacaccaccatgcgcggaggccgactgggtgtgttctgcttctctcaggaaaacatcatctggtccaacctcaagtaccgctgtaacgacaccataccagaggacttccaggagttccagatccagacctttgaccgcctggataattaaaccaagaaggcaatctcacaactgccttctaaacgcaaaccaacatcttttgtttaaaacttcctataattctctttatattaccgtggcttttcttttaccaagcccaaatacttcaaaactttttatacgaaataaagaagagactatttctaat

SEQ ID NO: 198 - DNA, 2976 bp, Rattus norvegicus
  ref <308>: DATABASE ACCESSION NUMBER: Refseq / NM_053633
  ref <309>: DATABASE ENTRY DATE: 2003-01-14
gcgattcattaattgctgggcgaggggacacactgactgttataataacactacatcagcaactcctggctccccaacagccggatcccaggcaggagagagtcagtggcagatagccatttttttttcttccttaagaagccaacaacttggttgctagttttatttctgttagaatttttttttttgtgtgtgtgtggatgtgtggtggtggtggtcttttctaagtgtggagggcaaaaggagataccatcccaggctcagtccaacccctctccaaaaacggcttctctggcactccaggtagcgagggagttgggtctccaggttgtgcgaggagcaaatgatgaccgccaaggccgtagacaaaatcccagtaactctcagtggttttatgcaccagctgcctgacagcctctacccggtggaagacctcgccgccccgtcggtgaccatcttccccaatggtgaactgggaggcccctttgatcagatgaacggagtggctggagatggcatgatcaacattgacatgaccggagagaagaggcccttggatctcccatatccgagtagcttcgctcccatctctgcgcctagaaaccagaccttcacttacatgggcaaattctccattgaccctcagtaccctggtgccagctgctacccagaaggcatcatcaatattgtgagtgcgggcatcttgcaaggggtcacccctccagcttcaaccacagcctcttccagcgtcacctctgcctcccccaacccactggccacgggacccctgggtgtgtgtaccatgtcccagactcagcctgaactggaccacctctactctccaccaccacctcctcctccttattcgggctgtacaggagacctctaccaggatccttcagcattcttatcgccgccacccaccacttccacctcctctctggcctaccagccacctccttcctacccatcccccaagccggctatggacccaggtctcattcctatgatcccagactatcctggattttttccatctccgtgccagagagatccacatggcgcggctggccctgatcgaaagccgttcccctgccctctggactccctgcgggtcccccctccgctcacgccactctccaccatccgtaattttactcttggggggcccagtgctggcgtcacgggaccaggggcaagtggaggcggtgagggtccccgactgcctggcagtgggtctgcagcagtgactgctaccccctacaatccgcaccacctgcctttaaggcccatcctgagacctcgaaagtaccccaacaggcccagcaagacgccagtgcacgaaaggccgtacccctgcccagcagagggttgcgacaggaggttctcacgctctgatgagctgaccaggcacatccgaatccacaccggtcacaagcccttccagtgtcggatctgcatgcgaaacttcagccgaagtgaccacctcaccactcacatccgcacccacaccggggagaagccctttgcctgtgactattgtggccgtaagtttgcccggagtgacgaaaggaagcgccacaccaagatccaccttcgccagaaggagaggaagagcagtgccccctcgtcatctgcatccgcccagtcttcagcctctggtcctgggggctcgcaggccgggggcagcctgtgcggtaacagcgccattggaggaccactggcctcctgcacctctcggaccaggaccccgtgagatgaagctccagctgacacaccagtttcttcaggccccagaggccctctatccactcgagctgcaaacactaccgcccttctgtgttcttccccgtgatcccgtgaacctgtgatcctgggcaaaggaccctaatggagcccagctctgtcccaccttctcacagacggccttctgaaaacttaggccattttaaaggagttgactgtcactccaagaaatggggagccagaagagggctgggcgagggcccctggcctacagggctgtgctctaaccctgacagagagatgtttgactatggtctgcgagcccttccctttgaccctcgatgccagttgctctgagactttttctacaataggttgggagttgttgattcctttgagcaaggacagcgaaaaagactaaattaaagcaaaaccgatgtggcactttaatggcttgggacggacttggggtaggggtggggggttgtacagtgagcacagtttagccctggcctggccgcagcactctgtggccctagaacagtgaatggaagtttctcgagccatctcagcccttaagcaatatgtcctataaactcaagagaacgaacggaagtgcaatgtcgggaaggacaaagcaatattggctcctttttgttgagaaacaaagattatttttccagtgtatatccatttagatttttgtgtattttttttttttgatgtgcactgttctccgagttctgaacctttgggaaaaaagtgtaaaacatttatgatctcttgaatcgagtcaaaagttaacttatttaaaggggggtgtacataggatgcatgcagtggtgttgcaagtgtcctctgtgccttgtgtgatgtgggcagtgttacagggtctgcatgtgtacaggatgccttactatgaaaaaaaaatcactccctgggtttaagtatggctgtatatttctgcctattaatatttggaatttttttagaaagtatatttttgtatgctctgttttgtgacttgaaagtgttaccttcgcagtcaaatttcagatgagagtgtgcttaacgtcactgcagctgacttgtttggttattagctcttaatagttgtggaaagattaaacaatctattctaacacagaaccactaactggagttcagatatcggacggcttatggcaatggtgtaaaataaatacttttcaacaataaaaaaaaaaaaaa

SEQ ID NO: 199 - protein, 470 aa, Rattus norvegicus
  ref <308>: DATABASE ACCESSION NUMBER: Refseq / NP_446085
  ref <309>: DATABASE ENTRY DATE: 2003-01-14
MMTAKAVDKIPVTLSGFMHQLPDSLYPVEDLAAPSVTIFPNGELGGPFDQMNGVAGDGMINIDMTGEKRPLDLPYPSSFAPISAPRNQTFTYMGKFSIDPQYPGASCYPEGIINIVSAGILQGVTPPASTTASSSVTSASPNPLATGPLGVCTMSQTQPELDHLYSPPPPPPPYSGCTGDLYQDPSAFLSPPPTTSTSSLAYQPPPSYPSPKPAMDPGLIPMIPDYPGFFPSPCQRDPHGAAGPDRKPFPCPLDSLRVPPPLTPLSTIRNFTLGGPSAGVTGPGASGGGEGPRLPGSGSAAVTATPYNPHHLPLRPILRPRKYPNRPSKTPVHERPYPCPAEGCDRRFSRSDELTRHIRIHTGHKPFQCRICMRNFSRSDHLTTHIRTHTGEKPFACDYCGRKFARSDERKRHTKIHLRQKERKSSAPSSSASAQSSASGPGGSQAGGSLCGNSAIGGPLASCTSRTRTP

SEQ ID NO: 200 - DNA, 2984 bp, Homo sapiens
  ref <308>: DATABASE ACCESSION NUMBER: Refseq / NM_000399
  ref <309>: DATABASE ENTRY DATE: 2001-12-20
taactgagcgaggagcaattgattaatagctcggcgaggggactcactgactgttataataacactacaccagcaactcctggcttcccagcagccggaacacagacaggagagagtcagtggcaaatagacatttttcttatttcttaaaaaacagcaacttgtttgctacttttatttctgttgatttttttttcttggtgtgtgtggtggttgtttttaagtgtggagggcaaaaggagataccatcccaggctcagtccaacccctctccaaaacggcttttctgacactccaggtagcgagggagttgggtctccaggttgtgcgaggagcaaatgatgaccgccaaggccgtagacaaaatcccagtaactctcagtggttttgtgcaccagctgtctgacaacatctacccggtggaggacctcgccgccacgtcggtgaccatctttcccaatgccgaactgggaggcccctttgaccagatgaacggagtggccggagatggcatgatcaacattgacatgactggagagaagaggtcgttggatctcccatatcccagcagctttgctcccgtctctgcacctagaaaccagaccttcacttacatgggcaagttctccattgaccctcagtaccctggtgccagctgctacccagaaggcataatcaatattgtgagtgcaggcatcttgcaaggggtcacttccccagcttcaaccacagcctcatccagcgtcacctctgcctcccccaacccactggccacaggacccctgggtgtgtgcaccatgtcccagacccagcctgacctggaccacctgtactctccgccaccgcctcctcctccttattctggctgtgcaggagacctctaccaggacccttctgcgttcctgtcagcagccaccacctccacctcttcctctctggcctacccaccacctccttcctatccatcccccaagccagccacggacccaggtctcttcccaatgatcccagactatcctggattctttccatctcagtgccagagagacctacatggtacagctggcccagaccgtaagccctttccctgcccactggacaccctgcgggtgccccctccactcactccactctctacaatccgtaactttaccctggggggccccagtgctggggtgaccggaccaggggccagtggaggcagcgagggaccccggctgcctggtagcagctcagcagcagcagcagccgccgccgccgccgcctataacccacaccacctgccactgcggcccattctgaggcctcgcaagtaccccaacagacccagcaagacgccggtgcacgagaggccctacccgtgcccagcagaaggctgcgaccggcggttctcccgctctgacgagctgacacggcacatccgaatccacactgggcataagcccttccagtgtcggatctgcatgcgcaacttcagccgcagtgaccacctcaccacccatatccgcacccacaccggtgagaagcccttcgcctgtgactactgtggccgaaagtttgcccggagtgatgagaggaagcgccacaccaagatccacctgagacagaaagagcggaaaagcagtgccccctctgcatcggtgccagccccctctacagcctcctgctctgggggcgtgcagcctgggggtaccctgtgcagcagtaacagcagcagtcttggcggagggccgctcgccccttgctcctctcggacccggacaccttgagatgagactcaggctgatacaccagctcccaaaggtcccggaggccctttgtccactggagctgcacaacaaacactaccaccctttcctgtccctctctccctttgttgggcaaagggctttggtggagctagcactgccccctttccacctagaagcaggttcttcctaaaacttagcccattctagtctctcttaggtgagttgactatcaacccaaggcaaaggggaggctcagaaggaggtggtgtggggatcccctggccaagagggctgaggtctgaccctgctttaaagggttgtttgactaggttttgctaccccacttccccttattttgacccatcacaggtttttgaccctggatgtcagagttgatctaagacgttttctacaataggttgggagatgctgatcccttcaagtggggacagcaaaaagacaagcaaaactgatgtgcactttatggcttgggactgatttgggggacattgtacagtgagtgaagtatagcctttatgccacactctgtggccctaaaatggtgaatcagagcatatctagttgtctcaacccttgaagcaatatgtattatatactcagagaacagaagtgcaatgtgatgggaggaacgtagcaatatctgctccttttcgagttgtttgagaaatgtaggctattttttcagtgtatatccactcagattttgtgtatttttgatgtacccacactgttctctaaattctgaatctttgggaaaaaatgtaaagcatttatgatctcagaggttaacttatttaagggggatgtacatattctctgaaactaggatgcatgcaattgtgttggaagtgtccttggtcgccttgtgtgatgtagacaaatgttacaaggctgcatgtaaatgggttgccttattatggagaaaaaaatcactccctgagtttagtatggctgtatatttatgcctattaatatttggaattttttttagaaagtatatttttgtatgctttgttttgtgacttaaaagtgttacctttgtagtcaaatttcagataagaatgtacataatgttaccggagctgatttgtttggtcattagctcttaatagttgtgaaaaaataaatctattctaacgcaaaaccactaactgaagttcagatataatggatggtttgtgactatagtgtaaataaatacttttcaacaat

SEQ ID NO: 201 - protein, 476 aa, Homo sapiens
  ref <308>: DATABASE ACCESSION NUMBER: Refseq / NP_000390
  ref <309>: DATABASE ENTRY DATE: 2001-12-20
MMTAKAVDKIPVTLSGFVHQLSDNIYPVEDLAATSVTIFPNAELGGPFDQMNGVAGDGMINIDMTGEKRSLDLPYPSSFAPVSAPRNQTFTYMGKFSIDPQYPGASCYPEGIINIVSAGILQGVTSPASTTASSSVTSASPNPLATGPLGVCTMSQTQPDLDHLYSPPPPPPPYSGCAGDLYQDPSAFLSAATTSTSSSLAYPPPPSYPSPKPATDPGLFPMIPDYPGFFPSQCQRDLHGTAGPDRKPFPCPLDTLRVPPPLTPLSTIRNFTLGGPSAGVTGPGASGGSEGPRLPGSSSAAAAAAAAAAYNPHHLPLRPILRPRKYPNRPSKTPVHERPYPCPAEGCDRRFSRSDELTRHIRIHTGHKPFQCRICMRNFSRSDHLTTHIRTHTGEKPFACDYCGRKFARSDERKRHTKIHLRQKERKSSAPSASVPAPSTASCSGGVQPGGTLCSSNSSSLGGGPLAPCSSRTRTP

SEQ ID NO: 202 - DNA, 1067 bp, Rattus norvegicus
  ref <308>: DATABASE ACCESSION NUMBER: Refseq / NM_019186
  ref <309>: DATABASE ENTRY DATE: 2003-01-14
acggaggaccgtcagccagcaatcgcgtagctcgatcgatcacccaggaagagaaattgtaagcagataagaagaacgcgttcggtttgggacaccatttgcagctggaaatggggaatggactgtcagaccagacttccatcctatccagcctgccgtcctttcagtcctttcacattgttattctgggtttggactgtgctggaaagacaacagttttatacaggctgcagttcaacgaatttgtaaatactgtacctaccaaaggatttaacactgagaaaattaaggtaaccttgggcaattccaaaacagtcacttttcacttctgggatgtaggtggtcaagagaaattaagaccactgtggaagtcatatacccgatgcacagatggcattgtgtttgtggtggactctgttgatgttgagagaatggaagaagccaaaactgaacttcataaaataactaggatatcagaaaatcagggagtccctgtgcttattgttgctaacaaacaagacctgaggaactcactctctctctcagagatcgagaagttgttagcaatgggtgaactgagctcatcgactccttggcatttacagcccacctgtgcaatcataggagatgggctaaaggaaggacttgagaaactacatgatatgataattaaaagaagaaaaatgttgcggcaacagaaaaagaagagatgaatggcagtacttttatatcggtgtggaataggttttacttggtctgatttctgacaagctgaagagtgtctacagcctggtttgcctgtctgccctcacggatgctattaaagctttgttttgttgaacagtcagatacccaactctgttgccttgtggaagatgagtaaatgcaatgcttcttaaaggggtctcttctccgtgacccacaaatcttttggtactaccattttgggaagccaaaaaaggctagtaattgaccagaaaacaattttgtggaaatttgacctgaagttagtgaaataaaactttgaagagtgtaaaaaaaaaaaaaaaaaaaaaaaaaaaaaaaaa

SEQ ID NO: 203 - protein, 200 aa, Rattus norvegicus
  ref <308>: DATABASE ACCESSION NUMBER: Refseq / NP_062059
  ref <309>: DATABASE ENTRY DATE: 2003-01-14
MGNGLSDQTSILSSLPSFQSFHIVILGLDCAGKTTVLYRLQFNEFVNTVPTKGFNTEKIKVTLGNSKTVTFHFWDVGGQEKLRPLWKSYTRCTDGIVFVVDSVDVERMEEAKTELHKITRISENQGVPVLIVANKQDLRNSLSLSEIEKLLAMGELSSSTPWHLQPTCAIIGDGLKEGLEKLHDMIIKRRKMLRQQKKKR

SEQ ID NO: 204 - DNA, 1077 bp, Homo sapiens
  ref <308>: DATABASE ACCESSION NUMBER: Refseq / NM_005738
  ref <309>: DATABASE ENTRY DATE: 2000-11-01
cttatccctgcgtagaaacgcctgccaatgctttctcatttggacccagactccagatcgggagcagtcttatagctggatcagctaccaagagaagttgtaaaccaagaagagaaaagcatttcaatttgggacatttatttgcacctggaaatggggaatgggctgtcagaccagacttctatcctgtccaacctgccttcatttcagtctttccacattgttattctgggtttggactgtgctggaaagacaacagtcttatacaggctgcagttcaatgaatttgtaaataccgtacctaccaaaggatttaacactgagaaaattaaggtaaccttgggaaattctaaaacagtcacttttcacttctgggatgtaggtggtcaggagaaattaaggccactgtggaagtcatataccagatgcacagatggcattgtatttgttgtggactctgttgatgtcgaaaggatggaagaagccaaaactgaacttcacaaaataactaggatatcagaaaatcagggagtccctgtacttatagttgctaacaaacaagatttgaggaactcattgtcactttcagaaattgagaaattgttagcaatgggtgaactgagctcatcaactccttggcatttgcagcctacctgtgcaatcataggagatggcctaaaggaaggacttgagaaactacatgatatgatcattaaaagaagaaaaatgttgcggcaacagaaaaagaaaagatgaatatcaatacctattatatctgtgtggagtaggttttctctggtctgattttgacaaatagaagagtgtctacaccgtcctttgcctgtctgccctcctggatgctattaaagctttgttttgttgaacaatcagatgcccaactctgttgccttgtggaagatgagtaaatgcagtgcttcttaaagtggtctcttctccctaccccacaaatcttttggtactaccatttggggaagccaagcaaggatagtaaattgaccagaacacagttgtgggaatttggtctgaagttagtgaaataaaactttaaagagtgtc

SEQ ID NO: 205 - protein, 200 aa, Homo sapiens
  ref <308>: DATABASE ACCESSION NUMBER: Refseq / NP_005729
  ref <309>: DATABASE ENTRY DATE: 2000-11-01
MGNGLSDQTSILSNLPSFQSFHIVILGLDCAGKTTVLYRLQFNEFVNTVPTKGFNTEKIKVTLGNSKTVTFHFWDVGGQEKLRPLWKSYTRCTDGIVFVVDSVDVERMEEAKTELHKITRISENQGVPVLIVANKQDLRNSLSLSEIEKLLAMGELSSSTPWHLQPTCAIIGDGLKEGLEKLHDMIIKRRKMLRQQKKKR

SEQ ID NO: 206 - DNA, 1191 bp, Rattus norvegicus
  ref <308>: DATABASE ACCESSION NUMBER: Refseq / NM_017062
  ref <309>: DATABASE ENTRY DATE: 2000-11-01
aaggcggcggcaacggcggcggcgactcctccgtgtccgcctccagctccggctgcagctccggcccgcgatgacccacgcggtgaccctgcgcggcccttcaccctggggcttccgcctggtgggcggccgtgacttcagtgcccccctcaccatctcgcgggttcatgctgggagcaaagcggccctggctgccctgtgcccaggtgactcgatccaagccatcaacggtgagagcactgagctcatgacacacctggaggcccagaaccgcattaaaggctgccacgatcaccttacactctcagtaagcaggcctgagaacaagaactggcccagttcccctaatgacaaggcccaagcgcataggatccacattgaccctgaggcccaggatggcagcccagccaccagcaggcggtcctcaatctctggaattagtctggaggacaacagatcgggcctgggatctccgtatggccagccacctcgccttccagttcctcacaatggcagcagcaatgaggtcaccctgccatcccagatgagcgctctgcatgtgtctccaccccccagtgctgacacacccaggattctccctcggaaccgggactgcagggtggacctgggttcagaggtatacaggatgttaagggagccagcagagccagcagcctcagagcccaaacagtctggatccttccgctacttgcaaggcatgctagaggctggcgaaggcggggatcggcctgggtctggtggttcccggaacctcaagccagcagccagcaagctgggtgctccactgagtggcctgcaggggttaccagagtgcacacgctgtggccacgggatcgtgggaaccatcgtcaaggcgagggacaagctctaccatcccgagtgcttcatgtgtagcgactgtggcctgaatctcaagcagcgtgggtacttcttcctagacgaacggctgtactgcgagaaccatgccaaggctcgagtcaagccaccggagggatatgacgtggtggctgtatatcccaatgccaaggtggaacttgtctgagctgggaaatcttgtcttgcctctgcttcatttaatgtcccccctccccacccccgtggcctgtgtaaatatatgtcctcctggcctttctaataaagtccctctgcttgtcctccaaaaaaaaaaaa

SEQ ID NO: 207 - protein, 330 aa, Rattus norvegicus
  ref <308>: DATABASE ACCESSION NUMBER: Refseq / NP_058758
  ref <309>: DATABASE ENTRY DATE: 2000-11-01
MTHAVTLRGPSPWGFRLVGGRDFSAPLTISRVHAGSKAALAALCPGDSIQAINGESTELMTHLEAQNRIKGCHDHLTLSVSRPENKNWPSSPNDKAQAHRIHIDPEAQDGSPATSRRSSISGISLEDNRSGLGSPYGQPPRLPVPHNGSSNEVTLPSQMSALHVSPPPSADTPRILPRNRDCRVDLGSEVYRMLREPAEPAASEPKQSGSFRYLQGMLEAGEGGDRPGSGGSRNLKPAASKLGAPLSGLQGLPECTRCGHGIVGTIVKARDKLYHPECFMCSDCGLNLKQRGYFFLDERLYCENHAKARVKPPEGYDVVAVYPNAKVELV

SEQ ID NO: 208 - DNA, 549 bp, Rattus norvegicus
  ref <308>: DATABASE ACCESSION NUMBER: EMBL / AA858621
  ref <309>: DATABASE ENTRY DATE: 2000-03-03
cggccgcttgctctgcccggcgccgaagaagttgttggtgtcctgcaggcggcacgagaagatctggcccacgtcgccgccgtcgccgtaggggctcagcttctcgtcgccgtagggcagcacctccgacatggtcgcgtccgggggctccgaggcggcacctcctccgcccgcgtccccgcccgcggaggacagggtcagcggcgctggggccggggatggccggccggggacggccctcggggctgccgcggtgctggggccggcgagtggccggggagagacaccgcttggggcaggagcgcgcagcccgcgcgagcgacccaacgagcgcccgcagctgagctgcgctgcgctcgggctccgcgcgcgagtggctgctgctccggcaggcgggcaggactcacatcctcggcgctctcgggcgcggggcgggggccgaaccgggcggggccgcgacgcgcggggaggagggtgtccctgcgagcccggagggcgcgggaccgatgtgggcgcaccccggggagcgcgcgggccggtcctgccgcg

SEQ ID NO: 209 - DNA, 5648 bp, Rattus norvegicus
  ref <308>: DATABASE ACCESSION NUMBER: Refseq / NM_017290
  ref <309>: DATABASE ENTRY DATE: 2003-01-14
cggagccgtccccgacgccacctcccgtctcctccgccgcagtttcctccgccgctgtcgggggtgcagagctgaggggctcgggcagcgcgccgcgcagctcctctccagtcgcccgcctcgccgtcctccccaccgagggctcgcccgggcgcccctcctcagccgcgccgggtctcctcgcgcagcgccgcggcctgcgctacctgcggccggctggcaacagaggcaacgcacactcgcggcggggcgggaggctcgcagcccctcgggcgggctcggcgaggcccggccgcgtgcggcggtttctgggggagggggctcgggtgattcagcgcccggtcaggcggaagcggccgccgccgcggaggaggaggagaaagaggaggggacagctgtccgcgcccgggcgcccgcggtggcacgagcccgcggcccgagtgcgaggcggaggcgaggaggccgcggggacgcgaggcgaggccggccggggcccccgcagccatggagaacgctcacacaaagaccgtggaggaggtgctgggccacttcggcgtcaacgagagcacggggctgagcctggagcaggtcaagaagctcaaggagagatggggctccaacgaattgccggctgaagaaggaaagaccttgctggaacttgtgatcgagcagtttgaagacttactagttagaattttattgctggcagcatgtatatctttcgttttggcttggttcgaagaaggtgaagaaacgattacagcctttgtagaaccttttgtaattctgcttatattggtagccaatgcaattgtgggtgtatggcaggagagaaacgctgaaaatgcaatagaagctcttaaggagtatgaacctgaaatgggcaaggtgtatcgacaggacagaaagagtgtgcagcggattaaagcgaaagatatagttcctggggatatagtggaaattgctgttggtgacaaagttccggctgacattagattgacatccatcaagtctacaactctgagagttgaccagtcgattcttacaggtgaatctgtctcggtcatcaagcatactgaccccgtccctgacccacgagctgttaatcaagacaaaaagaacatgctcttttctggcacaaacatcgctgctggcaaagctatgggagtggtggtggcgactggagtcaatactgagatcggcaagatccgggatgaaatggttgcaacagaacaggagagaacacccctacagcagaagctggacgagtttggggaacagctttccaaagttatctccctcatttgcattgcagtctggatcatcaacatcgggcatttcaatgacccagttcatggtggctcttggatcagaggtgccatctactactttaagattgcagtggccctggctgttgctgccatccctgagggtctgcctgctgtcatcaccacctgcttggctcttggaactcgaaggatggcaaagaaaaatgctattgttcgaagtctgccttctgtggaaacccttggttgtacttctgttatctgctcagacaagaccggcacacttaccacaaaccagatgtccgtctgcaggatgttcattctggacaaagtagaaggtgatacttgttcccttaatgagtttaccataactggatcaacctatgcacccattggagaagtgcaaaaagatgacaagccagtgaaatgccatcagtatgacgggcttgtagagttagcaacgatctgtgctctgtgtaatgactctgctttggattacaatgaggcgaagggtgtgtatgaaaaagttggagaagccacagagactgctctcacgtgcctggtagagaagatgaatgtattcgacacggagctgaagggactttctaaaatagaacgcgccaacgcctgcaactcggtcataaaacagcttatgaagaaggaattcacgctagagttttcacgtgatagaaaatcaatgtccgtctactgtacaccaaacaaaccgagccggacgtccatgagcaagatgtttgtgaagggtgctccagaaggtgtcatcgacaggtgcacccacatccgagttggaagtaccaaggtccccatgacgcctggtgttaaacagaagattatgtctgtcattcgggagtggggcagtggcagcgacacactgcggtgcctggctctggccactcatgacaacccgctgaggagagaggagatgcacctggaagattctgcgaacttcatcaaatatgagaccaatctgactttcgttggctgtgtgggcatgctggaccctcccaggattgaagtggcctcttctgtgaagctgtgccggcaagcgggcatccgagtcatcatgatcactggggataacaaaggcactgctgtggccatctgtcgccgcattggcatctttgggcaggatgaggatgtgacatcaaaggcttttacagggcgagaatttgatgaattaagcccctcagcccagagagacgcctgcttaaatgcccgttgttttgctcgagttgaaccttcccacaagtctaagatcgttgagttcctgcagtcctttgatgagatcacagctatgactggtgatggtgtgaacgacgcgcccgctctgaagaagtcggaaatcgggattgccatgggctcagggactgcagtggctaagacggcctctgagatggtgctggccgacgacaacttctccaccatcgtggccgctgttgaggaggggcgcgccatctacaacaacatgaagcagttcatccgctacctcatctcctccaacgtgggggaggtggtctgtatcttcctgacggcagcccttgggtttcctgaggctttgattcctgtccagttactctgggtcaatctggtgacggatggtctgcctgccactgcgctggggttcaatcctccagatctggacatcatgaacaaacccccacggaacccaaaagaaccgctgatcagcgggtggctctttttccgttacctggctattggctgttatgttggcgctgccaccgtgggtgctgctgcgtggtggttcatcgctgctgacggtggtccgagagtctccttctaccagctgagtcatttcctgcagtgtaaggaggacaacccagacttcgaaggagtggattgtgcaatctttgagtccccgtatccgatgacaatggcactttctgttctagtcaccatagagatgtgcaatgccctcaacagcttgtctgaaaaccagtccctgctgaggatgcccccctgggagaacatctggctcgtgggctccatctgcttgtccatgtcccttcacttcttgatcctctacgtggaacctttgccactcattttccagatcacaccgctgaatctgacccagtggctgatggtgctgaaaatctccctgcctgtgatcctcatggacgagacgctcaagtttgtggcccgaaactacctggagcctggtaaagagtgtgcgcagcctgccaccaaaccctcctgctccctgtcggcatgcaccgacggcatttcctggccctttgtgctgctcattatgcccctggtggtctgggtctacagcacagacactaactttagtgatatgttctggtcttgactgacagcgctacatgcagaagatgtttaacttaatcaattaattttttattgtttaaagcaactgtctatttctgctgaattttcacatgaacatattggctggtgaaggaggtttcatatctagattttgttttgctttttctgactccagtgggacaagattttccttttttttatacacataattaaagtgtccattgacatgtacagagaactaacactattttatgcagatatttttttgtagatgaaaaaagcatgtacagtgttctgtttcatactcatacttgtacaaagatcgttgagccagcagacattgtcagcaagttaattggcagcagacttaggaaatgaatgtgtgtggtttttaaaagaaaaaaaactaaatagcatgtattgtgtcttttgcatgattctctggatttaatttggtatcacagtctaatttttattcataagccaatttttctgcactgagcagagtcctgctacctcagtcagtatttttggtttgccactccctgcaccctcagcctctgtcacccccagcccaccctggcccgctcggctgcttctgtaggtctgatggttctgtttacatctgtcttcacgaggtttgcctgtctcgcttgtgcagaaaacattgctccagatccaatcgactgggtttctgtcccttcgcctagtttttaaggttatttatttaaatgtctaatgtattttattgtaacagacattgttttgccaacattgcctattcagtggcacttcacaatctagtttaaaagaaaaataaaacattttaaatggacagaggaaaataactgtcttgttcttaatggccttgaactacccatgatcagttcaaattcctgagcttctcagctcggagccttagtttcctgttcctgagaagaacgtgtactgctgcacagtagggattatctataatgtacaggcacgatcgtcatgtgacaaacatttactcaagtttctgctggcctggtgtatgtaggctggtgtaagggcaagtgtgtgtgtgtatgtgtgtgtgtgttctgtaaaatctgtaaatagcacatgaccaaatgaactgtatagaaatatttttatttgaatatggcactaaccaccaccaccatgactgaccggacgtttgcgcatgttcaaggtcagtcttaacggcagtgtgagtcattaacagtcctaactgtggtgttttcctccaatgccttccaacatccatcaactaaccaatactggagtaaccgcttcctaaacattgcagaaatgtaagggtgttcgggtgcgtgcatgtgcgttgttagcaacacatcttccagccctctgcatgactgagcttggggaaagagaaatagaacagcccccagctcactgtgtgatgtggaggaaatgtgtattacaagtggggttttagctgttgagtcaaaataataacaagtgtacaatttagcataaggaatcggagagcctctccagagaagtcggtttctttgctgcaagaagaatgaggttctgaacccttatccaagaacagaagccatcagccaagtctccacatttctctgcaaaatgttgtagcctctataactgtatgatagtgtaatgcatgccttcagttgtaagtggccagatcgcgctacagtgacattgaaacctgctctctaattggccctgtacagtttgcttatttataaattcatttaaaacactacagctgttgaatggttacaacctaggcctccggtcctaacttcagttgttctcctcggtgtgcagccagctgttccacactgtattattgtaacttatttagtgaagtcagaagcagtagacagatgttggtgcaatacaagtattgtgtgcatttatcgtaataaagtgctccgcgtcggttcagttcctcacagcttctcacagtgcatgtctgactgtagtctgtaaatagaggtcagtgtccgtgctgctaacaggtatcgatcgcacaga

SEQ ID NO: 210 - protein, 1043 aa, Rattus norvegicus
  ref <308>: DATABASE ACCESSION NUMBER: Refseq / NP_058986
  ref <309>: DATABASE ENTRY DATE: 2003-01-14
MENAHTKTVEEVLGHFGVNESTGLSLEQVKKLKERWGSNELPAEEGKTLLELVIEQFEDLLVRILLLAACISFVLAWFEEGEETITAFVEPFVILLILVANAIVGVWQERNAENAIEALKEYEPEMGKVYRQDRKSVQRIKAKDIVPGDIVEIAVGDKVPADIRLTSIKSTTLRVDQSILTGESVSVIKHTDPVPDPRAVNQDKKNMLFSGTNIAAGKAMGVVVATGVNTEIGKIRDEMVATEQERTPLQQKLDEFGEQLSKVISLICIAVWIINIGHFNDPVHGGSWIRGAIYYFKIAVALAVAAIPEGLPAVITTCLALGTRRMAKKNAIVRSLPSVETLGCTSVICSDKTGTLTTNQMSVCRMFILDKVEGDTCSLNEFTITGSTYAPIGEVQKDDKPVKCHQYDGLVELATICALCNDSALDYNEAKGVYEKVGEATETALTCLVEKMNVFDTELKGLSKIERANACNSVIKQLMKKEFTLEFSRDRKSMSVYCTPNKPSRTSMSKMFVKGAPEGVIDRCTHIRVGSTKVPMTPGVKQKIMSVIREWGSGSDTLRCLALATHDNPLRREEMHLEDSANFIKYETNLTFVGCVGMLDPPRIEVASSVKLCRQAGIRVIMITGDNKGTAVAICRRIGIFGQDEDVTSKAFTGREFDELSPSAQRDACLNARCFARVEPSHKSKIVEFLQSFDEITAMTGDGVNDAPALKKSEIGIAMGSGTAVAKTASEMVLADDNFSTIVAAVEEGRAIYNNMKQFIRYLISSNVGEVVCIFLTAALGFPEALIPVQLLWVNLVTDGLPATALGFNPPDLDIMNKPPRNPKEPLISGWLFFRYLAIGCYVGAATVGAAAWWFIAADGGPRVSFYQLSHFLQCKEDNPDFEGVDCAIFESPYPMTMALSVLVTIEMCNALNSLSENQSLLRMPPWENIWLVGSICLSMSLHFLILYVEPLPLIFQITPLNLTQWLMVLKISLPVILMDETLKFVARNYLEPGKECAQPATKPSCSLSACTDGISWPFVLLIMPLVVWVYSTDTNFSDMFWS

SEQ ID NO: 211 - DNA, 2206 bp, Rattus norvegicus
  ref <308>: DATABASE ACCESSION NUMBER: Refseq / NM_138905
  ref <309>: DATABASE ENTRY DATE: 2003-01-13
aggaggcagagttggagttgggcagacgctgtggagagctagctgcaggacgctgcggagttgcagggctccgcgctgctccattcattaagtagctgcggaggatcgtggccggacgccgacgctgcccactcgcaaacttcagcacgcagacgcacgccagcccggcgcgtccggacagcacagttttgcaaaagttcctgctcgggatttggctctcttccctttggactagcgaacagtttggggttgagaggaaagcagaggcgctcagggggaaacctacccgcgtctgcagttggaactactcggccgggctgtacactcgccgccgcgtcccgagcccgcagatccgctcctgagcagcggcggcccgcagcgccccgggaggctccccgcagccagcgccatgcaaagctacaagtacgacaaggcgatcgtccctgagagtaagaacggcggcagcccggcgctcaacaacaacccgaggaaaggcggcagcaagcgggtgctgctcatctgcctcgacctcttctgcctcttcatggcggctctgcccttcctcatcatcgagacaagcaccattaagccttatcgtcgagggttttactgcaacgacgagagcatcaagtaccccctgaaagtcagcgagactataaacgacgccgtgctctgtgcggtggggatcgtcatcgccatcctgcggatcatcacgggggaattctaccggatctattacctcaaggagaagtcccgatccaccattcagaacccttatgtggccgctctctataagcaagtgggatgcttccttttcggctgtgccatcagccagtccttcacagacatcgccaaagtgtccattgggcgcctgaggcctcacttcctcagcgtctgtgaccctgatttcagtcagatcaattgctccgagggctacattcagaactacaggtgccgaggagaagacagcaaagtacaggaggccaggaaatccttcttctcgggccacgcctccttctccatgttcacaatgctgtatctggtgctttatctacaggcccgcttcacctggcgtggggcccggctcctccgccccctcctgcagttcactttgctcatgatggccttctacacgggattgtcacgtgtatctgactacaaacaccatcctagcgatgtcctggcaggatttgcccaaggagctctggtggcctgctgcatagtgttcttcgtgtctgacctcttcaagactaagacgaccctctcactgcctgcccccgcgatcaggagagagatcctgtctcctgtagacatcatggacaggagcaatcaccacaacatggtgtaggtgctgcggcctccagagcactttctctgaagcgactgcttgacagcatgtccctgctgctctccaatctcatcagacagtagaatgtagggaaaagctttttgcccgattggattttgaaaacatttaaagaaaaaaaaaaagtccttaccttgtggccttccaaaataggttgtttgcctgtgtggagacaacagtgccggagtcctgagtgctggctgcacagctggctaagtgttcatgttctagtgagcacgggcttgtcaggagcaaaacactaggataattgagcagaggctgtggtcaccttttgtgacccgagaaatcccaggcagaatagcgggggcgcttatgtagcacgcaaggcctgaaccagcaccgaatcagcccctctgcctgccccactctactgtgactttgattcaaggaagtttttgcgctttgaaataccgggaatgaacacacagtttttcagtcgagggatcagatcctgaatccaaaccccatgtcctgaggcctctgtcatctctccatccccaggctaacaaccacagtcccctcacttttagagacttagagaccctttgtggaagagtgaacttcacaaatagcacaagttcagaagacatgtagggtgtcttctcacacaccacactgtgacgcacgcggaactgccattgcggggtcaatcaccaggcacttgcacgtgtagaaacccgtagactttggttactgctatatcccccttgagatccttgctgggtgcctaccaggatttcatgtgagggccagggatgcataggcatggccaacctttggtggatcaaaagagcctcagtagagagacagggagggagg

SEQ ID NO: 212 - protein, 312 aa, Rattus norvegicus
  ref <308>: DATABASE ACCESSION NUMBER: Refseq / NP_620260
  ref <309>: DATABASE ENTRY DATE: 2003-01-13
MQSYKYDKAIVPESKNGGSPALNNNPRKGGSKRVLLICLDLFCLFMAALPFLIIETSTIKPYRRGFYCNDESIKYPLKVSETINDAVLCAVGIVIAILRIITGEFYRIYYLKEKSRSTIQNPYVAALYKQVGCFLFGCAISQSFTDIAKVSIGRLRPHFLSVCDPDFSQINCSEGYIQNYRCRGEDSKVQEARKSFFSGHASFSMFTMLYLVLYLQARFTWRGARLLRPLLQFTLLMMAFYTGLSRVSDYKHHPSDVLAGFAQGALVACCIVFFVSDLFKTKTTLSLPAPAIRREILSPVDIMDRSNHHNMV

SEQ ID NO: 213 - DNA, 6322 bp, Rattus norvegicus
  misc_feature (1)..(6322): n=a, c, g or t
  ref <308>: DATABASE ACCESSION NUMBER: Refseq / NM_012576
  ref <309>: DATABASE ENTRY DATE: 2002-11-05
gacgctgcgggggtgggggacctncggcggcacggagtccccccccgggctcacattaatatttgccaatggactccaaagaatccttagctccccctggtagagacgaagtccctggcagtttgcttggccaagggagggggagcgtaatggacttttataaaagcctgaggggaggagctacagtcaaggtttctgcatcttcgccctcagtggctgctgcttctcaggcagattccaagcagcagaggattctccttgatttctcgaaaggctccacaagcaatgtgcagcagcgacagcagcagcagcagcagcagcagcagcagcagcagcagcagcagcagcagcagcagccaggcttatccaaagccgtttcactgtccatggggctgtatatgggagagacagaaacaaaagtgatggggaatgacttgggctacccacagcagggccaacttggcctttcctctggggaaacagactttcggcttctggaagaaagcattgcaaacctcaataggtcgaccagcgttccagagaaccccaagagttcaacgtctgcaactgggtgtgctaccccgacagagaaggagtttcccaaaactcactcggatgcatcttcagaacagcaaaatcgaaaaagccagaccggcaccaacggaggcagtgtgaaattgtatcccacagaccaaagcacctttgacctcttgaaggatttggagttttccgctgggtccccaagtaaagacacaaacgagagtccctggagatcagatctgttgatagatgaaaacttgctttctcctttggcgggagaagatgatccattccttctcgaagggaacacgaatgaggattgtaagcctcttattttaccggacactaaacctaaaattaaggatactggagatacaatcttatcaagtcccagcagtgtggcactaccccaagtgaaaacagaaaaagatgatttcattgaactttgcacccccggggtaattaagcaagagaaactgggcccagtttattgtcaggcaagcttttctgggacaaatataattggtaataaaatgtctgccatttctgttcatggtgtgagtacctctggaggacagatgtaccactatgacatgaatacagcatccctttctcagcagcaggatcagaagcctgtttttaatgtcattccaccaattcctgttggttctgaaaactggaataggtgccaaggctccggagaggacagcctgacttccttgggggctctgaacttcccaggccggtcagtgttttctaatgggtactcaagccctggaatgagaccagatgtaagctctcctccatccagctcgtcagcagccacgggaccacctcccaagctctgcctggtgtgctccgatgaagcttcaggatgtcattacggggtgctgacatgtggaagctgcaaagtattctttaaaagagcagtggaaggacagcacaattacctttgtgctggaagaaacgattgcatcattgataaaattcgaaggaaaaactgcccagcatgccgctatcggaaatgtcttcaggctggaatgaaccttgaagctcgaaaaacaaagaaaaaaatcaaagggattcagcaagccactgcaggagtctcacaagacacttcggaaaatcctaacaaaacaatagttcctgcagcattaccacagctcacccctaccttggtgtcactgctggaggtgattgaacccgaggtgttgtatgcaggatatgatagctctgttccagattcagcatggagaattatgaccacactcaacatgttaggtgggcgtcaagtgattgcagcagtgaaatgggcaaaggcgatactaggcttgagaaacttacacctcgatgaccaaatgaccctgctacagtactcatggatgtttctcatggcatttgccttgggttggagatcatacagacaatcaagcggaaacctgctctgctttgctcctgatctgattattaatgagcagagaatgtctctaccctgcatgtatgaccaatgtaaacacatgctgtttgtctcctctgaattacaaagattgcaggtatcctatgaagagtatctctgtatgaaaaccttactgcttctctcctcagttcctaaggaaggtctgaagagccaagagttatttgatgagattcgaatgacttatatcaaagagctaggaaaagccatcgtcaaaagggaagggaactccagtcagaactggcaacggttttaccaactgacaaagcttctggactccatgcatgaggtggttgagaatctccttacctactgcttccagacatttttggataagaccatgagtattgaattcccagagatgttagctgaaatcatcactaatcagataccaaaatattcaaatggaaatatcaaaaagcttctgtttcatcaaaaatgactgccttactaagaaaggttgccttaaagaaagttgaatttatagcttttactgtacaaacttatcaatttgtcttgtagatgttttgttgttctttttgtttctgtcttgttttgttttaaacacgcagtacatgtggtttatagagggccaagacttggcgacagaagcagttgagtcaacactctgaagtgatgacacagcacacagtgaagtgtattgttggtgtatcacagaaactaacagttacgtggaggcatggccactgtcagagagggaccgcacctaaaccaccgtgcccaagtccatgtggttcaactttctgactcagaactttacagttggctgggtaaaactttctagactttctgttggtgtatttttcccatgtatagttaggatggtattttgatttatgcatgcaaacctgaaaaaagtttacaagtgtatatcagaaaagggaagttgtgccttttatagctattactgtctggttttaacaatttcctttatattcagtgaactatgcttgctcgtttctcttcaataatttttgtattccagttattgtacagctgtttaagatgggcagctgcttcacagctttcctagacgctaacattaatttccgtgtgaaaatgggtcggtgcttctaccctgttggcaccagctatcagaagaccacagaaattgactcagatctccagtattcttgttaaaaagctcttactctgtatatatctgcttccatggagaattacataggctgagcagattacataggctgagcagattaaccgtcctaactggtgtagagcacctagtccagtgaccttctgggtaaaccgtggatgatggttacagaagactggtgggaaaacagtaactaccaaaaggcccctttccatctaatgcaccatctcttcaatggggagatagcaaccaagcccgtaaatcagctctttcaggaccttctggagtggtttgcataacattttaaaatgtattattccagatagccagctctgataaagccgagagattgtttaatcagaccaagtaacttctctcattaaacttacccccaactaaatcgctaatacagcaagaatggctagacacccattttcacatctcacccgcaccgattggtctagctctcatggtggtcaggagaatcagctactgatttttgttacttagaatnttcaggactcgcatttntccnnctacacatccctacatgtgccatagaatttaacacaagtcctgtgaacttcttcacattgagaattatcattttaaacaaaacagaagcagtagtagccctttctntgtgcaccttaccnnctttctntgactcaaagcttaatatgcttactaagccacaagaaatcngatttcnacttaaaggcgccaaattatttgtgtaatagaaaaactgaaaatctaatattaaaaatatgaaacttctaatatatttttatatttagttatagtttcgatatatatcatatcggtattcactgatcttgggaaagggaaagggctactgcagctttacatgcaatttattaactgactgtaaaatagctgtatagtaataagaatgacttttagtgagattgctttatcatgacatgttatatatttttcgtaggggtcaaagaaatattgatggatatgatagcctatatgatttaatngtatataaaagcatncaaacaggccttaacgcgtcttggaaannaaaatacctttgttctaagctagggaagggagcnggagannggccccgtgtgtatnggaggttccgaggctcggatnnaagagatcnanaggggatctaattccntacctccatctaattacctcaccacccatgatcctgtcagtgnaggnnnggttattaaatcccccgttatactaatataaatagganagaagggtggcgctcacgtctgttccaggcgccgcagtagcagggttattttccatgcagcctcccgacaaggttagcagagggaggctttggcaagtttggcgtggcgtgcatagaggcaccagcaacatgtaaacctaaagagcccataggaagccaagaatacactaatcctccccacccttcaatagtccatttccaagtaagatgaggacatgcttatgttttctttgaatgcttttagaatgttgttattttcagtattttgcagaaattatttaataaaaaagtataatttgaattctctctaaaagggattgttcagtttgtaatggtttaaattggtctcaaagtactttaagataattgtaacccagctggatgtgaaatttatggtgcctaagaaataccacttgaatattatcaagacagtgttaagttttaaaatgagcttctcaaaaatagattattgtacatttatggaatgttatatggttaaacccaaaaaagcacatcacacataaatctgctttcagcttggctttcaaaaatagagctccaaaaacgaaaaaggagaagaaaaagtatatatatgcgttgttattaacagaaggcaacagacattcataaaactactaccgaagctttccttgaagcgtataaagagccatgctcctttagtatgtggggaagaagagagccgtcatagtttcgagtacagagagaagatgcggtactgtctccgtgtgtggcttcataccgttcctaactatttaggtttataataacttcagtgagactcggtgacatgcctgtatgactcatgaccgatcttgaaagatatctttaattactggtaggacaaaagggacactctggttattttaggccttggcttgggatactgtatatccagaagaaaggagacaggaaacttggggaagggaagggaacctaggaagcactgccttctgtaggaaagaacacaccaataagtgagagtacccaaagggacaaggccacacagtgtggggtctaaggatgagtcagggtgagctctggtgggcatggagaagccagcaactccagtgctacagagcagggcagggcagggatgggacaagatggatgcggatcccagtcccagtagtttgctccctcttatttaccatgggatgaaccatggagtattgatctgtcagcactcaaggatcatggagcttgagattccggttggtcaccccaacggtaagctgagattgaatgtgtttcttatgtgccggtttcagtgttagaaggcgaaacagagtgtacagaagacactgcaaaccggtcagatgaaagtcttctcattcccaaactattttcagtcagcctgctctatcaggactggtgaccagctgctaggacagggtcggcgcttctgtctagaatatgcctgaaaggattttattttctgataaatggctgtatgaaaataccctcctcaataacctgcttaactacatagagatttcagtgtgtcaatattctattttgtatattaaacaaaggctatataatggggacaaatctatattatactgtgtatggcattattaagaagcttttnnannattttttatcacagtaatttttaaatgtgtaaaaaattaaaaattagtgantccngtttaaaaataaaagttgtagttttttattcatgctgaataacctgtagtttaaaaatccgtctttctacctacanagtgaaatgtcagacngtaaaattttgtgtggaaatgtttaacttttatttttctttaaatttgctgtcttggtattaccaaaccacacattgtactgaattggcagtaaatgttagtcagccatttacagcaatgccaaatatggataaacatcataataaaatatctgctttttc

SEQ ID NO: 214 - protein, 795 aa, Rattus norvegicus
  ref <308>: DATABASE ACCESSION NUMBER: Refseq / NP_036708
  ref <309>: DATABASE ENTRY DATE: 2002-11-05
MDSKESLAPPGRDEVPGSLLGQGRGSVMDFYKSLRGGATVKVSASSPSVAAASQADSKQQRILLDFSKGSTSNVQQRQQQQQQQQQQQQQQQQQQQPGLSKAVSLSMGLYMGETETKVMGNDLGYPQQGQLGLSSGETDFRLLEESIANLNRSTSVPENPKSSTSATGCATPTEKEFPKTHSDASSEQQNRKSQTGTNGGSVKLYPTDQSTFDLLKDLEFSAGSPSKDTNESPWRSDLLIDENLLSPLAGEDDPFLLEGNTNEDCKPLILPDTKPKIKDTGDTILSSPSSVALPQVKTEKDDFIELCTPGVIKQEKLGPVYCQASFSGTNIIGNKMSAISVHGVSTSGGQMYHYDMNTASLSQQQDQKPVFNVIPPIPVGSENWNRCQGSGEDSLTSLGALNFPGRSVFSNGYSSPGMRPDVSSPPSSSSAATGPPPKLCLVCSDEASGCHYGVLTCGSCKVFFKRAVEGQHNYLCAGRNDCIIDKIRRKNCPACRYRKCLQAGMNLEARKTKKKIKGIQQATAGVSQDTSENPNKTIVPAALPQLTPTLVSLLEVIEPEVLYAGYDSSVPDSAWRIMTTLNMLGGRQVIAAVKWAKAILGLRNLHLDDQMTLLQYSWMFLMAFALGWRSYRQSSGNLLCFAPDLIINEQRMSLPCMYDQCKHMLFVSSELQRLQVSYEEYLCMKTLLLLSSVPKEGLKSQELFDEIRMTYIKELGKAIVKREGNSSQNWQRFYQLTKLLDSMHEVVENLLTYCFQTFLDKTMSIEFPEMLAEIITNQIPKYSNGNIKKLLFHQK

SEQ ID NO: 215 - DNA, 1001 bp, Rattus norvegicus
  ref <308>: DATABASE ACCESSION NUMBER: Refseq / NM_133536
  ref <309>: DATABASE ENTRY DATE: 2003-01-13
cggggcagagagcgctcaggctgtgcacgcttgaccaggctcccggaccagagctgtcctagcaagagagaaaaggacatttgcctacaatgagacacgaggcgcccatgcagatggcctcggcacaagatgccaggtttggtcagaaagactcttctgaccagaacttcgactacatgttcaagttgctgatcattggcaatagcagcgtgggcaaaacatccttcctgttccgctatgctgatgactccttcacgtctgcctttgtcagcacggtcggcatcgatttcaaagtaaaaactgtcttcaaaaatgaaaagagaatcaagcttcagatttgggacacagcaggccaggaaagatacaggaccatcaccacagcctattatcgaggggccatgggcttcattttaatgtatgacatcacaaatgaagaatccttcaacgctgtacaagattggtcaactcagatcaaaacatattcctgggataatgcccaggttatactggtcggaaacaaatgtgacatggaagacgaacgggtggtctcaactgagagagggcgccacttaggagagcagctcgggtttgagttttttgaaaccagcgccaaggataacatcaacgtgaagcaaacctttgagcgcctcgtagatatcatctgtgacaaaatgtcagagagcttggagactgacccagccatcacaggcgccaagcagagcacgaggctcaaggaaacccctcctccaccacagcccaactgtggctgctaatgtccccccgcacaggagctccaagggcccccagagcagccaagaaaccgcatttataaatggtctattagccttcaatcatactgcctaataattatttgaaggaagtctttgatgtcagtggcccatatatgcattcaaaccgtgagcaatttcctgtggtaatatgtggcgaatttgctcttatatttgtaaggattattcatctataaacacctgctacttgca

SEQ ID NO: 216 - protein, 227 aa, Rattus norvegicus
  ref <308>: DATABASE ACCESSION NUMBER: Refseq / NP_598220
  ref <309>: DATABASE ENTRY DATE: 2003-01-13
MRHEAPMQMASAQDARFGQKDSSDQNFDYMFKLLIIGNSSVGKTSFLFRYADDSFTSAFVSTVGIDFKVKTVFKNEKRIKLQIWDTAGQERYRTITTAYYRGAMGFILMYDITNEESFNAVQDWSTQIKTYSWDNAQVILVGNKCDMEDERVVSTERGRHLGEQLGFEFFETSAKDNINVKQTFERLVDIICDKMSESLETDPAITGAKQSTRLKETPPPPQPNCGC

SEQ ID NO: 217 - DNA, 1039 bp, Homo sapiens
  ref <308>: DATABASE ACCESSION NUMBER: Refseq / NM_138453
  ref <309>: DATABASE ENTRY DATE: 2002-04-04
ggcacgaggtgcagagtgtggagcgtggagcgccgggactgtgcacgcttgaccggaagcccagaccagtgcggtcctagccagagagaaaggacatttgccaacaatgagacacgaagcgcccatgcagatggcctctgcccaagatgccaggtacggccagaaagactcctctgatcagaactttgactacatgttcaaattactcatcatcggcaatagcagtgtggggaaaacatcttttctattccgttatgcagatgactcctttacatctgcattcgtcagcacagttgggatcgatttcaaagtaaaaactgtattcaaaaatgaaaagagaatcaagcttcagatttgggacacagcaggccaggaaagatacaggactatcaccacagcctattatcgtggagccatgggctttattttaatgtatgacattacaaatgaagaatccttcaatgcagtacaagattggtcaactcaaatcaaaacatactcttgggacaatgcccaagttattctggttgggaacaagtgtgacatggaagacgagcgggtcatctcaactgagcgaggtcaacatttaggagaacagcttgggtttgagttttttgaaacaagtgccaaggacaacattaatgtcaagcagacatttgagcgccttgtggatatcatctgcgacaaaatgtcagagagtttggagactgatcctgccatcactgctgcaaagcagaacacgagactcaaggaaactcctcctccaccgcagcccaactgtgcctgctagtgtccccgtgcacacaggcagctccagggggctctggttgccaacaaacagcatttgtaaatggtctattagccttcatttatactgcctaacaattatttgaaggaataaattgatgtcaatggctcgtacgcattcaattcttgggagctttcctgtttaatatgtggcaaatatgtgatcttaaatttataaggactatccatctataaacatctggtacctgcaaaaaaaaaaaaaaaaaaaaaa

SEQ ID NO: 218 - protein, 227 aa, Homo sapiens
  ref <308>: DATABASE ACCESSION NUMBER: Refseq / NP_612462
  ref <309>: DATABASE ENTRY DATE: 2002-04-04
MRHEAPMQMASAQDARYGQKDSSDQNFDYMFKLLIIGNSSVGKTSFLFRYADDSFTSAFVSTVGIDFKVKTVFKNEKRIKLQIWDTAGQERYRTITTAYYRGAMGFILMYDITNEESFNAVQDWSTQIKTYSWDNAQVILVGNKCDMEDERVISTERGQHLGEQLGFEFFETSAKDNINVKQTFERLVDIICDKMSESLETDPAITAAKQNTRLKETPPPPQPNCAC

SEQ ID NO: 219 - DNA, 517 bp, Rattus norvegicus
  ref <308>: DATABASE ACCESSION NUMBER: EMBL / AA866404
  ref <309>: DATABASE ENTRY DATE: 2000-03-03
catgacccagaaaatgccagagaaagtgaaggacaaggtaactgcaatgattccgttgggacacatgggggaccctgaggatgtagcagatgtggttgcgttcctggcatcagaagacagtggatacatcacaggggcctccgtggaagtcagtggtatgaggccttcatggggaggaggaccggaaaacagaacccgggctgtatgagaaagtgaggggaccctgcagcctgaagggcagagagatcccttctttagaccagggacagaagtgggtgcctacatccccacccatgcacctgtcccaatgcttcaacccctctcaggaggtcttttcatgtaaccgcctgctggaagccggactctgctcactcccccaccactgcctggcctcctgctgatgaggacgctaagttcccaggctacaaaagagatggcagtgtgtggctcaggcatgctgaatatggaaggcaggggtgcttgtgaccctaataaattccaaatcctcttccctgcc

SEQ ID NO: 220 - DNA, 2870 bp, Homo sapiens
  ref <308>: DATABASE ACCESSION NUMBER: Refseq / NM_003900
  ref <309>: DATABASE ENTRY DATE: 2002-04-04
ggcctgggtggcgaattcggcacgaggctcgccgctcgctatggcgtcgctcaccgtgaaggcctaccttctgggcaaggaggacgcggcgcgcgagattcgccgcttcagcttctgctgcagccccgagcctgaggcggaagccgaggctgcggcgggtccgggaccctgcgagcggctgctgagccgggtggccgccctgttccccgcgctgcggcctggcggcttccaggcgcactaccgcgatgaggacggggacttggttgccttttccagtgacgaggaattgacaatggccatgtcctacgtgaaggatgacatcttccgaatctacattaaagagaaaaaagagtgccggcgggaccaccgcccaccgtgtgctcaggaggcgccccgcaacatggtgcaccccaatgtgatctgcgatggctgcaatgggcctgtggtaggaacccgctacaagtgcagcgtctgcccagactacgacttgtgtagcgtctgcgagggaaagggcttgcaccgggggcacaccaagctcgcattccccagccccttcgggcacctgtctgagggcttctcgcacagccgctggctccggaaggtgaaacacggacacttcgggtggccaggatgggaaatgggtccaccaggaaactggagcccacgtcctcctcgtgcaggggaggcccgccctggccccacggcagaatcagcttctggtccatcggaggatccgagtgtgaatttcctgaagaacgttggggagagtgtggcagctgcccttagccctctgggcattgaagttgatatcgatgtggagcacggagggaaaagaagccgcctgacccccgtctctccagagagttccagcacagaggagaagagcagctcacagccaagcagctgctgctctgatcccagcaagccgggtgggaatgttgagggcgccacgcagtctctggcggagcagatgagaaagatcgccttggagtccgaggggcgccctgaggaacagatggagtcggataactgttcaggaggagatgatgactggacccatctgtcttcaaaagaagtggacccgtctacaggtgaactccagtccctacagatgccagaatccgaagggccaagctctctggacccctcccaggagggacccacagggctgaaggaagctgccttgtacccacatctcccgccagaggctgacccgcggctgattgagtccctctcccagatgctgtccatgggcttctctgatgaaggcggctggctcaccaggctcctgcagaccaagaactatgacatcggagcggctctggacaccatccagtattcaaagcatcccccgccgttgtgaccacttttgcccacctcttctgcgtgcccctcttctgtctcatagttgtgttaagcttgcgtagaattgcaggtctctgtacaggccagtttctctgccttcttccaggatcaggggttagggtgcaagaagccatttagggcagcaaaacaagtgacatgaagggagggtccctgtgtgtgtgtgtgtgctgatgtttcctgggtgccctggctccttgcagcagggctgggcctgcgagacccaaggctcactgcagcgcgctcctgacccctccctgcaggggctacgttagcagcccagcacatagcttgcctaatggctttcactttctcttttgttttaaatgactcataggtccctgacatttagttgattattttctgctacagacctggtacactctgattttagataaagtaagcctaggtgttgtcagcaggcaggctggggaggccagtgttgtgggcttcctgctgggactgagaaggctcacgaagggcatccgcaatgttggtttcactgagagctgcctcctggtctcttcaccactgtagttctctcatttccaaaccatcagctgcttttaaaataagatctctttgtagccatcctgttaaatttgtaaacaatctaattaaatggcatcagcactttaaccaatgacgtttgcatagagagaaatgattgacagtaagtttattgttaatggttcttacagagtatctttaaaagtgccttaggggaaccctgtccctcctaacaagtgtatctcgattaataacctgccagtcccagatcacacatcatcatcgaagtcttccccagttataaagaggtcacatagtcgtgtgggtcgaggattctgtgcctccaggaccaggggcccaccctctgcccagggagtccttgcgtcccatgaggtcttcccgcaaggcctctcagacccagatgtgacggggtgtgtggcccgaggaagctggacagcggcagtgggcctgctgaggccttctcttgaggcctgtgctctgggggtcccttgcttagcctgtgctggaccagctggcctggggtccctctgaagagaccttggctgctcactgtccacatgtgaactttttctaggtggcaggacaaatcgcgcccatttagaggatgtggctgtaacctgctggatgggactccatagctccttcccaggacccctcagctccccggcactgcagtctgcagagttctcctggaggcaggggctgctgccttgtttcaccttccatgtcaggccagcctgtccctgaaagagaagatggccatgccctccatttgtaagaacaatgccagggcccaggaggaccgcctgccctgcctgggccttggctgggcctctggttctgacactttctgctggaagctgtcaggctgggacaggctttgattttgagggttagcaagacaaagcaaataaatgccttccacctcaccgcaaaaaaaaaaaaaaaaaaaaaaa

SEQ ID NO: 221 - protein, 440 aa, Homo sapiens
  ref <308>: DATABASE ACCESSION NUMBER: Refseq / NP_003891
  ref <309>: DATABASE ENTRY DATE: 2002-04-04
MASLTVKAYLLGKEDAAREIRRFSFCCSPEPEAEAEAAAGPGPCERLLSRVAALFPALRPGGFQAHYRDEDGDLVAFSSDEELTMAMSYVKDDIFRIYIKEKKECRRDHRPPCAQEAPRNMVHPNVICDGCNGPVVGTRYKCSVCPDYDLCSVCEGKGLHRGHTKLAFPSPFGHLSEGFSHSRWLRKVKHGHFGWPGWEMGPPGNWSPRPPRAGEARPGPTAESASGPSEDPSVNFLKNVGESVAAALSPLGIEVDIDVEHGGKRSRLTPVSPESSSTEEKSSSQPSSCCSDPSKPGGNVEGATQSLAEQMRKIALESEGRPEEQMESDNCSGGDDDWTHLSSKEVDPSTGELQSLQMPESEGPSSLDPSQEGPTGLKEAALYPHLPPEADPRLIESLSQMLSMGFSDEGGWLTRLLQTKNYDIGAALDTIQYSKHPPPL

SEQ ID NO: 222 - DNA, 1912 bp, Rattus norvegicus
  ref <308>: DATABASE ACCESSION NUMBER: EMBL / L02530
  ref <309>: DATABASE ENTRY DATE: 2000-03-04
aggggaaggcgcgcggtctctgggttgggggcgggggctggggggcgcccaggagccgagtggggggcggcggccagcatgcgggcccgcagcgccctgccccgcagcgccctgccccgcctgctgctgccactgctgctgctgccggctgccgggccggctcagttccacggggagaagggcatctccatcccggaccacggcttctgccagcccatctccatcccgctgtgcacggacatcgcctacaaccagaccatcatgcccaaccttcttgggcacacgaaccaagaggacgcgggcctggaggtgcatcaattctacccgctggtgaaggtgcagtgctcgcccgagctgcgcttcttcctgtgctccatgtacgctccggtgtgcacggtgctggagcaggccatcccgccgtgccgctccatctgcgaacgcgcgcgccaaggctgcgaggcgctcatgaacaagttcggcttccagtggcccgagcgcctccgctgcgagcatttcccgcgtcacggcgcggagcagatctgcgtgggccagaaccactccgaggacggaactcctgcgctactcaccaccgcgccaccgtctgggctgcagcctggcgctggtggcaccccgggcggccctggcggtggtggcgcgcccccgcgctacgccactctggagcaccctttccactgtccccgcgtcctcaaggtgccgtcctatctcagctataagtttctgggtgagcgcgattgtgccgcgccctgcgagcctgcacggcccgacggctccatgttcttctcgcaccaccacactcgttttgcccgtctctggatcctcacatggtcggtgctgtgctgcgcttctactttcttcacggtcaccacctctttagtggccatgcagcgattccgctacccagagcggcccatcatcttcctgtccggttgctacaccatggtgtcagtggcctacattgcgggcttcgtgctccaggagcgcgtggtgtgcaacgagcgcttctctgaggacggttatcgcacggtggggcagggcactaagaaagaaggctgtactatactcttcatgatgctctacttcttcagtatggccagctccatctggtgggtgattctgtccctcacctggttcctggcagccggtatgaagtggggccacgcggccatcgaggccaattcgcagtacttccacctggccgcctgggcggtgccggccgtcaaaaccatcaccatcctggccatgggccagatcgacggcgacctgctgagcggcgtgtgcttcgtgggcctcaacaggctggacccgctgcgaggcttcgtgctggcgccgctcttcgtgtacctgttcatcggcacatccttcctgctggcgggcttcgtgtcactcttccgcatccgcaccatcatgaagcacgacggcaccaagacggagccgctggagaggctcatggtgcgtatcggcgtcttctccgtgctctacaccgtaccggccaccatcgtcatcgcctgctacttctatgagcaggccttccgcgagcactgggagcgctcgtgggtaagccagcactgcaagagcctagccatcccctgcccggcccactacacgccccgcacgtcgcccgacttcacagtctacatgatcaaatacctcatgacgctcatcgtgggcatcacgtcgggcttctggatctggtccggcaagacgctgcactcgtggaggaagttctacacgcgtctcaccaacagccggcatggagagaccaccgtgtgaagcggtctcgctgctgggcgcccccctctcccaggtccggactgcaaccgtgccctccttcactcgggaggggggtgcaccctacggactcctattttatttttttaaataaagaacagtg

SEQ ID NO: 223 - protein, 571 aa, Rattus norvegicus
  misc_feature (1)..(571): Xaa=Unknown amino acid
MRARSALPRSALPRLLLPLLLLPAAGPAQFHGEKGISIPDHGFCQPISIPLCTDIAYNQTIMPNLLGHTNQEDAGLEVHQFYPLVKVQCSPELRFFLCSMYAPVCTVLEQAIPPCRSICERARQGCEALMNKFGFQWPERLRCEHFPRHGAEQICVGQNHSEDGTPALLTTAPPSGLQPGAGGTPGGPGGGGAPPRYATLEHPFHCPRVLKVPSYLSYKFLGERDCAAPCEPARPDGSMFFSHHHTRFARLWILTWSVLCCASTFFTVTTSLVAMQRFRYPERPIIFLSGCYTMVSVAYIAGFVLQERVVCNERFSEDGYRTVGQGTKKEGCTILFMMLYFFSMASSIWWVILSLTWFLAAGMKWGHAAIEANSQYFHLAAWAVPAVKTITILAMGQIDGDLLSGVCFVGLNRLDPLRGFVLAPLFVYLFIGTSFLLAGFVSLFRIRTIMKHDGTKTEPLERLMVRIGVFSVLYTVPATIVIACYFYEQAFREHWERSWVSQHCKSLAIPCPAHYTPRTSPDFTVYMIKYLMTLIVGITSGFWIWSGKTLHSWRKFYTRLTNSRHGETTVX

SEQ ID NO: 224 - DNA, 1983 bp, Homo sapiens
  ref <308>: DATABASE ACCESSION NUMBER: Refseq / NM_001466
  ref <309>: DATABASE ENTRY DATE: 2001-12-20
cgagtaaagtttgcaaagaggcgcgggaggcggcagccgcagcgaggaggcggcggggaagaagcgcagtctccgggttgggggcgggggcggggggggcgccaaggagccgggtggggggcggcggccagcatgcggccccgcagcgccctgccccgcctgctgctgccgctgctgctgctgcccgccgccgggccggcccagttccacggggagaagggcatctccatcccggaccacggcttctgccagcccatctccatcccgctgtgcacggacatcgcctacaaccagaccatcatgcccaaccttctgggccacacgaaccaggaggacgcaggcctagaggtgcaccagttctatccgctggtgaaggtgcagtgctcgcccgaactgcgcttcttcctgtgctccatgtacgcacccgtgtgcaccgtgctggaacaggccatcccgccgtgccgctctatctgtgagcgcgcgcgccagggctgcgaagccctcatgaacaagttcggttttcagtggcccgagcgcctgcgctgcgagcacttcccgcgccacggcgccgagcagatctgcgtcggccagaaccactccgaggacggagctcccgcgctactcaccaccgcgccgccgccgggactgcagccgggtgccgggggcaccccgggtggcccgggcggcggcggcgctcccccgcgctacgccacgctggagcaccccttccactgcccgcgcgtcctcaaggtgccatcctatctcagctacaagtttctgggcgagcgtgattgtgctgcgccctgcgaacctgcgcggcccgatggttccatgttcttctcacaggaggagacgcgtttcgcgcgcctctggatcctcacctggtcggtgctgtgctgcgcttccaccttcttcactgtcaccacgtacttggtagacatgcagcgcttccgctacccagagcggcctatcatttttctgtcgggctgctacaccatggtgtcggtggcctacatcgcgggcttcgtgctccaggagcgcgtggtgtgcaacgagcgcttctccgaggacggttaccgcacggtggtgcagggcaccaagaaggagggctgcaccatcctcttcatgatgctctacttcttcagcatggccagctccatctggtgggtcatcctgtcgctcacctggttcctggcagccggcatgaagtggggccacgaggccatcgaggccaactctcagtacttccacctggccgcctgggccgtgccggccgtcaagaccatcaccatcctggccatgggccagatcgacggcgacctgctgagcggcgtgtgcttcgtaggcctcaacagcctggacccgctgcggggcttcgtgctagcgccgctcttcgtgtacctgttcatcggcacgtccttcctcctggccggcttcgtgtcgctcttccgcatccgcaccatcatgaagcacgacggcaccaagaccgaaaagctggagcggctcatggtgcgcatcggcgtcttctccgtgctctacacagtgcccgccaccatcgtcatcgcttgctacttctacgagcaggccttccgcgagcactgggagcgctcgtgggtgagccagcactgcaagagcctggccatcccgtgcccggcgcactacacgccgcgcatgtcgcccgacttcacggtctacatgatcaaatacctcatgacgctcatcgtgggcatcacgtcgggcttctggatctggtcgggcaagacgctgcactcgtggaggaagttctacactcgcctcaccaacagccgacacggtgagaccaccgtgtgagggacgcccccaggccggaaccgcgcggcgctttcctccgcccggggtggggcccctacagactccgtattttatttttttaaataaaaaacgatcgaaaccatttcacttttaggttgctttttaaaagagaactctctgcccaacaccccc

SEQ ID NO: 225 - protein, 565 aa, Homo sapiens
  ref <308>: DATABASE ACCESSION NUMBER: Refseq / NP_001457
  ref <309>: DATABASE ENTRY DATE: 2001-12-20
MRPRSALPRLLLPLLLLPAAGPAQFHGEKGISIPDHGFCQPISIPLCTDIAYNQTIMPNLLGHTNQEDAGLEVHQFYPLVKVQCSPELRFFLCSMYAPVCTVLEQAIPPCRSICERARQGCEALMNKFGFQWPERLRCEHFPRHGAEQICVGQNHSEDGAPALLTTAPPPGLQPGAGGTPGGPGGGGAPPRYATLEHPFHCPRVLKVPSYLSYKFLGERDCAAPCEPARPDGSMFFSQEETRFARLWILTWSVLCCASTFFTVTTYLVDMQRFRYPERPIIFLSGCYTMVSVAYIAGFVLQERVVCNERFSEDGYRTVVQGTKKEGCTILFMMLYFFSMASSIWWVILSLTWFLAAGMKWGHEAIEANSQYFHLAAWAVPAVKTITILAMGQIDGDLLSGVCFVGLNSLDPLRGFVLAPLFVYLFIGTSFLLAGFVSLFRIRTIMKHDGTKTEKLERLMVRIGVFSVLYTVPATIVIACYFYEQAFREHWERSWVSQHCKSLAIPCPAHYTPRMSPDFTVYMIKYLMTLIVGITSGFWIWSGKTLHSWRKFYTRLTNSRHGETTV

SEQ ID NO: 226 - DNA, 1175 bp, Rattus norvegicus
  ref <308>: DATABASE ACCESSION NUMBER: EMBL / AF022085
  ref <309>: DATABASE ENTRY DATE: 2001-10-30
actgatgacggcatggctgtggccactggctcctgggacagttttctcagaatctggaattgagtgctgtattttctgttctccaatgatatttggagaaatccgtgctacagccatagctgtgaggaaaaaaccctctaccttctatttgcagatgaagttcttctattgaggtgactatatatatatataaagccactttcaataaactgtagtttattgaaactcttctaacaaaaatggtggtcaaagaaacaatcaagactaagatcccttgctgcggttaagcccgtgatattcactgagcggttgtgttgactttatccctatcccgacagactcttgcttgtgctaattgtttttctgtagattagagtgcacactttatagcaggacaaccatttgtgtttgcattttgttaaggcctaccattgaactttgtatatacaagaaatgtcacattttttagagtgttgttgtggaagcaccagggcctgtgacagacagaagtgatactgtagacatatgtgctgtctgaaggaaggccccttggattctgacatcacattttaacctgaatgtccctgactgcttcacgattaggagggctgataggtgaggtgattctgagggacccagtggctgttcacgcattctttggcacactaggaagttaagtagatgctcattttcagtcctttgaggggacaggtgatatgaaggccagggggtaaaaaaattcactttgacatagggtacacactgaagaaatgtcattacagtttattacattagaaaccagtagacactggcatgcaatttttggtattttaagaggttcagccatttgaaccatcggaccttgctgttaattttgcattctgaagcgaagtttgtagaaagtactagtatttgagaagtctgacaaaaacctgacttgtccctgcatttgaagactcttgcctggtgttctctgtaacaggacgaaacagtgtctcacctttgacgtttttgagaaatgtaaactcatccattcaactggcacaaatatatgattgatgtgtcacacacacatacatatatatatatatgtatatacacacacatatacacatgtacgatgactttatgaattctgtgtgatgtaaaaatttatgtaatgtaaaagcaggtat

SEQ ID NO: 227 - DNA, 439 bp, Rattus norvegicus
  ref <308>: DATABASE ACCESSION NUMBER: EMBL / AI639513
  ref <309>: DATABASE ENTRY DATE: 2000-03-04
gtttgaaattatataatctccaagctagtttgctgtccttgggctaattacatacaagtatgaatcttctgcaaggacatccagatagctacagagctggcattgttcaaaaaacctgattgaaaatgaaacaacttctccatttttggcagaggattcctgttgggacagctttatcagaaaagaataatagtggctatatctgtcaaaccaaaaactttcatgcatcttgtagtgttatgtagcctgtggaatgaattcctcttcccccttgaggccaggactgactctcctggaagaactcaacctatatacagctgtgccaaatgaaggctacctgcctttgagactccccctgctgcttctgtcgttgttcccttgtcaaatacaattttattctcaggatgcaaattccaataaagtacaaatttttgtttaa

SEQ ID NO: 228 - DNA, 375 bp, Homo sapiens
  ref <308>: DATABASE ACCESSION NUMBER: EMBL / AA688158
  ref <309>: DATABASE ENTRY DATE: 1998-01-05
gataataaaattttatctgacaagtgaacaatgacagaagcagcagtgaaagtttcggagaggcaggtatccttcattttggcacagctgtatatagattgagtttttccagggaagtcattcctggactcaagggagaaaaaatgaattcattccacaggctatgtaacaatgcaagatgcatgaaagttcttagtttggattaacatatccgctattattcttttctggtaaagctgtcccaacaggaatcctctgacaaaaagttgaaatcctaggcttctccaccagatatttttatcaatgcccactctctagttacctggatatcctgttcttgcagccagattcatatttgtatgtggttagtcaagg

SEQ ID NO: 229 - DNA, 2707 bp, Rattus norvegicus
  ref <308>: DATABASE ACCESSION NUMBER: Refseq / NM_031659
  ref <309>: DATABASE ENTRY DATE: 2003-01-13
gcgtacctgctgtgggctgagacccaattttcctggggccaatctctgcttacgcctgctgtgccctctccgcggtcctgcctgaagtttgccctaacgcacaatggaaggtcctcgctcagacgtgggccgctggggtaggagcccctggcagcccacgacaccgtcgccagagccagagccagagccagagccagacagaagctcgcgctcccgccgaggaggaggccgctccttctgggctcgctgttgtggctgctgctcctgcgggaacagagctgatgatgactggggacccgaaccttctggctccagaagccgagggaccagctcccggggtggaggctcccggggtggggactctcggggtagggactctcgaggtggccgaagacctgagtctcggggcagtggtgtgaatgcagctggagatggcaccatccgagagggaatgctggttgtgaatggtgtagatctgctgtgctcgcgatcagaccagaaccgccgagagcaccacaccgatgagtttgaatatgacgagctaattttgcgccgtgggcagcccttccacataatcctcttcctgaaccgggagtatgagtcctctgatcgcattgcccttgagcttctcatcggaaacaatcctgaggtgggcaagggcacccacgtgatcatcccagtgggtaagggaggcagcggtggctggaaggcccaagtgactaagaccaatggacacaacctaaccctgcgcgtccacacctcccctaatgccatcattggcaagtttcaattcactgtccgtacacgctcagaggctggcgagttccagctgccctttgacccccgcaatgagatctacatcctcttcaatccctggtgtccagaggacatagtgtatgtggaccacgaagactggcgacaagaatatgtgcttaatgagtctggaagaatctactatgggacagaagcacagattggcgaacggacctggaattatggccagtttgaccatggggtgctggatgcctgcctgtacattctggatcggagggggatgccatatggaggtcgcggggacccagtcagtgtctctcgggtcgtctctgccatggtgaactccctggatgacaatggagttctgattgggaactggactggcgactactctcgaggcaccaatccctcagcgtgggtgggcagtgtggagatcctgcttagctacctacgcaccggctattccgtcccctatggccaatgctgggtctttgccggtgtgaccaccacagtgctccgatgtctgggccttgctacccgtactgtcaccaacttcaactctgcacacgacacggacacgtccctcactatggacatttattttgatgagaacatgaagccactggagcacctgaaccacgattctgtttggaacttccacgtgtggaacgactgctggatgaagaggccagatctgccctcaggctttgatgggtggcaggttgtggatgccacaccccaggagaccagcagtggcatcttctgctgtggcccctgttcagtggagtccatcaagaatggcttagtctacatgaagtatgacacacctttcatttttgccgaggtaaacagtgataaggtatactggcagcggcaggatgacggcagcttcaagatcgtgtatgtggaagagaaagccattggcacactgattgtcacaaaggcgatcaactccaacatgcgagaggacatcacccacatctataagcacccagaaggctcagaagcagagaggaaggctgtggaaaaggctgcggcccatggcagcaaacctaatgtgtatgccacccgggactctgctgaggatgtggcaatgcaggtggaggcacaggatgctgtgatggggcaggatctgactgtctctgtggtgttgaccaatcgtggcagtagccgacgcactgtgaagttgcacctctacctttgtgtcacctactacactggtgtctctgggcctaccttcaaggagaccaagaaagaagtggtattagccccaggagcctcggacactgtggccatgcctgtggcctacaaggaatacaagccccaccttgtggaccagggggcaatgttgctcaatgtctcaggccatgtcaaggagagtgggcaggtactagccaagcaacacaccttccgtttgcgcaccccagacctctctctgacattactgggagctgcagtagttggccaggaatgtgaagtccagatcgtgttcaagaaccccctgcctatcaccctcaccaacgttgtcttccggctcgaaggttctgggttacagagacccaaggtcctcaatgttggggacatcgggggtaacgagacggttacactgcgccagacatttgttcctgtgcgaccaggcccccgccagctcattgccagtctggacagtccacagctttcccaagtacacggtgtcattcaagtggatgtggccccatcctctggaggcagaggtttctcagaggctgtaggtgacagtcgctccggggagaacatacctatggcatttcgaggtggagcttagccctgggccaggagcaataggactgaaatcagatgaacaaggacattgccccaagatggggtcctaccataaagtagctcccctggctcggacaagaaggctggggcacccggggaggctgttactctt

SEQ ID NO: 230 - protein, 824 aa, Rattus norvegicus
  ref <308>: DATABASE ACCESSION NUMBER: Refseq / NP_113847
  ref <309>: DATABASE ENTRY DATE: 2003-01-13
MEGPRSDVGRWGRSPWQPTTPSPEPEPEPEPDRSSRSRRGGGRSFWARCCGCCSCGNRADDDWGPEPSGSRSRGTSSRGGGSRGGDSRGRDSRGGRRPESRGSGVNAAGDGTIREGMLVVNGVDLLCSRSDQNRREHHTDEFEYDELILRRGQPFHIILFLNREYESSDRIALELLIGNNPEVGKGTHVIIPVGKGGSGGWKAQVTKTNGHNLTLRVHTSPNAIIGKFQFTVRTRSEAGEFQLPFDPRNEIYILFNPWCPEDIVYVDHEDWRQEYVLNESGRIYYGTEAQIGERTWNYGQFDHGVLDACLYILDRRGMPYGGRGDPVSVSRVVSAMVNSLDDNGVLIGNWTGDYSRGTNPSAWVGSVEILLSYLRTGYSVPYGQCWVFAGVTTTVLRCLGLATRTVTNFNSAHDTDTSLTMDIYFDENMKPLEHLNHDSVWNFHVWNDCWMKRPDLPSGFDGWQVVDATPQETSSGIFCCGPCSVESIKNGLVYMKYDTPFIFAEVNSDKVYWQRQDDGSFKIVYVEEKAIGTLIVTKAINSNMREDITHIYKHPEGSEAERKAVEKAAAHGSKPNVYATRDSAEDVAMQVEAQDAVMGQDLTVSVVLTNRGSSRRTVKLHLYLCVTYYTGVSGPTFKETKKEVVLAPGASDTVAMPVAYKEYKPHLVDQGAMLLNVSGHVKESGQVLAKQHTFRLRTPDLSLTLLGAAVVGQECEVQIVFKNPLPITLTNVVFRLEGSGLQRPKVLNVGDIGGNETVTLRQTFVPVRPGPRQLIASLDSPQLSQVHGVIQVDVAPSSGGRGFSEAVGDSRSGENIPMAFRGGA

SEQ ID NO: 231 - DNA, 2709 bp, Homo sapiens
  ref <308>: DATABASE ACCESSION NUMBER: Refseq / NM_000359
  ref <309>: DATABASE ENTRY DATE: 2002-11-05
gggtcctgtcccatccatcctgacctgttccatctcagccccaggactcagtactgcggttgccaacactgctgccaggcatgatggatgggccacgttccgatgtgggccgttggggtggcaaccccttgcagccccctaccacgccatctccagagccagagccagagccagacggacgctctcgcagaggaggaggccgttccttctgggctcgctgctgtggctgctgttcatgccgaaatgcggcagatgacgactggggacctgaaccctctgactccaggggtcgagggtccagctctggcactcgaagacctggctcccggggctcagactcccgccggcctgtatcccggggcagcggtgtcaatgcagctggagatggcaccatccgagagggcatgctagtagtgaacggtgtggacttgctgagctcgcgctcggaccagaaccgccgagagcaccacacagacgagtatgagtacgacgagctgatagtgcgccgcgggcagcctttccatatgctcctcctcctgtcccggacctatgaatcctctgatcgcatcacccttgagttactcatcggaaacaaccccgaggtgggcaagggcacgcacgtgatcatcccagtgggcaaggggggcagtggaggctggaaagcccaggtggtcaaggccagtgggcagaatctgaacctgcgggtccacacttcccccaacgccatcatcggcaagtttcagttcacagtccgcacacaatcagacgctggggagttccagttgccctttgacccccgcaatgagatctacatcctcttcaacccctggtgcccagaggacattgtgtacgtggaccatgaggattggcggcaggagtatgttcttaatgagtctgggagaatttactacgggaccgaagcacagattggtgagcggacctggaactacggccagtttgaccacggggtgctggatgcctgcttatacatcctggaccggcgggggatgccatatggaggccgtggagacccagtcaatgtctcccgggtcatctctgccatggtgaactccctggatgacaatggagtcctgattgggaactggtctggtgattactcccgaggcaccaacccatcagcgtgggtgggcagcgtggagatcctgcttagctacctacgcacgggatattccgtcccctatggccagtgctgggtctttgctggagtgaccaccacagtgctgcgctgcctgggtctggccacccgtactgtcaccaacttcaactccgcccacgacacagacacatcccttaccatggacatctacttcgacgagaacatgaagcccctggagcacctgaaccatgattctgtctggaacttccatgtgtggaacgactgctggatgaagaggccggatctgccctcgggctttgatgggtggcaggtggtggatgccacaccccaagagactagcagtggcatcttctgctgcggcccctgctctgtggagtccatcaagaatggcctggtctacatgaagtacgacacgcctttcatttttgctgaggtgaatagtgacaaggtgtactggcagcggcaggatgatggcagcttcaagattgtttatgtggaggagaaggccatcggcacactcattgtcacaaaggccatcagctccaacatgcgggaggacatcacctacctctataagcacccagaaggctcagacgcagagcggaaggcagtagagacagcagcagcccacggcagcaaacccaatgtgtatgccaaccggggctcagcggaggatgtggccatgcaggtggaggcacaggacgcggtgatggggcaggatctgatggtctctgtgatgctgatcaatcacagcagcagccgccgcacagtgaaactgcacctctacctctcagtcactttctatactggtgtcagtggtaccatcttcaaggagaccaagaaggaagtggagctggcaccaggggcctcggaccgtgtgaccatgccagtggcctacaaggaataccggccccatcttgtggaccagggggccatgctgctcaatgtctcaggccacgtcaaggagagcgggcaggtgctggccaagcagcacaccttccgtctgcgcaccccagacctctccctcacgttactgggagcagcagtggttggccaggagtgtgaagtacagattgtcttcaagaacccccttcccgtcaccctcaccaatgtcgtcttccggctcgaaggctctgggttacagaggcccaagatcctcaacgttggggacattggaggcaatgaaacagtgacactgcgccagtcgtttgtgcctgtgcgaccaggcccccgccagctcattgccagcttggacagcccacagctctcccaggtgcacggtgtcatccaggtggatgtggccccagcccctggggatgggggcttcttctcagacgctggaggtgacagtcacttaggagagaccatccctatggcatctcgaggtggagcttagccctgtgccaggagcaatgggactggagtcagatgagcaaggacattgccccaagataggggcacactacagagcagctccccaggagctcaggtggggagtccagggctcccggagagggagtcagtcttcacttgcactgggggaacagatgctaataaactgttttttaatg

SEQ ID NO: 232 - protein, 817 aa, Homo sapiens
  ref <308>: DATABASE ACCESSION NUMBER: Refseq / NP_000350
  ref <309>: DATABASE ENTRY DATE: 2002-11-05
MMDGPRSDVGRWGGNPLQPPTTPSPEPEPEPDGRSRRGGGRSFWARCCGCCSCRNAADDDWGPEPSDSRGRGSSSGTRRPGSRGSDSRRPVSRGSGVNAAGDGTIREGMLVVNGVDLLSSRSDQNRREHHTDEYEYDELIVRRGQPFHMLLLLSRTYESSDRITLELLIGNNPEVGKGTHVIIPVGKGGSGGWKAQVVKASGQNLNLRVHTSPNAIIGKFQFTVRTQSDAGEFQLPFDPRNEIYILFNPWCPEDIVYVDHEDWRQEYVLNESGRIYYGTEAQIGERTWNYGQFDHGVLDACLYILDRRGMPYGGRGDPVNVSRVISAMVNSLDDNGVLIGNWSGDYSRGTNPSAWVGSVEILLSYLRTGYSVPYGQCWVFAGVTTTVLRCLGLATRTVTNFNSAHDTDTSLTMDIYFDENMKPLEHLNHDSVWNFHVWNDCWMKRPDLPSGFDGWQVVDATPQETSSGIFCCGPCSVESIKNGLVYMKYDTPFIFAEVNSDKVYWQRQDDGSFKIVYVEEKAIGTLIVTKAISSNMREDITYLYKHPEGSDAERKAVETAAAHGSKPNVYANRGSAEDVAMQVEAQDAVMGQDLMVSVMLINHSSSRRTVKLHLYLSVTFYTGVSGTIFKETKKEVELAPGASDRVTMPVAYKEYRPHLVDQGAMLLNVSGHVKESGQVLAKQHTFRLRTPDLSLTLLGAAVVGQECEVQIVFKNPLPVTLTNVVFRLEGSGLQRPKILNVGDIGGNETVTLRQSFVPVRPGPRQLIASLDSPQLSQVHGVIQVDVAPAPGDGGFFSDAGGDSHLGETIPMASRGGA

SEQ ID NO: 233 - DNA, 880 bp, Rattus norvegicus
  ref <308>: DATABASE ACCESSION NUMBER: Refseq / NM_012708
  ref <309>: DATABASE ENTRY DATE: 2003-01-14
gatctccgcactgctaggatgctgcaagccggagcacctaccgccggctctttccggacgggagaagtccacaccgggacaaccatcatggctgtggaatttgacgggggtgtcgtggtgggctctgattcccgagtgtcagcgggagcagccgtagtgaaccgcgtgtttgacaagctctcccctctgcaccagcgcatctactgtgccctctcgggttccgctgctgatgcccaagccatagccgacatggccgcctaccagctggagctgcacgggttggaactggaggagccgccccttgttctggctgctgcaaacatagtgaagaacatctcctacaagtaccgcgaggacttgttagcgcatctcatggtagctggttgggaccaacatgaggggggccaggtgtatggaaccatgggagggatgctaattcgacagccctttgcgatcggcggttccggaagcacctatatttacggttatgtggacgcagcttataaaccaggcatgacccccgaggagtgccggcgtttcaccacagacgccatcactctggccatgaaccgagatggctccagtgggggtgtcatctacctggtcaccattacagctgatggtgtggaccatcgcgtcatcctgggagacgagctgccaaaattctacgatgagtgaagtcccttctttgtttgcaataaactttatggagccagaggttggtgtaatgggcagaggtgaaatgggtatcagagaaacggagtgcgtggagggaagcttcctcccggccgagagatcagcaagcacctcccattcttttttaaaaaataaactttattattaaaataaaaaactcttataaataaaaaataagtaaaac

SEQ ID NO: 234 - protein, 219 aa, Rattus norvegicus
  ref <308>: DATABASE ACCESSION NUMBER: Refseq / NP_036840
  ref <309>: DATABASE ENTRY DATE: 2003-01-14
MLQAGAPTAGSFRTGEVHTGTTIMAVEFDGGVVVGSDSRVSAGAAVVNRVFDKLSPLHQRIYCALSGSAADAQAIADMAAYQLELHGLELEEPPLVLAAANIVKNISYKYREDLLAHLMVAGWDQHEGGQVYGTMGGMLIRQPFAIGGSGSTYIYGYVDAAYKPGMTPEECRRFTTDAITLAMNRDGSSGGVIYLVTITADGVDHRVILGDELPKFYDE

SEQ ID NO: 235 - DNA, 2791 bp, Rattus norvegicus
  ref <308>: DATABASE ACCESSION NUMBER: Refseq / NM_017035
  ref <309>: DATABASE ENTRY DATE: 2003-01-14
ccccctgctccgcgtcctttctcggtcccctggagggggcggggagaggcgcgggttggcgggcccggggggcggtacggtgtcctggacccaccccccccccggccgcctcccgccgcagttcagttgggtccttgtaccggcctgcgcaaggaccccaggccgctcggttgttgctcaagtgaatcacgccgggtcccctccgccgcgccgccgacgggcatggactcgggtagggacttcctgaccctgcacgggctccaggatgacccggaccttcaggcccttctgaagggcagccagcttctgaaggtgaagtccagctcgtggcgtagggaacgcttctacaagctacaggaggactgcaagaccatctggcaggaatctcgaaaggtcatgaggtccccggagtcgcagctgttctccatcgaggacattcaggaggtacggatgggacaccgcacagaaggcctggagaagtttgcccgagacatccccgaggatcgatgcttctccattgtcttcaaggaccagcgcaacaccctagacctcattgccccatcaccagctgacgctcagcactgggtgcagggcctgcgcaagatcatccaccactccggctccatggaccagcggcagaagctgcagcactggattcactcctgcttgcgaaaggctgataaaaacaaggacaacaagatgaacttcaaggagctgaaggacttcctgaaggagctcaacatccaggtggatgacggctacgccaggaagatcttcagggaatgtgaccactcccagacagactcgctggaggatgaggagattgagaccttctacaagatgctgacccagcgcgcagagatcgaccgtgcttttgaggaggccgcaggatccgcggagaccctgtcggtggagaggctagtgacgtttctgcagcaccagcagcgggaggaggaggcagggccagccttggccctctctctcattgagcgctacgagcccagtgagactgccaaggcccagcggcagatgaccaaggatggcttcctcatgtacttgctgtcggctgacggtaacgccttcagcctggcacaccgccgtgtctaccaggacatggaccagccactgagtcactacttagtgtcttcttcccacaacacctacctgctggaagaccagctcacagggcccagcagcacggaggcctacatccgggctctgtgcaaaggctgccggtgcttggagctcgactgctgggatggtcccaaccaggaacccatcatctaccacggctacacttttacctctaagatacttttctgtgacgtgctcagggccatcagggactatgccttcaaggcatccccctacccagtcatcctgtccctggagaaccactgtagcctggagcaacaacgagtcatggcccgtcacctgagggctatcctggggcccatactgttggaccagccactggatggggttaccacgagcctgccttcacctgagcaactgaagggcaagatcctgttgaaagggaagaagctgggagggctgctgcctgctggaggggagaatgggtccgaagccactgacgtgtctgacgaggtagaggctgctgaaatggaggacgaggctgtgcgcagccaagtgcaacacaagcccaaggaggataaactaaagctggtgccggagctctccgacatgatcatttactgcaagagcgtccactttggtggcttctccagtcctggcacctctgggcaggcattctatgagatggcttccttctctgagagccgtgccctccggttgctgcaagaatcaggaaatggttttgtccgtcataacgtgagctgtctgagcaggatctacccggctgggtggagaacagattcctccaactacagtcctgtggagatgtggaacgggggctgccagattgttgctctgaacttccaaacccctgggccagaaatggatgtttaccttggctgcttccaggacaatggaggctgtgggtatgtgctgaaacccgcctttctgagagaccccaacaccaccttcaactcacgtgccctgactcaggggccctggtggcgtccagagaggctccgtgtccggatcatctctggacagcagctgccaaaggtcaataagaataagaattctatcgtggaccccaaggtgatcgtggagatccatggcgtgggccgggacaccggtagccgtcagacagcagttattaccaataatggtttcaacccacggtgggacatggagtttgagtttgaggtaacagtgcctgaccttgccctcgtacgcttcatggtagaggattatgattcctcttctaagaacgactttattggccagagtactatcccctggaacagcctcaagcaggggtaccgccatgtccacctcttgtctaagaatggagaccagcatccatcagccacactttttgtgaagatctccatccaggactaagcccgggggtctgatgcagtccgacctgagtgagtggagctgtgtccgcacctcggccaaggctgacattattgcaccgacctctggcgcggagcctgaggccctgaactgccttcagtgccaacacatcgcttgagcttctgcctctctggaggcccaggagtggtccgatccccggagcgctccaaaattccgttaggaacaacactgcatccctctccctaccctctagctgtctttatggataagtttttataaaaaaaaaaaatcaaaagaaaaaaaaaaaaaaaaaaaaaaa

SEQ ID NO: 236 - protein, 756 aa, Rattus norvegicus
  ref <308>: DATABASE ACCESSION NUMBER: Refseq / NP_058731
  ref <309>: DATABASE ENTRY DATE: 2003-01-14
MDSGRDFLTLHGLQDDPDLQALLKGSQLLKVKSSSWRRERFYKLQEDCKTIWQESRKVMRSPESQLFSIEDIQEVRMGHRTEGLEKFARDIPEDRCFSIVFKDQRNTLDLIAPSPADAQHWVQGLRKIIHHSGSMDQRQKLQHWIHSCLRKADKNKDNKMNFKELKDFLKELNIQVDDGYARKIFRECDHSQTDSLEDEEIETFYKMLTQRAEIDRAFEEAAGSAETLSVERLVTFLQHQQREEEAGPALALSLIERYEPSETAKAQRQMTKDGFLMYLLSADGNAFSLAHRRVYQDMDQPLSHYLVSSSHNTYLLEDQLTGPSSTEAYIRALCKGCRCLELDCWDGPNQEPIIYHGYTFTSKILFCDVLRAIRDYAFKASPYPVILSLENHCSLEQQRVMARHLRAILGPILLDQPLDGVTTSLPSPEQLKGKILLKGKKLGGLLPAGGENGSEATDVSDEVEAAEMEDEAVRSQVQHKPKEDKLKLVPELSDMIIYCKSVHFGGFSSPGTSGQAFYEMASFSESRALRLLQESGNGFVRHNVSCLSRIYPAGWRTDSSNYSPVEMWNGGCQIVALNFQTPGPEMDVYLGCFQDNGGCGYVLKPAFLRDPNTTFNSRALTQGPWWRPERLRVRIISGQQLPKVNKNKNSIVDPKVIVEIHGVGRDTGSRQTAVITNNGFNPRWDMEFEFEVTVPDLALVRFMVEDYDSSSKNDFIGQSTIPWNSLKQGYRHVHLLSKNGDQHPSATLFVKISIQD

SEQ ID NO: 237 - DNA, 1731 bp, Rattus norvegicus
  ref <308>: DATABASE ACCESSION NUMBER: EMBL / D26393
  ref <309>: DATABASE ENTRY DATE: 2001-11-16
gtcgacagtctgggaggaatcgcccatcgagggaatagatgaaccacaccagagaacatggtagaagcggcccagcagagcaacgtgggctggggtgtacttcagtcggcagagtgctttgatctccagtagtggcccatgccatccagaggtggggagagagcttggggagcagactgtttggaaatggatggccctgtcttctttccatgtaactttccaactcccagttccattctccaccagcaacaacctcatgccatttgaggtgctacttcaatatcgctggcgtctactcatctatgtgaacttaagagtctggtgtcaggcgtgagctgaggtagaggtgggctcttctcagcctctataaaccaattacaccacttgagccaagcagtacacatgcactttctcctccgcctatcagcctagctcctgacaaggtttctctccagccttttactttcctggcttcaagaaaggcggatatataccagggtggggagttgcatttcagagtgagacggttctgtcttcacctaccacttgttggcgatgtgaccttgggcaaagctcattaacagcacagtgcctagttccctaatttgtaaaacatatgctataggtgtgacgattacgaagggctgacttttgtaatggctttgcttcagggatctgcagactcgttgagccacaattaggatgagaatcaaggtgcttcagacttgtgacaggcactggcggcccctcacatgatcctcagataccagattgtggcgtgtgctgctaggatcacttgtctttccagtctcccaacatctcttgggtccgtgatacgcgccccccaccccaagcccagcctgacgcggcggtggctcatgcgccctggagtcccgggctctagccacggaacacgtcccaactctggcgcccggctccgcccctagcctcgggcgcgtctctcccgccgcctgcttgggtgctggagcagccgcgcccgcggctctgggagctgattggctgtggactgcgggacgggcagccggagagcgcacacaccctcttcccgcagccaatgagcgcgcccacgtcactgtcttgggcggcccaaagagccggcagcccctcaataagccacattgttgcaccaactccagtgctagagtctcaggacaccacaggctacacggagttatcccgcttaggagacccgaaggcaggagcatcactccagtgactctgataaggtgcgatcgcccgagaggaacagaactgtcatttttgcgaagttgagccttacggatcccgtgggcgaagttagcgacgggacgctgagcaactagaccggtcggcaggagtgagacttaggtgccttctagtagttgtgacttaaaaaaaaaaaaaaaaaggaaaagaaaaaaggaggaaaacctgtttctggaaacgcgaggccctcagctggtgagccatcgtggttaagcttctttgtgtggctcctggagtctccgatcccagccggacacccgggcctggtttcaaagcggtcgaactgctctgcccgctccaccggtagcgctcgaacctcggtttctctactcgaccccgactcgccgcagcaggatgatcgcctcgcatatgatcgcctgcttattcacggagctcaaccaaaaccaagtgcagaaggtaagtcggcacgggcgggagctgctggctcgcttcgaccaagttgcg

SEQ ID NO: 238 - DNA, 5787 bp, Rattus norvegicus
  ref <308>: DATABASE ACCESSION NUMBER: Refseq / NM_017261
  ref <309>: DATABASE ENTRY DATE: 2002-11-05
gagactgcctgcccctctctgtgactttcctgtgtgtgtgcgtgtgtgtgtatgtgtgtgtatgtgtgtgcgcgctcgtgtgagagaggagagagggagaagagagctcgagagagggtgattgtgtgagtgcatgggagggtgctgatattcccagacaccaggactacagcggcagctcagctaaaaactgcattcagccagtcctcgggacttcgggagcagggacaggacgcaaggcatcaacagccaccagctacaactgggaaataaggattcttctgccttcacttcgtgtttttagcagctccttgctaaatatcgacctcacaatgcagaggatctaatttgctgaggaaaacagtcaaagaaggaagaggaagaaagggaaacgaggggatattttgtggatgctctacttttcttggaaatgcaaaagattatgcatatttctgtcctcctttctcctgttttatggggactgatttttggtgtctcttctaacagcatacagataggggggctatttccaaggggcgctgatcaagaatacagtgcatttcgggtagggatggttcagttttccacttcggagttcagactgacaccccatatcgacaatttggaggtagccaacagtttcgcagtcaccaatgctttctgctcccagttttcaagaggagtctacgcaatttttggattttatgacaagaagtctgtaaataccatcacatcattctgtgggacactccatgtgtccttcatcacacctagcttcccaacagatggcacacatccatttgtcatccagatgcgacctgacctcaaaggagcactccttagcttgattgagtactaccaatgggacaagttcgcatacctctatgacagtgacagaggcttatcaacactgcaagctgttctggattctgctgcagagaagaagtggcaggtgactgctatcaatgtggggaacatcaacaatgacaagaaagatgagacctacagatcgctctttcaagatctggagttaaaaaaagaacggcgtgtaatcctggactgtgaaagggataaagtaaatgacattgtggaccaggttattaccattggaaaacatgttaaagggtaccattatatcattgcaaatctgggattcactgatggggacctgctgaaaattcagtttggaggagcaaatgtctctggatttcagattgtagactacgatgattccctggtgtctaaatttatagaaagatggtcaacactggaagagaaagaataccctggagcacacacagcgacaattaagtatacttcggccctgacgtatgatgctgtccaagtgatgactgaagcattccgtaaccttcggaagcagaggattgaaatatcccggagaggaaatgcaggggattgtttggccaacccagctgtgccctggggacaaggggtcgaaatagaaagggccctcaagcaggttcaagttgaaggcctctctggaaatataaagtttgaccagaatggaaaacgaataaactacacaattaacatcatggagctcaaaacaaatggaccccggaagattgggtactggagtgaagtggataaaatggttgtcaccctaactgagctcccatcaggaaatgacacgtctgggcttgaaaacaagactgtggtggtcaccacaatattggaatctccatatgttatgatgaagaaaaatcatgaaatgcttgaagggaatgagcgttacgagggctactgtgttgacttagctgcagaaattgccaaacactgtgggttcaagtacaagctgactattgttggggatggcaagtatggggccagggatgccgacaccaaaatttggaatggtatggttggagagcttgtctacgggaaagctgacattgcaattgctccattaactatcactctcgtgagagaagaggtgattgacttctccaagcccttcatgagtcttggaatctctatcatgatcaagaagcctcagaagtccaaaccaggagtgttttcctttcttgatcctttagcctatgagatctggatgtgcattgtgtttgcctacattggggtcagtgtagttttattcctggtcagcagatttagcccctacgagtggcacactgaggaatttgaagatggaagagaaacacaaagtagtgaatcaactaatgaatttgggatttttaatagtctctggttttccttgggtgcctttatgcggcagggatgcgatatttcgccaagatccctctctgggcgcattgttggaggtgtgtggtggttctttaccctgatcataatctcctcctacacggctaacttagctgccttcctgactgtagagaggatggtgtctcccatcgaaagtgctgaggatctgtctaagcaaacagaaattgcttatggaacattagactctggctccactaaagagtttttcaggagatctaaaatcgcagtgtttgataaaatgtggacttatatgaggagtgcagagccctctgtgtttgtgaggactaccgcagaaggagtagccagagtccggaaatccaaaggaaagtatgcctacttgctggagtccacaatgaacgagtacatcgagcagaggaagccttgtgacaccatgaaagtgggaggaaacttggattccaaaggctacggcatcgccacacctaaaggatcctcattaggaaccccagtaaatcttgcagtattgaaactcagtgagcaaggcgtcttagacaagctgaaaaacaaatggtggtacgataaaggtgaatgtggagccaaggactcgggaagtaaggaaaagaccagtgccctcagtctgagcaacgttgctggagtattctacatccttgtcgggggccttggtttggcaatgctggtggctttgattgagttctgttacaagtcaagggccgaggcgaaacgaatgaaggtggcaaagaatccacagaatattaacccatcttcctcgcagaattcccagaattttgcaacttataaggaaggttacaacgtatatggcatcgagagtgttaaaatttaggggatgaccttgagtgatgtcatgaggagcaaggcaaggctgtcaattacaggaagtactggagaaaatggacgtgttatgactccagaatttcccaaagcagtgcatgctgtcccttacgtgagtcctggcatgggaatgaatgtcagtgtgactgatctctcgtgattgataggaaccttctgagtgccttacacaatggaaccttctgagtgccttacacaatggtttccttgtgtgtttattgtcaaagtggtgagaggcatccgatatcttgaaggcttttctttcagccagaattcttaactatgtggagttcaccttgaattgtaaggaaagataaattacaaacagagcatcattttctacttccgatatcagaggaagcgtggtggacatgcacagctaacatggaaatactatcatttaactgaagtctttgtacagacaacaaacccgtttccgcagccactattgttagtctcttgattcataatgacttaagcacacttgacatcaactgcatcaagatgtgacctgttttataaataaaaaggaaaaaaacatttaaaataaaaaaatatttttaggtattttcacagacaaactggcttttaaataaatttgcttccgtactggttggttaagacaaatacaaaaacaaaaacaaaacaaaacaaaaaccaaaaaaaacaaaacaaaacaaaacaaataataaaaaaatgataaagtcaaactgagtgggaagtgattgaaaaaaaaggtctgtggtatcagttccgtattttttcaaagccaaatatgtaaatggtgaggaaggaaacagaggagaatccagtcgtgtaatttaatattgttattaaaactttaatgtatcctattctttaacctttggtgttaatatgaaactacttggtgatgcttgacatttgaaataaacatttttctattgttttatttgcaagtggtccaattaattttgcttagctacagtttggtcataaatccagtgatctaaagacaggaatgcatagtccctaagattcctaagaaaaggcccccagttaaaagactggaatattttttctctgacaagtagaatttcccccaaatagtctatctaaagctattttttctgtacatcatactgtataatagtaaaatatttgttaattaaaaagcatttaatctatatagataaatgacttatagtttaaaaatcagatttattatcaaatgtcagaaggcgtgatttctgctcttgaagtatttaaggttgtgtaggagcagtaatcaatatagataaagtcagaaatggcttgaaggtatcaactgttcagacacccgtactggccaaattctgtaatctaagtatgcatcttcagttttaaaattataaaaaccaacatcagtttttgaatactttagtgacctagaaatagtttctttccatttccatctataaaatcagccctaatttttatttatgccccaaatagaaggggcactttaataagtgtaatatggatactctcccatctctgtaactgttcactgaagagattatactgttttatttgatgaatttaagccatccatcttcccttcattaaaatgccttttatttttatttccactaatgtgttccaaatgagattagtttagggttaaaagcacctgacacacagtagctatctttaagatttatgttatttttttctcataaaaattctatgtaatatttggtgtctgaccaagtggttggtagagcatccttattgactatttttagagatcagaaatgtaagatttaacagtagccacttacattctacatggtaacatgtagttcgtgatgatcttcactaaattttaccatccctcctataaattccgagatcattcaaaataatttgagtgcattactcatcagggatgctggaggtacattttaagttttaataataaatgctagaatgaccaaattgcagactaattatttccatattgtacttaaaattagtttttaaaaattattttaaaaaaagatgactatatacaatcaatgctatttattgtacctctgggcgtactcttccaaaaattgagcttatcaatttttctctgtcaagcttgaactaatgtaaataatcgaaataatgtaaagttatattttcatgtttttatagatatgacatgacaagaacatataatgtaagagtatctcaagtgtggataatgttgattggctaacacagagctcagtcttaggcagtaaaacctagttcaatatccatgtaacaatgcatcagtatattgctgtatacatgtgtctgtgcatagaagtgataaatgctcaaataagagtggtgacagctatctcaaggttttttttaattcattttatataaactgttatggaaagaccaaaatattatgaactatcttatgtaaatttacaattgtcctttaatgtacattttgtttacagtatagtaccttattctctgctgtgttaagtgggtgtcgtactccaaggagacaaacactttctacaacttctattgaagacactgggatttccaattttttcatgtgtactatgtcagaaaatgcttttgattttatttttaaatctaacatctgatggctttttcagagtgttgtggaaacttcagtcatacataaaatatgttcttataaaa

SEQ ID NO: 239 - protein, 883 aa, Rattus norvegicus
  ref <308>: DATABASE ACCESSION NUMBER: Refseq / NP_058957
  ref <309>: DATABASE ENTRY DATE: 2002-11-05
MQKIMHISVLLSPVLWGLIFGVSSNSIQIGGLFPRGADQEYSAFRVGMVQFSTSEFRLTPHIDNLEVANSFAVTNAFCSQFSRGVYAIFGFYDKKSVNTITSFCGTLHVSFITPSFPTDGTHPFVIQMRPDLKGALLSLIEYYQWDKFAYLYDSDRGLSTLQAVLDSAAEKKWQVTAINVGNINNDKKDETYRSLFQDLELKKERRVILDCERDKVNDIVDQVITIGKHVKGYHYIIANLGFTDGDLLKIQFGGANVSGFQIVDYDDSLVSKFIERWSTLEEKEYPGAHTATIKYTSALTYDAVQVMTEAFRNLRKQRIEISRRGNAGDCLANPAVPWGQGVEIERALKQVQVEGLSGNIKFDQNGKRINYTINIMELKTNGPRKIGYWSEVDKMVVTLTELPSGNDTSGLENKTVVVTTILESPYVMMKKNHEMLEGNERYEGYCVDLAAEIAKHCGFKYKLTIVGDGKYGARDADTKIWNGMVGELVYGKADIAIAPLTITLVREEVIDFSKPFMSLGISIMIKKPQKSKPGVFSFLDPLAYEIWMCIVFAYIGVSVVLFLVSRFSPYEWHTEEFEDGRETQSSESTNEFGIFNSLWFSLGAFMRQGCDISPRSLSGRIVGGVWWFFTLIIISSYTANLAAFLTVERMVSPIESAEDLSKQTEIAYGTLDSGSTKEFFRRSKIAVFDKMWTYMRSAEPSVFVRTTAEGVARVRKSKGKYAYLLESTMNEYIEQRKPCDTMKVGGNLDSKGYGIATPKGSSLGTPVNLAVLKLSEQGVLDKLKNKWWYDKGECGAKDSGSKEKTSALSLSNVAGVFYILVGGLGLAMLVALIEFCYKSRAEAKRMKVAKNPQNINPSSSQNSQNFATYKEGYNVYGIESVKI

SEQ ID NO: 240 - DNA, 1259 bp, Rattus norvegicus
  ref <308>: DATABASE ACCESSION NUMBER: Refseq / NM_019290
  ref <309>: DATABASE ENTRY DATE: 2003-01-14
ggcacgagggcgagggtgcagccccggagcggcggcggggcaaaatgaaaaacgaaattgctgctgttgtcttctttttcacaaggctggttcgaaagcatgataagttgaaaaaagaagcagttgagaggtttgctgagaaattgactcaaatacttcaagagaaatacaaaaatcactggtatccagaaaaaccctcaaaaggacaagcctacagatgcattcgtgtcaataagtttcagagagttgatcccgacgtcctgaaagcctgtgaggacagctgcatcctgtacagtgacctgggcttgccaaaggagcttacactctgggtggatccgtgtgaggtgtgctgccggtatggaaagaaaaacaatgcattcattgttgccagctttgaaaatgaggatgagaacaaggatgagatctccaagaaagttagcagggctcttgataaggtgacctctgattatcattcagggtcctcctcctcagatgaagacacaagcaaggaagtagaagtgaaaccgagtgcagtggctacaacgccaagccccgtgtaccagatttcagaactgatattcccacctcttccaatgtggcaccctttgcccagaaaaaagccaggaatgtaccgagggggtggccatcagagtcactaccctcctcctgttccatttgcttatccaagtccaggaaggaagaataaagcgttccgcccaattccagtgacatgggtacctcctcctggaatgcattgtgatcggaatcactggattaatcctcacatgttagcacctcactagttcatttggattgggcggatgtcattttgatagaaaggaagaaataccttcttagatacttaagagtttcacaacttgtagtgaagtcagatggacaaaaccatcaggcttatttttatagaaaagctattgagataatctttcttaaagtatatatatatatgcactttagatatattgatatagtttgagaaactttattaaagttagtcaagtgcctgagtttttaatattggacttgagtatttatatattgtgcattgactctgttggatacaaaacactgtaggagggcgatatgttttagcacctttgagcatttactttatggagaatatgtaagttatttatacagaaggacatttattttatgtcacatagaagaattgtgtgaaatcatgtagttgcaaataaaaagtagtttgaggcgtgaaaaaaaaaaaaaaaaaaaaaaaa

SEQ ID NO: 241 - protein, 252 aa, Rattus norvegicus
  ref <308>: DATABASE ACCESSION NUMBER: Refseq / NP_062163
  ref <309>: DATABASE ENTRY DATE: 2003-01-14
MKNEIAAVVFFFTRLVRKHDKLKKEAVERFAEKLTQILQEKYKNHWYPEKPSKGQAYRCIRVNKFQRVDPDVLKACEDSCILYSDLGLPKELTLWVDPCEVCCRYGKKNNAFIVASFENEDENKDEISKKVSRALDKVTSDYHSGSSSSDEDTSKEVEVKPSAVATTPSPVYQISELIFPPLPMWHPLPRKKPGMYRGGGHQSHYPPPVPFAYPSPGRKNKAFRPIPVTWVPPPGMHCDRNHWINPHMLAPH

SEQ ID NO: 242 - DNA, 1511 bp, Homo sapiens
  ref <308>: DATABASE ACCESSION NUMBER: Refseq / NM_006806
  ref <309>: DATABASE ENTRY DATE: 2003-03-06
cgacgcgggagccgcacgcgccggacgaggctcgctgcgctccctgttgcccagcgcgggcccgttgaggcggagccctcagttcccggccaggacacggtctgggccgccgaatctccggccgaagagcggcggcggcagcggcgggaaaaaaatgaagaatgaaattgctgccgttgtcttctttttcacaaggctagttcgaaaacatgataagttgaaaaaagaggcagttgagaggtttgctgagaaattgaccctaatacttcaagaaaaatataaaaatcactggtatccagaaaaaccatcgaaaggacaggcctacagatgtattcgtgtcaataaatttcagagagttgatcctgatgtcctgaaagcctgtgaaaacagctgcatcttgtatagtgacctgggcttgccaaaggagctcactctctgggtggacccatgtgaggtgtgctgtcgtagagatggggtttcaccatgttggccagactgctctcaaactcctgacctcgtgatccgcccgccttggcctcccaaagcgctggattacaggcgtgagccactgcgcccggcctcctcctttttgattatgtatggagagaaaaacaatgcattcattgttgccagctttgaaaataaagatgagaacaaggatgagatctccaggaaagttaccagggcccttgataaggttacctctgattatcattcaggatcctcttcttcagatgaagaaacaagtaaggaaatggaagtgaaacccagttcggtgactgcagccgcaagtcctgtgtaccagatttcagaacttatatttccacctcttccaatgtggcaccctttgcccagaaaaaagccaggaatgtatcgagggaatggccatcagaatcactatcctcctcctgttccatttggttatccaaatcagggaagaaaaaataaaccatatcgcccaattccagtgacatgggtacctcctcctggaatgcattgtgaccggaatcactggattaatcctcacatgttagcacctcactaacttcgtttttgattgtgttggtgtcatgttgagaaaaaggtagaataaaccttactacacattaaaagttaaaagttcttactaatagtagtgaagttagatgggccaaaccatcaaacttatttttatagaagttattgagaataatctttcttaaaaaatatatgcactttagatattgatatagtttgagaaattttattaaagttagtcaagtgcctaagtttttaatattggacttgagtatttatatattgtgcatcaactctgttggatacgagaaccctgtagaagtggacgatttgttttagcccctttgagaatttactttatggagcgtatgtaagttatttatatacaaggaaatctattttatgtcgttgtttaagagaattgtgtgaaatcatgtagttgcaaataaaaaatagtttgaggcaaaaaaaaaaaaaaaaaaaaaaaaaaaaaa

SEQ ID NO: 243 - protein, 296 aa, Homo sapiens
  ref <308>: DATABASE ACCESSION NUMBER: Refseq / NP_006797
  ref <309>: DATABASE ENTRY DATE: 2003-03-06
MKNEIAAVVFFFTRLVRKHDKLKKEAVERFAEKLTLILQEKYKNHWYPEKPSKGQAYRCIRVNKFQRVDPDVLKACENSCILYSDLGLPKELTLWVDPCEVCCRRDGVSPCWPDCSQTPDLVIRPPWPPKALDYRREPLRPASSFLIMYGEKNNAFIVASFENKDENKDEISRKVTRALDKVTSDYHSGSSSSDEETSKEMEVKPSSVTAAASPVYQISELIFPPLPMWHPLPRKKPGMYRGNGHQNHYPPPVPFGYPNQGRKNKPYRPIPVTWVPPPGMHCDRNHWINPHMLAPH

SEQ ID NO: 244 - DNA, 513 bp, Rattus norvegicus
  ref <308>: DATABASE ACCESSION NUMBER: EMBL / AA859896
  ref <309>: DATABASE ENTRY DATE: 2000-03-03
agcattgtctgctgtaatcaaaaaaaaaaaaaaaaaagaaaaaagaaaaaaaaaacataccacagtataaacagtaaccattccacgtatcacagcttggttgggtttaaaatttgtgtttaaaaggtccaagatgactgcagttttacaaaaagatgggcagggtggagacttgcaaacttcatgtgcttctaaaggatatcaagatttgtttttatacaataatcacagttaaaaacaccctgctggtaatacataattacactttattaaggtcataaaccagcaataaacaataaagcctatacaacttgtagttctacataattactgactggtacagctaacatgagataagcaggaagttcctatggtttagatgaactcctaagactatgatttttttttttaaatctgggtattggtgtttttaattcttttctttttccttcttattcaaaacgtgtagtgttgtaaacctgcctcacaaaatacaccgtaataactttcttt

SEQ ID NO: 245 - DNA, 865 bp, Homo sapiens
  misc_feature (1)..(865): n=a, c, g or t
  ref <308>: DATABASE ACCESSION NUMBER: EMBL / AU141403
  ref <309>: DATABASE ENTRY DATE: 2002-08-06
cccatttttgtaaaactgcagtcatcttggaccttttaaaacacaaattttaaactcaaccaagctgtgataagtggaatggttactgtttatactgtggtatgtttttgattacagcagataatgctttcttttccagtcgtctttgagaataaaggaaaaaaaatcttcagatgcaatggttttgtgtagcatcttgtctatcatgttttgtaaatactggagaagctttgaccaatttgacttagagatggaatgtaactttgcttacaaaaattgctattaaactcctgcttaaggtgttctaattttctgtgagcacactaaaagcgaaaaataaatgtgaataaaatgtacaaatttgttgtgtttttttatgttctaataatactgagacttctaggtcttaggttaatttttaggaagatcttgcatgccatcaggagtaaattttattgtggttcttaatctgaagttttcaagctctgaaattcataatccgcagtgtcagattacgtagaggaagatcttacaacattccatgtcaaatctgttaccatttattggcatttagttttcatttaagaattgaacataattatttttattgtagctatatagcatgtcagattaaatcatttacaacaaaaggggtgtgaacctaagactatttaaatgtcttatgagaaaatttcataaagccattctcttgncattcaggtccagaaacaaattttaaactgagtgagagtctatagaatcctactgcagatgggcatgaaatgtgaccaaatgtgttcaaaaattgatggggattacctgctattgnaattgcttaatgcttggctaattnccaaatatggct

SEQ ID NO: 246 - DNA, 1407 bp, Rattus norvegicus
  ref <308>: DATABASE ACCESSION NUMBER: Refseq / NM_017313
  ref <309>: DATABASE ENTRY DATE: 2003-01-14
agcgctataactactgaatatactatggctaacgaccccttagaaggtttccatgaagtgaacctcgcttcgcctacctctccagaccttcttggtgtgtgtgacccgggaacccaagagcagactacctccccgagcgtcatctaccggccacacccttcgacgttgtgctctgccactatccaggccaatgccttaaatctttctgaccttcccacacagcctgtgtattcatccccgaggcatttaaactgtgcagaaatatctaacatcagcattcatgttccagagccagcatcatcggtagcctctgaggtggcagcagggctcacgaggttcacctcaaggaaggacagctgcaacgcagagagggagtttctgcagggcgccaccgtcacagaggcttctgctggcaacgatgacatctttgggttgagcacggacagcctgtcccgtttacggagcccatctgttctggaagttagagagaagggctacgaaaggttaaaagaagaacttgcaaaagctcagagggaattgaagttaaaagatgaagaatgtgagagactttcgaaagtgcgagatcaacttgggcaggagttggaagaactcacagctagtttatttgaggaagctcacaagatggtgagagaggcgaacgtcaagcaggcaactgcagaaaagcagctgaaggaagctcaagggaaaattgatgtgcttcaagccgaagtggctgcgctgaagacactcgtactgtccagttctccaacatcgcctacgcaggagcctctggcggatggaaagacgccctttaagggggggcacacacggaacaaaagtacaagcagtgctatgagtggcagccaccaggacttcagtgcgatccaggcaatcgtaaaagactgcagagaggccgatctatcgctgtataatgagttcaggtcttggaaggatgagcccacaatggacagaacatgtcccttcctagacaaaatctatcaggaggatatctttccatgcttaacattcgcgaaaagtgagttggcttcagctgttctggaggccgtggagaacaacactctaagcatcgagccggtagggttgcagcccatccgcttcgtgaaggcttccgcggtggagtgcggagggccaaaaaagtgtgctctcactggccagagtaagccctgtaagcacaggattaaactaggggactccagcagctattactacatctctccggtttgcagataccggatcacttctgtatgtaacttttttacatacattcgatatattcagcagggacttgtgaaacagcaggatgttgatcagatgttctgggaagttatgcaactaagaaaggagatgtcgttggcaaagctgggatatttcaaagaagaactctga

SEQ ID NO: 247 - protein, 460 aa, Rattus norvegicus
  ref <308>: DATABASE ACCESSION NUMBER: Refseq / NP_059009
  ref <309>: DATABASE ENTRY DATE: 2003-01-14
MANDPLEGFHEVNLASPTSPDLLGVCDPGTQEQTTSPSVIYRPHPSTLCSATIQANALNLSDLPTQPVYSSPRHLNCAEISNISIHVPEPASSVASEVAAGLTRFTSRKDSCNAEREFLQGATVTEASAGNDDIFGLSTDSLSRLRSPSVLEVREKGYERLKEELAKAQRELKLKDEECERLSKVRDQLGQELEELTASLFEEAHKMVREANVKQATAEKQLKEAQGKIDVLQAEVAALKTLVLSSSPTSPTQEPLADGKTPFKGGHTRNKSTSSAMSGSHQDFSAIQAIVKDCREADLSLYNEFRSWKDEPTMDRTCPFLDKIYQEDIFPCLTFAKSELASAVLEAVENNTLSIEPVGLQPIRFVKASAVECGGPKKCALTGQSKPCKHRIKLGDSSSYYYISPVCRYRITSVCNFFTYIRYIQQGLVKQQDVDQMFWEVMQLRKEMSLAKLGYFKEEL

SEQ ID NO: 248 - DNA, 1876 bp, Homo sapiens
  ref <308>: DATABASE ACCESSION NUMBER: Refseq / NM_022456
  ref <309>: DATABASE ENTRY DATE: 2003-02-09
aggcgcagtcccgcgttccctcggcggctgccggcgtagtgagcccgccgccgtggagtgtagcggaaagggctcgccgtcctcctccgtttctcgctgcttcgggacgcgctctctgcggctctgtgagcgcccctgagcgccggcagcggccgcggtgggttcttcaggttatcttatgatgaggcttttgctatggctaatgatcccttggaaggcttccatgaagtaaaccttgcttcacctacttctccggaccttcttggtgtgtatgaatcagggactcaagagcagactacctcaccaagtgtcatctaccggccacacccttcagctttatcctctgtacctatccaggcaaatgcattagatgtttctgaacttcctacacaacccgtgtattcatcccccagacgtttaaattgtgcggaaatatctagtatcagctttcatgttacagacccagccccttgctctacctctggagtcacagctggattaactaaattaactacaagaaaggacaactataatgcagagagagagtttttacagggtgctactataacagaggcttgcgatggcagtgatgatatttttgggttgagtactgatagtctgtctcgtttacgaagcccatctgttttggaagttagagaaaagggctatgaacgattaaaagaagaactcgcaaaagctcagagggaactgaagttaaaagatgaagaatgtgagaggctttcaaaagtgcgagatcaacttggacaggaattggaagaactcacagctagtctatttgaggaagctcataaaatggtgagagaagcaaatatcaagcaggcaacagcagaaaaacagctaaaagaagcacaaggaaaaattgatgtacttcaagctgaagtagctgcattgaagacacttgtattgtccagttctccaacatcacctacgcaggagcctttgccaggtggaaagacaccttttaaaaaggggcatacaagagataaaagcacaagcagtgctatgagtggcagtcatcaggacctcagtgtgatacagccaattgtaaaagactgcaaagaggctgacttatccttgtataatgaattccgattgtggaaggatgagcccacaatggacaggacgtgtcctttcttagacaaaatctaccaggaagatatctttccatgtttaacattctcaaaaagtgaggcttcagctgttctggaggctgtggaaaacaatactctaagcattgaaccagtgggattacaacctatccggtttgtgaaagcttctgcagttgaatgcggaggaccaaaaaaatgtgctctcactggccagagtaagtcctgtaaacacagaattaaattaggggactcaagcaactattattatatttctcctttttgcagatacaggatcacttctgtatgtaacttttttacatacattcgatacattcagcagggactcgtgaaacagcaggatgttgatcagatgttttgggaggttatgcagttgagaaaagaggtgtcattggcaaagctgggttatttcaaagaggaactctgatgctctgcgtgggaccatgcctgaactccccgaataactgaaaaatggctgaatatttttatggttacttgatatttatttccaaggagtgagcctaagacttttttccccttttgcaaattgctctaagaagtaccatgatttcttttaaactgatctatgctgtgtttgcttattctttagttgaacacactatgaagaattccaggtgtactagtgaatgtaatttatagttgccaaaaaaaaaaaaaacctgaaataaataaatgttagattgaaaaaaaaaaaaaaaaaaaaaaaa

SEQ ID NO: 249 - protein, 459 aa, Homo sapiens
  ref <308>: DATABASE ACCESSION NUMBER: Refseq / NP_071901
  ref <309>: DATABASE ENTRY DATE: 2003-02-09
MANDPLEGFHEVNLASPTSPDLLGVYESGTQEQTTSPSVIYRPHPSALSSVPIQANALDVSELPTQPVYSSPRRLNCAEISSISFHVTDPAPCSTSGVTAGLTKLTTRKDNYNAEREFLQGATITEACDGSDDIFGLSTDSLSRLRSPSVLEVREKGYERLKEELAKAQRELKLKDEECERLSKVRDQLGQELEELTASLFEEAHKMVREANIKQATAEKQLKEAQGKIDVLQAEVAALKTLVLSSSPTSPTQEPLPGGKTPFKKGHTRDKSTSSAMSGSHQDLSVIQPIVKDCKEADLSLYNEFRLWKDEPTMDRTCPFLDKIYQEDIFPCLTFSKSEASAVLEAVENNTLSIEPVGLQPIRFVKASAVECGGPKKCALTGQSKSCKHRIKLGDSSNYYYISPFCRYRITSVCNFFTYIRYIQQGLVKQQDVDQMFWEVMQLRKEVSLAKLGYFKEEL

SEQ ID NO: 250 - DNA, 722 bp, Rattus norvegicus
  ref <308>: DATABASE ACCESSION NUMBER: Refseq / NM_019165
  ref <309>: DATABASE ENTRY DATE: 2003-01-14
atggctgccatgtcagaagaaggctcttgtgtcaacttcaaagaaatgatgtttattgacaacacactttaccttatacctgaagataatggagacttggaatcagaccactttggcagacttcactgtacaaccgcagtaatacggagcataaatgaccaagttctcttcgttgacaaaagaaacccgcctgtgttcgaggacatgcctgatatcgaccgaacagccaacgaatcccagaccagactgataatatatatgtacaaagatagtgaagtaagaggactggctgtgaccctatctgtgaaggatggaaggatgtctaccctctcctgtaaaaacaaaatcatttcctttgaggaaatgaatccacctgaaaatattgatgatataaaaagtgatctcatattctttcagaaacgtgtgccaggacacaacaaaatggaatttgaatcttccctgtatgaaggacactttctagcttgccaaaaggaagatgatgctttcaaactcgttttgaaaaggaaggatgaaaatggggataaatctgtaatgttcactcttactaacttacatcaaagttaggtattaaggtttctgtattccagaaagacgattagtatacacgagccttatgataacctactctgtatttctatgacaaaatacctgaggccgcatgatttatagagtaaacaagcttgattgcccaaaaaaaaaaa

SEQ ID NO: 251 - protein, 194 aa, Rattus norvegicus
  ref <308>: DATABASE ACCESSION NUMBER: Refseq / NP_062038
  ref <309>: DATABASE ENTRY DATE: 2003-01-14
MAAMSEEGSCVNFKEMMFIDNTLYLIPEDNGDLESDHFGRLHCTTAVIRSINDQVLFVDKRNPPVFEDMPDIDRTANESQTRLIIYMYKDSEVRGLAVTLSVKDGRMSTLSCKNKIISFEEMNPPENIDDIKSDLIFFQKRVPGHNKMEFESSLYEGHFLACQKEDDAFKLVLKRKDENGDKSVMFTLTNLHQS

SEQ ID NO: 252 - DNA, 1102 bp, Homo sapiens
  ref <308>: DATABASE ACCESSION NUMBER: Refseq / NM_001562
  ref <309>: DATABASE ENTRY DATE: 2003-01-06
gcctggacagtcagcaaggaattgtctcccagtgcattttgccctcctggctgccaactctggctgctaaagcggctgccacctgctgcagtctacacagcttcgggaagaggaaaggaacctcagaccttccagatcgcttcctctcgcaacaaactatttgtcgcaggaataaagatggctgctgaaccagtagaagacaattgcatcaactttgtggcaatgaaatttattgacaatacgctttactttatagctgaagatgatgaaaacctggaatcagattactttggcaagcttgaatctaaattatcagtcataagaaatttgaatgaccaagttctcttcattgaccaaggaaatcggcctctatttgaagatatgactgattctgactgtagagataatgcaccccggaccatatttattataagtatgtataaagatagccagcctagaggtatggctgtaactatctctgtgaagtgtgagaaaatttcaactctctcctgtgagaacaaaattatttcctttaaggaaatgaatcctcctgataacatcaaggatacaaaaagtgacatcatattctttcagagaagtgtcccaggacatgataataagatgcaatttgaatcttcatcatacgaaggatactttctagcttgtgaaaaagagagagacctttttaaactcattttgaaaaaagaggatgaattgggggatagatctataatgttcactgttcaaaacgaagactagctattaaaatttcatgccgggcgcagtggctcacgcctgtaatcccagccctttgggaggctgaggcgggcagatcaccagaggtcaggtgttcaagaccagcctgaccaacatggtgaaacctcatctctactaaaaatactaaaaattagctgagtgtagtgacgcatgccctcaatcccagctactcaagaggctgaggcaggagaatcacttgcactccggaggtagaggttgtggtgagccgagattgcaccattgcgctctagcctgggcaacaacagcaaaactccatctcaaaaaataaaataaataaataaacaaataaaaaattcataatgtg

SEQ ID NO: 253 - protein, 193 aa, Homo sapiens
  ref <308>: DATABASE ACCESSION NUMBER: Refseq / NP_001553
  ref <309>: DATABASE ENTRY DATE: 2003-01-06
MAAEPVEDNCINFVAMKFIDNTLYFIAEDDENLESDYFGKLESKLSVIRNLNDQVLFIDQGNRPLFEDMTDSDCRDNAPRTIFIISMYKDSQPRGMAVTISVKCEKISTLSCENKIISFKEMNPPDNIKDTKSDIIFFQRSVPGHDNKMQFESSSYEGYFLACEKERDLFKLILKKEDELGDRSIMFTVQNED

SEQ ID NO: 254 - DNA, 3202 bp, Rattus norvegicus
  ref <308>: DATABASE ACCESSION NUMBER: Refseq / NM_031028
  ref <309>: DATABASE ENTRY DATE: 2003-01-14
agacacctccccgacgccctcccagaagccttccccagaagaagtgtcccccctgagctgcccccccaccccaaggaggccgcccccgcccctcctcgccatgggcccggggggaccctgtaccccagtggggtggccgctgcctcttctgctggtgatggcggctggggtggctccggtgtgggcctctcactcccctcatctcccgcggcctcacccgagggtccccccgcacccctcctcagaacggcgtgcagtatacatcggggcgctgtttcccatgagcgggggctggccggggggccaggcctgccagcccgcggtggagatggcgctggaggacgttaacagccgcagagacatcctgccggactacgagctcaagcttatccaccacgacagcaagtgtgacccagggcaagccaccaagtacttgtacgaactactctacaatgaccccatcaagatcattctcatgcctggctgtagttctgtctccacacttgtagctgaggctgcccggatgtggaaccttattgtgctctcatatggctccagttcaccagccttgtcaaaccgacagcggtttcccacgttcttccggacgcatccatccgccacactccacaatcccacccgggtgaaactcttcgaaaagtggggctggaagaagatcgctaccatccaacagaccaccgaggtcttcacctcaacgctggatgacctggaggagcgagtgaaagaggctgggatcgagatcactttccgacagagtttcttctcggatccagctgtgcctgttaaaaacctgaagcgtcaagatgctcgaatcatcgtgggacttttctatgagacggaagcccggaaagttttttgtgaggtctataaggaaaggctctttgggaagaagtacgtctggttcctcatcgggtggtatgctgacaactggttcaagacctatgacccgtcaatcaattgtacagtggaagaaatgaccgaggcggtggagggccacatcaccacggagattgtcatgctgaaccctgccaacacccgaagcatttccaacatgacgtcacaggaatttgtggagaaactaaccaagcggctgaaaagacaccccgaggagactggaggcttccaggaggcaccactggcctatgatgctatctgggccttggctttggccttgaacaagacgtctggaggaggtggtcgttccggcgtgcgcctggaggactttaactacaacaaccagaccattacagaccagatctaccgggccatgaactcctcctcctttgagggcgtttctggccatgtggtctttgatgccagcggctcccggatggcatggacacttatcgagcagctacagggcggcagctacaagaagatcggctactacgacagcaccaaggatgatctttcctggtccaaaacggacaagtggattggagggtctcccccagctgaccagaccttggtcatcaagacattccgtttcctgtctcagaaactctttatctccgtctcagttctctccagcctgggcattgttcttgctgttgtctgtctgtcctttaacatctacaactcccacgttcgttatatccagaactcccagcccaacctgaacaatctgactgctgtgggctgctcactggcactggctgctgtcttccctctcgggctggatggttaccacatagggagaagccagttcccgtttgtctgccaggcccgcctttggctcttgggcttgggctttagtctgggctatggctctatgttcaccaagatctggtgggtccacacagtcttcacgaagaaggaggagaagaaggagtggaggaagaccctagagccctggaaactctatgccactgtgggcctgctggtgggcatggatgtcctgactcttgccatctggcagattgtggaccccttgcaccgaaccattgagacttttgccaaggaggaaccaaaggaagacatcgatgtctccattctgccccagttggagcactgcagctccaagaagatgaatacgtggcttggcattttctatggttacaaggggctgctgctgctgctgggaatctttcttgcttacgaaaccaagagcgtgtccactgaaaagatcaatgaccacagggccgtgggcatggctatctacaatgtcgcggtcctgtgtctcatcactgctcctgtgaccatgatcctttccagtcagcaggacgcagcctttgcctttgcctctctggccatcgtgttctcttcctacatcactctggttgtgctctttgtgcccaagatgcgcaggctgatcacccgaggggaatggcagtctgaaacgcaggacaccatgaaaacaggatcatccaccaacaacaacgaggaagagaagtcccgactgttggagaaggaaaaccgagaactggaaaagatcatcgctgaggtgtgcggtgacaaacaaccggggccccccgtgtctgagggtgggttgcccgtagtggggccttcgatagaggtttgagtgttggtggttcacagagggtctcggcctgcagaggaaccggagagggagaggggaagggttgagtttcagtcccgtcagcccgaggagagggaggggggttctgcagacttcagcccacctgaggcaaaagagcagtcactggcagtagttagggggaggccattgtgagacattggttgcccacagtgttactgtgtccgggctgtagttagggaccgtgcagtgctgggtgggggcgggaaatggcctttccacttgtctgatgcaatcttcatttattccttttttttttttttttaaatcactgattttctccatctattctctcggtgccattacgttctgtgggcttcctttgttctcccctgattcacattttaatttcctttctcactcgtacatctcgtttcatcgtctccccccccctccctccttccattccacatcgccctcctcccacactcccgattgtgtttcttcctccagaaagaggagcgcgtctctgaactgcgccatcagctccagtctcggcagcaactccgctcacggcgccaccccccaacacccccagatccctctggaggccttcccaggggaccctctgagccccctgaccggcttagctgtgatgggagtcgagtacatttgctttacaagtga

SEQ ID NO: 255 - protein, 812 aa, Rattus norvegicus
  ref <308>: DATABASE ACCESSION NUMBER: Refseq / NP_112290
  ref <309>: DATABASE ENTRY DATE: 2003-01-14
MGPGGPCTPVGWPLPLLLVMAAGVAPVWASHSPHLPRPHPRVPPHPSSERRAVYIGALFPMSGGWPGGQACQPAVEMALEDVNSRRDILPDYELKLIHHDSKCDPGQATKYLYELLYNDPIKIILMPGCSSVSTLVAEAARMWNLIVLSYGSSSPALSNRQRFPTFFRTHPSATLHNPTRVKLFEKWGWKKIATIQQTTEVFTSTLDDLEERVKEAGIEITFRQSFFSDPAVPVKNLKRQDARIIVGLFYETEARKVFCEVYKERLFGKKYVWFLIGWYADNWFKTYDPSINCTVEEMTEAVEGHITTEIVMLNPANTRSISNMTSQEFVEKLTKRLKRHPEETGGFQEAPLAYDAIWALALALNKTSGGGGRSGVRLEDFNYNNQTITDQIYRAMNSSSFEGVSGHVVFDASGSRMAWTLIEQLQGGSYKKIGYYDSTKDDLSWSKTDKWIGGSPPADQTLVIKTFRFLSQKLFISVSVLSSLGIVLAVVCLSFNIYNSHVRYIQNSQPNLNNLTAVGCSLALAAVFPLGLDGYHIGRSQFPFVCQARLWLLGLGFSLGYGSMFTKIWWVHTVFTKKEEKKEWRKTLEPWKLYATVGLLVGMDVLTLAIWQIVDPLHRTIETFAKEEPKEDIDVSILPQLEHCSSKKMNTWLGIFYGYKGLLLLLGIFLAYETKSVSTEKINDHRAVGMAIYNVAVLCLITAPVTMILSSQQDAAFAFASLAIVFSSYITLVVLFVPKMRRLITRGEWQSETQDTMKTGSSTNNNEEEKSRLLEKENRELEKIIAEVCGDKQPGPPVSEGGLPVVGPSIEV

SEQ ID NO: 256 - DNA, 2032 bp, Rattus norvegicus
  ref <308>: DATABASE ACCESSION NUMBER: Refseq / NM_031783
  ref <309>: DATABASE ENTRY DATE: 2003-01-13
gaattcccccggttcttctctctaggtcccctatctccgccccgggcctgaggggcgcaccgaccgccaccatgagttcgttcagctacgagccgtacttttcgacctcctacaagcggcgctacgtggagacgccccgggtgcacatctccagcgtgcgcagcggctacagcacggcgcgctctgcgtactccagctactccgcgcccgtctcctcctctctgtcggtgcgccgcagctactcatccagctccggctctttgatgcccagcctggagaacctcgatctgagccaggtagccgccatcagcaacgacctcaagtctatccgcacacaggagaaggcacagctgcaggacctcaacgatcgcttcgccagcttcatcgagcgcgtgcacgagctggagcagcagaacaaggtcctggaagccgagctgttggtgctgcgccagaagcactcagagccttcccgcttccgcgccctgtatgagcaggagatccgtgatctgcgactggcggccgaagacgccactaacgagaagcaggcgctgcagggcgagcgcgaggggctggaggagactctgcgcaacctgcaggctcgctacgaggaggaggtgctgagccgcgaggacgccgagggccggctgatggaagcccgcaaaggcgcggatgaggctgcgctcgcccgcgccgagctggagaagcgcatcgacagcctgatggacgagatagccttcctgaaaaaggtgcacgaggaagagatcgccgagctgcaggctcagatccagtatgctcagatctccgtggagatggacgtgtcctccaagcccgacctctccgccgctctcaaggacatccgcgctcagtacgagaagctggccgccaagaatatgcagaatgccgaagagtggttcaagagccgcttcacggtgctaaccgagagcgccgccaagaacaccgacgcagtgcgcgctgccaaggacgaggtgtcggaaagccgccgcctacttaaggctaagaccctggagatcgaagcctgccggggtatgaacgaagctctagagaagcagctgcaggagctggaggacaagcagaatgcagacatcagcgccatgcaggacacaatcaacaaactggagaatgagctgcgaagcacgaagagcgagatggccaggtacctgaaggagtaccaggacctcctcaatgtcaagatggcattggacattgagattgcagcttacaggaaactcttggaaggcgaagaaaccaggctcagtttcaccagcgtgggtagcataaccagcggctactctcagagctcgcaggtctttggccgttctgcttacagtggcttgcagagcagctcctacttgatgtctgctcgagcattcccagcctactataccagccacgtccaggaagagcagtcagaggtggaggagaccattgaggctacgaaagctgaggaggccaaggatgagcccccctctgaaggagaagcagaagaggaggagaaggagaaagaggagggggaggaagaggaaggtgctgaggaggaagaagctgccaaggatgagtctgaagatgccaaagaagaagaaggtggtgagggtgaagaggaagacaccaaagagtcagaagaggaagagaagaaagaggagagtgctggggaggagcaagctgctaagaagaaagattgagccccattcccaactatcccaggaaaaaagtctccccaaatcaggtcaacctcatcaccaaaccaaccagttgagttccagatcctatacagattaagaagtcaatatatgtataattctgagatgacttaggttggacattcaatgttgtgctatgactttcctccttatgcagagtatctgtttgcttgcagagtggctttctggcttgctgccaacctgtgcatggtccatgcttatgagttcaggatctacggcaatgtgaatcacacagatgtttacaataataataataaaaaaaccacacatacacaacatgaataaatgaattc

SEQ ID NO: 257 - protein, 542 aa, Rattus norvegicus
  ref <308>: DATABASE ACCESSION NUMBER: Refseq / NP_113971
  ref <309>: DATABASE ENTRY DATE: 2003-01-13
MSSFSYEPYFSTSYKRRYVETPRVHISSVRSGYSTARSAYSSYSAPVSSSLSVRRSYSSSSGSLMPSLENLDLSQVAAISNDLKSIRTQEKAQLQDLNDRFASFIERVHELEQQNKVLEAELLVLRQKHSEPSRFRALYEQEIRDLRLAAEDATNEKQALQGEREGLEETLRNLQARYEEEVLSREDAEGRLMEARKGADEAALARAELEKRIDSLMDEIAFLKKVHEEEIAELQAQIQYAQISVEMDVSSKPDLSAALKDIRAQYEKLAAKNMQNAEEWFKSRFTVLTESAAKNTDAVRAAKDEVSESRRLLKAKTLEIEACRGMNEALEKQLQELEDKQNADISAMQDTINKLENELRSTKSEMARYLKEYQDLLNVKMALDIEIAAYRKLLEGEETRLSFTSVGSITSGYSQSSQVFGRSAYSGLQSSSYLMSARAFPAYYTSHVQEEQSEVEETIEATKAEEAKDEPPSEGEAEEEEKEKEEGEEEEGAEEEEAAKDESEDAKEEEGGEGEEEDTKESEEEEKKEESAGEEQAAKKKD

SEQ ID NO: 258 - DNA, 644 bp, Homo sapiens
  ref <308>: DATABASE ACCESSION NUMBER: EMBL / AV729096
  ref <309>: DATABASE ENTRY DATE: 2000-10-06
aggaggagagcaggaggggagcaggagagagaggcggagccgaggacggatgggagcagacgggcagaagcgaaagggacggagagagagggagacggaaggaagggcggggagggcaggcggggatgggcggaggggaggggagacggggacggaagagagctgagagggagagagagcgaaggagagagacagagagagagagagagagacggagacagagagagagagagagagagagagagagagagagagagagagagagagagagagagagagagagagagagctcgtgccgaattcggcacgagggggagccgagattgggccactgcactccagcctgggcgacagaataagactctgttttggccaggtacgttggctcatgctttgggaggtcaacggaggaggattactcgaggccaggagtttgagaccagcctgggcaacatagtgagatcctgtctctacaaaaaaatttaaaaattagccaagcgtgcctgtggtcccaacttcttgggaggctgaggtggaggattgcttgagcctgggaggctaaggctgcagtgaaccgtgactgcgctactgtactccagcctgggtgacagagtgagatcttgtctcagaaaaaaaaaaaaaaa

SEQ ID NO: 259 - DNA, 485 bp, Rattus norvegicus
  ref <308>: DATABASE ACCESSION NUMBER: Refseq / NM_053586
  ref <309>: DATABASE ENTRY DATE: 2003-01-13
gcttgtctcgagcgagatggcttcaaggttacttcgcggagtaggcgctttggcggctcaggccctgagggcccacggaccccgtggcgtggccgctacccgctccatggcttctggaggtggtgtccctactgatgaggagcaggctaccgggctggagagggagatcatgatagcagcacagaggggactggatccatacaatatgctacctccaaaggcagcttcgggcaccaaggaagaccccaatctagtcccatccgttagcaacaagagaatagtgggctgcatctgtgaagaggacaactgtactgtcatctggttctggctgcaccaaggcgagagccagcgatgccccaactgtggaacacattacaagttggtgccctaccaaatggtccactgagcccacccctggtttaacatttcagaatgtaaaggaaaacgtctctcaataaagactagccaacgcactggctccttcc

SEQ ID NO: 260 - protein, 129 aa, Rattus norvegicus
  ref <308>: DATABASE ACCESSION NUMBER: Refseq / NP_446038
  ref <309>: DATABASE ENTRY DATE: 2003-01-13
MASRLLRGVGALAAQALRAHGPRGVAATRSMASGGGVPTDEEQATGLEREIMIAAQRGLDPYNMLPPKAASGTKEDPNLVPSVSNKRIVGCICEEDNCTVIWFWLHQGESQRCPNCGTHYKLVPYQMVH

SEQ ID NO: 261 - DNA, 2199 bp, Rattus norvegicus
  ref <308>: DATABASE ACCESSION NUMBER: Refseq / NM_017136
  ref <309>: DATABASE ENTRY DATE: 2003-01-14
ccggaaggagttcggcaggtctcccggaccccctttgtgaactacattttgggtagaacattttaatcaccgaaacccttctgaggaaaaaaagactcccactgccccctgcaaaaaaacaaaagcaaaaacaaaaaaaccaaaccccaaacccccaaatctcagtcttagctggtgccaccaaagaagcttttgagccatgtggacttttcttggaattgctactttcacctatttttataagaaatgcggggatgtcaccctggccaacaaggagctcctgctgtgcgtactggtgttcctgtcgctgggcctggtgctctcctaccgctgtcgccatcgaaacgggggcctccttggccgccatcagagcggctcccagttcgctgccttctcagatattctctctgctttgcctcttattggcttcttctgggccaaatcaccccctgaatcagaaaagaaagaacagctggagtccaagaggcgcagaaaagaagtcaatctgtcagagacgacgttaacgggagcagctacctcagtatcgacatcatctgtgacggacccagaagtgatcatcatagggtctggtgtacttggctctgctttggcaacagtactctctagagatggaagaacggtgacagtaatcgagagagatttaaaagagcctgacagaatacttggagagtgtctgcagcccggtggctatcgagttcttcgagagctgggccttggagatacagtagaaagtcttaatgcccatcatatacacggctacgtaattcatgactgtgaaagcaggtctgaagttcaaattccatacccggtgtcagaaaacaaccaagtacagagtggggttgctttccaccatggcaagttcatcatgagtctccggaaagcagctatggcagagcccaatgtaaagtttatagaaggtgttgtgcttcggttactagaggaagatgatgctgtgattggtgtgcaatacaaggacaaggagactggggacaccaaggagctccatgccccgctcactgttgttgccgacgggctcttctccaagttcaggaagaacctcatctccaataaagtctctgtttcctcccacttcgttggcttcattatgaaggatgcaccacagtttaaagccaatttcgcggagcttgttctggtcgatcccagtccagttctcatctaccagatttcacccagcgaaactagggtgcttgtcgatattcgaggagaattgccaagaaacttaagagaatacatgacagaacaaatttacccacagatacctgatcacttgaaggaatcatttctggaggcctgtcagaatgctcgtctgcggaccatgccagcaagcttccttcctccttcctcagtgaacaaacgaggcgtcctacttctgggagatgcgtataacctgaggcatcctcttactggtggaggaatgacagtcgctttaaaagatataaaaatatggagacaactgttaaaagatattcctgacctttatgatgatgccgctattttccaggccaaaaagtcattcttttggtcaagaaaaaggagccattcctttgttgtgaacgtgctggctcaggcgttgtatgaactattttctgctacagatgattccttgcgtcagctccgaaaagcttgctttctttattttaaacttggtggagaatgtttgactggtcctgttgggttgctttctatattgtctcctgaccctctcctattgattcgacacttcttctccgttgcagtctatgccacgtatttctgcttcaagtcagagccatgggctacaaaacctcgggctcttttcagtagtggtgctatactgtacaaagcgtgctctataatatttcctctcatctattcagaaatgaagtatctggttcactgaaagggaaaccacatggaagtcattgggacttgaggaggatgtacatagcctaggactgtgtgtgtgacttctgcagtggtgactcaaggaccaagcttgtgtataagcatgtaaatatatgccttaattcacaattgagaatgaagggtcaataagctagatgtttaaaagaatgattgtttccacaaattaatgttaacactcaagtgtttggatttcagtattggggtgattcaattggggacaatgccaaataaaatgaaggagtggaactcctt

SEQ ID NO: 262 - protein, 573 aa, Rattus norvegicus
  ref <308>: DATABASE ACCESSION NUMBER: Refseq / NP_058832
  ref <309>: DATABASE ENTRY DATE: 2003-01-14
MWTFLGIATFTYFYKKCGDVTLANKELLLCVLVFLSLGLVLSYRCRHRNGGLLGRHQSGSQFAAFSDILSALPLIGFFWAKSPPESEKKEQLESKRRRKEVNLSETTLTGAATSVSTSSVTDPEVIIIGSGVLGSALATVLSRDGRTVTVIERDLKEPDRILGECLQPGGYRVLRELGLGDTVESLNAHHIHGYVIHDCESRSEVQIPYPVSENNQVQSGVAFHHGKFIMSLRKAAMAEPNVKFIEGVVLRLLEEDDAVIGVQYKDKETGDTKELHAPLTVVADGLFSKFRKNLISNKVSVSSHFVGFIMKDAPQFKANFAELVLVDPSPVLIYQISPSETRVLVDIRGELPRNLREYMTEQIYPQIPDHLKESFLEACQNARLRTMPASFLPPSSVNKRGVLLLGDAYNLRHPLTGGGMTVALKDIKIWRQLLKDIPDLYDDAAIFQAKKSFFWSRKRSHSFVVNVLAQALYELFSATDDSLRQLRKACFLYFKLGGECLTGPVGLLSILSPDPLLLIRHFFSVAVYATYFCFKSEPWATKPRALFSSGAILYKACSIIFPLIYSEMKYLVH

SEQ ID NO: 263 - DNA, 4758 bp, Rattus norvegicus; identical to SEQ ID NO: 70
  ref <308>: DATABASE ACCESSION NUMBER: EMBL / E13644
  ref <309>: DATABASE ENTRY DATE: 2000-09-02

SEQ ID NO: 264 - DNA, 4689 bp, Rattus norvegicus
  ref <308>: DATABASE ACCESSION NUMBER: Refseq / NM_139192
  ref <309>: DATABASE ENTRY DATE: 2003-01-13
ctgaacacccatccggtgagacaggagggcaggtttccaagcgccgctccgccacacttgatctcagcgctgggaaagtgaagcgagcaaccgacagccacgatgccggcccacatgctccaagagatctccagttcctacacgaccaccactaccatcacagagcctccttccggaaacctgcagaatggacgagagaagatgaagaaggtgcccctctatctggaagaagacatccgtcctgaaatgagagaagatatccacgaccccagctaccaggatgaggaggggcccccgcccaagctggagtacgtctggaggaacatcatcctcatggccctgctgcacgtgggagccctgtacgggatcacactgatcccctcctccaaggtctacaccttgctctgggggatattttactaccttatcagtgccctgggcatcacagccggggctcatcgcttgtggagccacaggacttacaaggctcggctgcccctgaggatcttcctcatcattgccaacaccatggcgttccagaacgatgtatatgaatgggcccgggatcaccgcgcccaccacaagttctctgagacacacgccgaccctcacaactcccgccgtggctttttcttctctcacgtgggttggctgcttgtgcgcaaacacccggctgtcaaagagaagggcggaaagctggacatgtctgacctgaaagctgagaagctggtgatgttccagaggaggtactacaagcctggcctcctgctcatgtgcttcatcctgcccacactggtgccctggtactgctggggcgaaactttcctgcacagcctgttcgtcagcaccttcttgagatacactctggtgctcaacgccacctggctggtgaacagcgctgcccacctctatgggtatcgcccctacgacaagaacattcaatctcgggagaacatcctggtttccctggggtccgtgggcgagggcttccacaactaccatcacgccttcccctacgactactctgccagtgagtaccgctggcacatcaacttcaccacgttcttcatcgactgcatggctgccctgggcctggcttacgaccggaaaaaagtttctaaggccgctgtcttagccaggattaagagaactggagatgggagccacaagagtagctgagttctgggcttctgagttcctgttccaaaagttttctgggcagagatttaatattctgttgattaactactggataatgctatcggaatgttaatgatgcatttaaactattccggtacagtattatgagaaagctttgatcatgttttgaggtaatgcatattttaattagccaggattaaccatgccacaatacatatatatttctaagcatacatgataaatgcatatacaattgtgcacatcagctttaaataataacgatgaatttgaacattctatacagagagtattaaagccaaggaacatgctgttttgatgctagggcaagcatggtgctctttccctgtttgcactgcatccagcttcgttccttcctctgtcatcaccatcttcaggcaaatagctgaccagccactggcctgtgtccaccttccaaagcccaggcaacctttctgctttctgaaatactgatccttcctcctggatatgtctttccttgttctgaactttgagattgctggctcagacttaagatagaacaaaaaccttcctggaagttcccactggtgaacttcactataggttttgccagagggaatagggaaattatcttgattgtagcaagtagatcaccttgagagaagaattagcacgcacggtgtggtttgtaagtaaggatgggagagagctaggaaaaggtggccatatctaatggcctacttaccaagcccccaggcctctctgcataggcatggagtccttccagtccatattctgaacaacagtttttagtgagatttgaataattaaattattttcagagtgaagggaatgggaaatgcatggtctgtgccaggggcggagagtggggaagggttagcttttggtaactgaagatttcttcaatggaaagactcttaatgttaaatgtgcctagaactggtaactaaacagctgacatttggagggaatgtggtgaaaactatgtaaatataagcaaaatccgcacatgaaaatatttcacttagaaaaagtgttgctaaagaaaaaaattcgaaggacaagaggtgttgcctgggttgccagtttctttcgtggcagggcaggaaatagtgaggttgagaggcagcatctgtaagtagatgctaagaggtacatttctaaatgaagcccttggggaacatctgccagggatctagagagtgctggtttcatccattgttttaatttcctccttggattgagtagaaacgtggcttcttgtggtgttgaaccttccccgacttctttgctttgttgccatctagcctgcccagcactgcctagggagcgcctacccaccctgatttcttctgccagctcctacccaccctgatttcttctgccacttctttctttggcattcatttttctttccctggacaggaagctagttacccgagtgtatcaggagcacctggcttgcctttgtccaggcccattcctcctggtatccttgggtgtggaactgctggacagcttcaggaagcagagccaggtgccacttttctgtggctccagatcctccctacctccacccctatgtgcctctgccacagtaatttcagaaaagcttggtacaccctctagcaacatcttggttcagagagtctctctggcttgtgagttaacagctcagccaaatgctgtgttgtctcagtgaggcaaccactgaacgagagggttggttgttgggctgtctctgttggagtcagagtagacaacatgttcacttcttcctgtctgctttgcaaggtgtctgtgactgatcaaggcaggcagggagtggtatagtacttctgaaaggaagaagttccctatttatctgttaaaagaccagaggcatgggcaagtgctcaggacctcacttcgggaagagggtctgcttcctgaaagccagtgtataaggaaaagcttcgactgaacctggtatctaaggtaccatgaactaacactctatcacacagcccagggcaaacagtggtatagaaaagtctagaagaaaacatcacatcagtattttagaaccatccacctttactgtccctgtagcccaatccagagcctggcttttagatctggctgcgtacagtgccaaatgctcagtttacttgtaagatcagagcctttctttctgtgttaattgaacacatgctctgagctgttttgttgaagtagaaaatctagtagaaaatcactgtagatctgatgacctggaaacctctggaaatgccttcgggtggttttatttttccaggtcacagatgcctgatttataagatgaacaatgaaatcagctttctttctcttctgatcttattccctggatttgatgcagcccatgttccaaagcaaagctacatagagacttcaggctgaggtcctggtgtctttaagcaaggacactctttcagatcctctcagaggcgtatttgtaacagtttccacatgaatgtactaatcatgttgggtgccttatcgctttcctaatctacagtgcctgttagcccagcctcactccttcccttaaccctgagatcccgtagatggagcgggtgtagacaagaggctggctggaggatcatcagtacagtgatttgcagaaatcttttatgggcttcattttggaaaaatttgtttttagtaaatgctcaaatttggtgggaagtaatttgaatgtatttgattgtattgtcctcattacaattgttaattagacacgttctacatgacagtagtactcaggggagttttctccctgggctgctaatatctgggtgtaatctctgaaactgtaggtccagtgaggcggcgtgaaaagttagcaaagccaccatctgctggtggtttaagccaaggcctctcttcttcgccactgacttgctatgttatcctttctcttgtaacaaacccatcccagagatgaggcctttaatcatcccaagaacctcctgggctaagtatctgacagtctcacatctcaacatcgtgtattaagtgtccagaacatcagctcaggaggacacgctgaaactctcactctgggcgagtcctgataaaacaggctcctaatactgacctacctcaagggcagttctgaggtgattagagccttttctttttttaagcaagtgtttggagatgcatggcagaggttttcctgcagacttgtaaagagctagatgtgttctaagaccatctttagtctacattgctcttcccagagatctacaactatgacccagccaaagtgcaagcctacctactcactgccataaaaactattcaggaaaccttttcctggcctgaatgagattttgttttttttttttttatgtggggcggttatttgtgacccaagtgtaatttggatgatttttaattaatatcaactcttgaagcctaatatgtactggatttgagattgcatttgttcctaataaaagtggatctagctgtgctgcctgg

SEQ ID NO: 265 - protein, 358 aa, Rattus norvegicus
  ref <308>: DATABASE ACCESSION NUMBER: Refseq / NP_631931
  ref <309>: DATABASE ENTRY DATE: 2003-01-13
MPAHMLQEISSSYTTTTTITEPPSGNLQNGREKMKKVPLYLEEDIRPEMREDIHDPSYQDEEGPPPKLEYVWRNIILMALLHVGALYGITLIPSSKVYTLLWGIFYYLISALGITAGAHRLWSHRTYKARLPLRIFLIIANTMAFQNDVYEWARDHRAHHKFSETHADPHNSRRGFFFSHVGWLLVRKHPAVKEKGGKLDMSDLKAEKLVMFQRRYYKPGLLLMCFILPTLVPWYCWGETFLHSLFVSTFLRYTLVLNATWLVNSAAHLYGYRPYDKNIQSRENILVSLGSVGEGFHNYHHAFPYDYSASEYRWHINFTTFFIDCMAALGLAYDRKKVSKAAVLARIKRTGDGSHKSS

SEQ ID NO: 266 - DNA, 1232 bp, Rattus norvegicus
  ref <308>: DATABASE ACCESSION NUMBER: Refseq / NM_053593
  ref <309>: DATABASE ENTRY DATE: 2001-11-07
ccgaagcgtccagctgcccgggaccgatccccggtgtatggcgccgcagaaacggctcccgggcccagataaagggcacctccgcagctcttggccgagagatcccctgctccgagaatggctaccactcgatatgaacccgtggctgaaattggtgtcggtgcctatgggacggtgtacaaagcccgagatccccacagtggccactttgtggctctcaagagtgtgagagttcctaatggaggagcagctggagggggccttcccgtcagcacagttcgtgaggtggccttgttaagaaggctggaggcctttgaacatcccaatgttgtacggctgatggatgtctgtgctacttcccgaactgatcgggacatcaaggtcaccttagtgtttgagcatatagaccaggacctacggacatacctggacaaagcacctccgccgggcttgcctgttgagaccattaaggatctgatgcgccagtttctaagcggcctagatttccttcatgcaaactgcattgttcaccgggacctgaagccagagaacattctagtgacaagtaatgggacagttaagctggccgactttggcctagccagaatctacagctaccagatggccctcacgcctgtggttgttacgctctggtaccgggctcctgaagttcttctgcagtctacatatgcaacgcctgtggatatgtggagtgttggctgtatcttcgcagagatgtttcgccggaagcctctcttctgtgggaactctgaggctgaccagctgggcaaaatctttgatctcattggattgcctccagaagacgactggcctcgagaggtctctcttcctcgaggagccttttcccccagaggacctcggccagtgcagtcagtggtgccggagatggaggaatctggagcgcagttgctgctggaaatgctgacctttaatccacttaagcgaatctctgccttccgagccctgcagcactcttacctgcacaaggaggaaagtgacccggagtgaggagaggggctgccttttccagtttccggacgctgtgtggaaagaaccttgctgaagtggcagcctctgccttcccctgaggctatggagagtcctccggtttagccttaaatgacaattccctacctctccttatgaggtttaccccacccccaccctcctgtttctctacactaaagggcaggcattatctgtcttcttcc

SEQ ID NO: 267 - protein, 303 aa, Rattus norvegicus
  ref <308>: DATABASE ACCESSION NUMBER: Refseq / NP_446045
  ref <309>: DATABASE ENTRY DATE: 2001-11-07
MATTRYEPVAEIGVGAYGTVYKARDPHSGHFVALKSVRVPNGGAAGGGLPVSTVREVALLRRLEAFEHPNVVRLMDVCATSRTDRDIKVTLVFEHIDQDLRTYLDKAPPPGLPVETIKDLMRQFLSGLDFLHANCIVHRDLKPENILVTSNGTVKLADFGLARIYSYQMALTPVVVTLWYRAPEVLLQSTYATPVDMWSVGCIFAEMFRRKPLFCGNSEADQLGKIFDLIGLPPEDDWPREVSLPRGAFSPRGPRPVQSVVPEMEESGAQLLLEMLTFNPLKRISAFRALQHSYLHKEESDPE

SEQ ID NO: 268 - DNA, 1122 bp, Homo sapiens
  ref <308>: DATABASE ACCESSION NUMBER: Refseq / NM_052984
  ref <309>: DATABASE ENTRY DATE: 2003-01-15
agccctcccagtttccgcgcgcctctttggcagctggtcacatggtgagggtgggggtgagggggcctctctagcttgcggcctgtgtctatggtcgggccctctgcgtccagctgctccggaccgagctcgggtgtatggggccgtaggaaccggctccggggccccgataacgggccgcccccacagcaccccgggctggcgtgagggtctcccttgatctgagaatggctacctctcgatatgagccagtggctgaaattggtgtcggtgcctatgggacagtgtacaaggcccgtgatccccacagtggccactttgtggccctcaagagtgtgagagtccccaatggaggaggaggtggaggaggccttcccatcagcacagttcgtgaggtggctttactgaggcgactggaggcttttgagcatcccaatgttgtccggctgatggacgtctgtgccacatcccgaactgaccgggagatcaagagatgtttcgtcgaaagcctctcttctgtggaaactctgaagccgaccagttgggcaaaatctttgacctgattgggctgcctccagaggatgactggcctcgagatgtatccctgccccgtggagcctttccccccagagggccccgcccagtgcagtcggtggtacctgagatggaggagtcgggagcacagctgctgctggaaatgctgacttttaacccacacaagcgaatctctgcctttcgagctctgcagcactcttatctacataaggatgaaggtaatccggagtgagcaatggagtggctgccatggaaggaagaaaagctgccatttcccttctggacactgagagggcaatctttgcctttatctctgaggctatggagggtcctcctccatctttctacagagattactttgctgccttaatgacattcccctcccacctctccttttgaggcttctccttctccttcccatttctctacactaaggggtatgttccctcttgtccctttccctacctttatatttggggtccttttttatacaggaaaaacaaaacaaagaaataatggtcttttttttttttttaaaaaaaaaaaaaaaaaaaaaaaaaaaaaaaa

SEQ ID NO: 269 - protein, 111 aa, Homo sapiens
  ref <308>: DATABASE ACCESSION NUMBER: Refseq / NP_443710
  ref <309>: DATABASE ENTRY DATE: 2003-01-15
MATSRYEPVAEIGVGAYGTVYKARDPHSGHFVALKSVRVPNGGGGGGGLPISTVREVALLRRLEAFEHPNVVRLMDVCATSRTDREIKRCFVESLSSVETLKPTSWAKSLT

SEQ ID NO: 270 - DNA, 1540 bp, Rattus norvegicus
  ref <308>: DATABASE ACCESSION NUMBER: Refseq / NM_012645
  ref <309>: DATABASE ENTRY DATE: 2003-01-14
ggatcgcacatgggggcgatggcaccgcgcacgctgctcctgctgctggcggcggtcctggcccccacccagacctgggcgggctcacactcgctgcggtatttccacaccgccgtgtcccggcccggcctcggggagccccggttcatttctgtcggctacgtggacgacacgcagttcgtgcgctacgacagcgacgcggagaatccgagatacgagccgcgggcgcggtggatggagcgggaggggccggagtattgggaggagcagacactggtcgccaagggacaggagctggattaccgagtgagcctgaggaacctgctaagctactacaaccagagcgagggcggctctcacaccatccagaggatgtatggctgtgacgtggggtccgacgggagcctcctccgcgggtatgagcagcacgcctacgacggccgcgattacatcgccctgaacgaagacctgaaaacatgggctgtggcagactttgcagcatggatcacccggagcaagtggcagcggaatggtgctgcagagagaagcagggcctatctggagggcacgtgtgtggagtggctcctcagatacctggagcgcgggaaggagacgctgctgcgctcagatcccccagaggcacatgtgacccttcaccccagacctgaaggtgatgtgaccctgaggtgctgggccctgggcttctaccctgctgacatcaccctgacctggcagttgaatggggaggacctgacccaggacatggagcttgtggagaccaggcctgcaggggatggaaccttccagaagtgggcatctgtggtggtgcctcttgggaaggagcagaattacacatgccgtgtggagcatgaggggctgcctgagcccctttcccagagatgggagccttctccatccaccgactccaacttacttctgttgttcttggagctgtggcagtttttgtagttttggccatcattggagctatggtggttgttgtgaggaggaggaggagaaacacaggcaggtacagctcccagagctccgttgtgtctctcccagattgtgaagcatgaagacagctgcctggagtggactgagtgacagacgatgtgttcaggtctctcctgtgacatccagagccctcagttctctttagacaccagtgtctgaagttccctgtgattctatggcttcagtgtgaagaactgtggagtccagcctgccctacacaccaggaccctgtccctgcactgcctgtgttgcctaccacattcagccttgctggtccagcctgggggtggagggtggggacatctgcatcctgtccccctgtgccaccctgagcttcagcccctcactccacactgagaataagaatctgagtgtgaacttgattgttcacatccttgacacagtgtggatagctttttaaattactggatggaatacttagaggttttttgttttggggttttgctttgtttccttttgtttttgaaaaaataaatggcagatggagaagcttccagaaaaa

SEQ ID NO: 271 - protein, 319 aa, Rattus norvegicus
  ref <308>: DATABASE ACCESSION NUMBER: Refseq / NP_036777
  ref <309>: DATABASE ENTRY DATE: 2003-01-14
MGAMAPRTLLLLLAAVLAPTQTWAGSHSLRYFHTAVSRPGLGEPRFISVGYVDDTQFVRYDSDAENPRYEPRARWMEREGPEYWEEQTLVAKGQELDYRVSLRNLLSYYNQSEGGSHTIQRMYGCDVGSDGSLLRGYEQHAYDGRDYIALNEDLKTWAVADFAAWITRSKWQRNGAAERSRAYLEGTCVEWLLRYLERGKETLLRSDPPEAHVTLHPRPEGDVTLRCWALGFYPADITLTWQLNGEDLTQDMELVETRPAGDGTFQKWASVVVPLGKEQNYTCRVEHEGLPEPLSQRWEPSPSTDSNLLLLFLELWQFL

SEQ ID NO: 272 - DNA, 11889 bp, Rattus norvegicus
  ref <308>: DATABASE ACCESSION NUMBER: EMBL / M62752
  ref <309>: DATABASE ENTRY DATE: 2000-03-04
gtcgacggcctcagcagtcttcaaaattgccaggtcatccgagagcctgcctagtctctgcctgccctctgccagacagaccctcaggcttcaccttactctctcctcatagctgatagctgccctaattggtcacccatctccagggcccctcacgggggctgcctcagtagttggtgctgggccctgaccccggtcttctatgtctagataggcacaggctgctgttattcagcatactcaaggaacctttgcttcctaccttcttcctacctgcttcctacctgcaatgacaaagataagattgggtgggtagggacaggtggcagcattggaaaacaggaatgtctgggtcaaatgataggcactctgaagaagtccttggtgacgacacatggtggccacaacccccttaaggccaagttttggatatcctaatcttcctagaaacctcaggggctctctagttcctaccatggggcctgaaggagtttgggggggtctgaactctggatgttcttagtggccttagctaagaccgtctgaccagaaatgcaatcaggagtatgccttgactttgagaatgggtttcataaattccctatacctaagggaataggtataaaaaacctctttccagagcttcctaagaaggttggatcccggggatgccggtagacttgctgatggcctcaaggacctgtcatgtcatgtagggtctatgtgaaataagcacctgtcccgggggtagggcatcatggaaaacctctggaaattgagcttcatgttcattgggactcaaccatgagcagggccagcaatgatggcacaatcagggcttgcagggatcttgacttaggcttggacctcttctcctgggtctacttgctggttccctgttttgtgttccattttcctggggacatttttatgttggatgtacctttttttccccctgctttcaagcaaccactgtctctgctactccagttctttctactgcttctttcgcctctctccatccctgcccctcctttcctggctctgtttccctgcccccaccctctgagcgctgcaccgcccttttgcctgtttttctctcctggtctgtcgtctcgctcggtggttctctccctcgctcgggtacatctctgcagctgcgtctctcggatcctcgttacgccggccggcgtccgtgggtgcgcggcccctgcgtccgcgcatcgttcgcaccccatctgccagcctcccggcgcccgctcccccctccggtaccgcattgccgtactgcaggggcgcagtgcattgcgccggcaccgtcaataggtggaccccctcctagagagataaaaccgccgccagcgccaccagtccctctgactgagacctcggctctaggtaaggacgcacaacccgtctgagacccttgattaggtttccaaccagggttctccttcctgtgaacccgtcctgaggtagagggggacatgcggcacctagctgggctgcacctctgggctgggagggggtgtctctagacagggtggtggggtccccgtggcagtcgggtagtaagtcccttaggtgattgtatacttggtgacaggggttagggagggggatgtttctcctgaaatcatcatgctgtcactgtgaccttggggcttgcgggggttctgcgaggccgatcgttgcaggtgctggcatggtggtttggggctctgaggatgttcgtgatttgtcagagtagggcgggggtggtgatggtagtgaaacctgaggacccctcttcacgttctacgtggctaccaccctaggatgcacccccatcccaccaggcccgagattcttggttgacctcaagatgcgcaggtactaagacccagggcctgaccagatggtaggggagagggtcggggcatctctgagggcacttgcttagctgggccaggtgggatttttattcttctggctagaacagggcacttacctctcggccctgacggctgccccctgcctgtggggagggcctgagctattctgggcctatgcctgggaccatccagctgtctcctcaaccagcctgtcggcagagggaggaagatggcgcccttacctgaggaggggctgaggagtgcctggccttctcttcatggtggcagcagatgggggtagggcagtgtcatccctggggtgtgtgtgtgtgtgtgtgtgtgtgtgtgtgtgtgtgtgtgtgaaggaggggggtggaggcatcgagcacagggaggacagcgcactgtagagctgggcacagtgactcatcacagggctctggctggtccaggggctcactcagtctgctgctctgtgatgtccagacaggattaacccttccttaaggaactttcctccaaatcaactctccaaacacttacacactaacgaaccatttgggttaaggtatagggtagagaaacaggtgacttatgaatgcaatgtgtctggacacgtttaggacaagggtttgggggtggagggtgtcattcttccctatccaggctcaggtgaagactgggtcaggaaaagagctcccaaacaatgcaatgtgtgggtatctctgctgggctctcttagggccctagtcacctgtttctcttgtccctggccccacagagttcctgcccagcaaataccctcaacccagagccagagcccccacagtgccagcccgtccctcactcaggcagaatgggcaaggagaagacacacatcaacattgtggtcattggccacgtggactcaggcaagtctaccacgacaggccatctcatctacaaatgtggcggcatcgacaagcggaccatcgagaagtttgagaaggaggcagcagaggtgaggacctgggggcctggtgctttctttcattgcccagtttacctccttcagtgcaaggggatatgggtaggtaaacagagcagtctcctgagaatgttgctagatctgtctcatactgagggagggggaatttgtgccctccccaggtccattataagactcttcactcttgcctcggtgggccagtgccagggggcccttcaagccttatcctcttgctccccaggactgaaactgggctgaatgtggtgctgccctcacttgtcttccaacagccagggctcaaggatgctattaatagttgattgatgggcagcaggcttgccagctccactttctccagataagctgaggagggttgctgatctaggatgatacctggagtagggggatcttgctaacctgttcctggttgagacctacgaaagagcagtgattgtaactggattctcttctctgcccctacccctgctcattctgagaagggctggctcctgcataagagctaaggcaggcctgaggacattaactatctatgcagagctcttgctccagtgtgtatatgggactttgagccacaattctgtgtgtctaggcctgatgctttttaccttttagagggtgtgattttagggggaggaggtaggagggatttgagggtttgaaggtcacttgggtcaggtcccagctgggttttgtctggttctgtctgaatagccagcccctccaggctggcatcatccgtggaatgcagaagcatgtcatttgaaattctggtagggagctatgttcagttgagcatcgatgaccacagctctggtccaggctgtaggagtctcaccaggagtctgaccctggcacaagtttccaaaaatcagccagccttgctcttggtagggctactcctactttctcctattttggtggaactggggaggggagatgtctcagagttagaagaattcatccactacaggaagatctggaaccagacttttctcaaaaccttgagcaacttactcatgtttaaaatttcccttaaaaaataacttgagacttgttttgtttttcacagccccaaacctaatgagataattgacctctaattgggtgtagagccttagcctcaggtggcaaggatagtttggcaactcccagacactcacgccctctgctgggggacttgcgtgttcacagccatttaggaggggagcaagggtggggctggttgatctgggcggcctcaggtgaggcacagcagggtttgaggaacagcaccggagagatgggacagaggtcctccgttcgaggcactttaagccaactgtcaacctctcatggttgctccctggggccaggacaggcgtagtaggtggatgcgaccccaaagtcctgtgtcctatcctgagttgtgcccctacccttccagatggggaagggctcctttaaatatgcctgggtgctggacaagctgaaggcagagcgggagcgcggcatcaccatcgacatctccctctggaagtttgagaccaccaagtactacatcaccatcattgatgctccaggccaccgggacttcatcaagaacatgattactggcacatcccaggtgcgtgcaggagggcacctagctcagtgacttagggcccaacagctctcttgaggtgtcagtatctcttgtacttcctgccttgacagagccccgccatggcatctccagcccgttaggctgagtccctcaagaactgagtcagtgctttcatgtcagtcagatggtgtgccaagagggttacctcaccactgctggggtcagcagacagacagagggagaaatgtaggcatatccttcacagacagatttttataggagagcccacaatagagacggtgacatgtgggtagaaaagcagtcagacaatcacagccagagaggacaaaccagagaggatcaatgactcatccaaggactagaccctgttggtagtggagttgatgccagtctgggcctctttgactcagggcctggtggaagagtcctctgttgcccttgaggtagataccccgaatctccaaccccaggataactgccctggtctcattatgtgggtagcagagctaggtcaaaggcagggccaggggctcactgtgtctgacctgttggataggccgactgtgcagtactgatcgtggcagcgggcgtgggcgagtttgaggcgggcatctccaaaaacgggcaaacccgggaacacgcactcctggcctacactctgggtgtgaaacagctcattgtgggtgtcaacaagatggactccacggaaccagcctacagcgagaagcgctacgatgagattgtcaaggaggtcagcgcctacatcaagaagatcggctacaacccagccacggtgcccttcgtgcccatctcgggctggcacggtgacaacatgctggaaccttcacctaatgtgagtgaagatagtatggtggggacagtgctgaccttcccaagagcccagggctccaagactccaggtctgggtgggccaggctccctctggtcttgctgggttcctgtgagcactctagtgatggaggatactcctggtaaggacttgcatttggggtcctctatctcagcctccatatgaggccaaaagaggaagataagaccccctttctggcaagtgatggttccaccatgccatccctacagcacatgcctgttgagccccagaatgcactatgggggaaaatcagtttttatttctcccaagccactgccctgggtttgaataccattcaggatcagcaaggccacatgatccttctgaagtagggtggtatctgggaagcaagaaaggctggcctgaagaatggagaatgtgtctgggctggttgtgtggaagcttgaagctcaaacagtctgcagctctggcttgggactctttcttgggagtgaagaggacatttttcagagagggcctgggacctagaaaagggggcacccagctgtaggcagctttgcagctgcccacagtgaatgaaatggtacaagcacaggttctctggagatagctgaggaccagtgcctggtggtataaggacagagtatggcagacaggggttactccatcttgctcttgctcacatatgattatcaggactttaggatcctgtactaacccaagctaaaacttatctaatgtttcttttttatttttagatttatctatttattttatacgagtactctgtcactgtcttcagacacaccaggagagggcattggatcctggagacctgatcagcagaaacccctctgtgccctactgctgtattgtgctctgggggtctgctcatccacagtttgagggccatctgttaacctgaggtgcttgggacttggtcatgaatactaaggcaggaggcacaaaaccttggtggatttacttctcgtctgtggcaggtggaccgtgagagctctgtcaggggggtttgaagtcatcctccagagagcccttgtgtggtggtggtggtggtggtggtggtggtggtggtggtggtggtggtgatagacactgaacttggagatagcttggtagtgagcagagcttctggggttggggcagagggtggactttatccctgacatgccacttggccagattgggtccctcatcccctggtacttgcctgtctgggactgcaattgaccaggtccagtgggattagggaatcaggctagtctgagtggcctcatttgtaaatggtgggagcatgacagcatagtctggggaaattattttcgtttgcttgttggtttgtccctcctgtgtttcctaagctgtgtttgttcagggtccctgtgaggctaggaagaagagaagggaggaggagaaagcaactgaacttgaacagtgaggctcccttcccaggccaccttaggcaggtcctggagatctgaggctgagggtttggtcaggtgagttgctctgtgataactggcacctatcccccccaactcccctttttggtcccgcccagatgccatggttcaagggctggaaagtagagcgtaaggaaggaaatgcaagcggcgtgtccctgctggaagccctggacacaatcctgccccccacccgccccaccgacaagccccttcgtctaccgctgcaggatgtatacaagattggtggtgagtgagaattcagtgccggagctcactgcttctgcaggtcttgagcgctgtgccccaaacttgaccaggacatcaacaaggaatccccaagatggctgcctctgcctttctccttacaccatatactcctacaccccatccgtttactcacccatcctgattcttgtgttatctatccaccccatctatctgtctactcagacacccctcacactcacctccacagtgacccctccacccatctccagtgaccctccacccccctccacagatgcccttcccactcacctccacacatccatcatttagccttcaataggatccctttcccactccctaccccctccactcagccacaagctagggccataagatgggaggagtactgacctgacttacacttcacctgcagggtggagggtgcctgtctcacaggaggcagtcctagtccaggaatgagaaacgaaggtcacgggggtcaacagaagccaaagccaaacatgagatgagcaaagggagagggatgagaatatcacgctcacacttcctccaacacagagcctgacagctggcttttctgtcatcccataatgccagcccccacacccaagctaccaggagaagcttcctctcccagccacttgctcatcaaggtatccctgtggtagccaggctgttactgtgagcaggcttgtcagaagtgctatggccagatgcctctacagcggcagagcactgtgcccacagcaggactcagggagccgtaagaagagtaagcccagtgccatgcttggctgggccacacgccacctgtcccttatccttgaatcctgggaactcttattccccgaaccggccagggagactctccttcttctgtctcaccctctgcttgtctagggaccctctgtctacttatctgctccatgaggctatctcccttggccctgtcagagaggagaaagtcctgagttctgtgtactttcaggctctctgcttgtatgttttgccctgcacccctcctctggcccgccacctcacagtgccctctcttggcccaggcattgggactgtacctgtgggcagagtggagaccggtatcctccgtcctggtatggtggtgacctttgcgccagtcaacatcaccacagaggtgaagtctgtggaaatgcaccacgaggcgctcagcgaggccctgcctggtgacaatgttgggttcaacgtgaagaatgtgtctgtcaaggacattcgccggggcaatgtctgtggggacagcaaagctgacccccctcaggaggccgcccagttcacctctcaggttggtggtcacactagggtatgtgggcattcctcctcagaaggggagacatgggcaggggtagcaaggaacaatgtcagctggcccttcacctggcactggagaagaagactctccattcactcaaggccactcagtgctcaaaggctaaatgggtgctcagagtcaccagcaggtaaggactgcggcctctctgggcagtccttccccatgatatttgatctacaaaaaggcttttattagcttactgcttggggtatcactgtagactttcttctcctaattgttttaaaaattagatctatttatttagtgtgtgtgtgcacgcacgtgaaggtcagaaaatcaaacctcttttcccatcttgtggttcccagggactgaactcaggtcttcgagaccagcagcaagtaccatccttgcccacaaagccgtcttgttggcctccttctttctctatttttagtgaacccttttcatcacctcttcacagggcaggaatttttagaacagcattatcgaaatataatagaagcattatcattgaggtccaattttgtcctggttgtacaatgcatccattctgtcacggtcctttcaagtagctgtcttttgagtccctcatagtctgctacatgcacagcaagatgttagggtatgagtggggtccctgtggcctgggcattccttgcacaaaaccatgggcatcgggagatgacctgtccctgtcccaagagacctattcacggcttacctcaactctgctctcaggttatcatcctgaaccaccctgggcaaatcagcgctggctactcgccagtcatcgactgtcacacagcccacatcgcctgcaagtttgccgagctaaaggagaagattgaccgtcgctctggcaagaagctggaggacaatcccaagtccctgaagtctggggatgccgccattgttgagatggtcccaggaaaacccatgtgtgtggagagcttctcacagtacccacccctcggtgagctgggtgatccaaggtgtaacctagtgcggtactgacgggcagtgtcaggagtttctttactatggcaaactgagggaaatgcagcaattagtaagaggtttcactgagtacacacacacacggacacacacacacacacacacacacacacacaccccactaccaccacatcaaatatagtgctcatttacacacatcacacacggtgctcattacccccacacacaccatggtgctcattacacacacacacacacacacacacacacacacacacacacacacacacacacacacacacgatgtttcttttttgaagaagaacgcttgaggaacttctccgcagtcaaaagcaaggctagtgatttctcccccatgccctggcccctcacgacaggatggcctagtttgccctaactttagaaccacgtacttgcagctgttccgggctacagggctctggtccactgaggcggtcagaacagcttaaaggggcattaagctgttctgtggtcgcccaatgcacctgcgcactgcatcctgggcgcccccgcagtttacgcatctctccccacaggccgcttcgccgtggccgacacgaggcagactgtggccgtgggcgtcatcaagaacgtggagaagaagagcggcggcgccggcaaggtcaccaagtccgcacagaaggcgcagaaagcgggcaagtgaaggccgggcgcccgcgcgtggccctccccaacggcgccgcgccgcccccagccccgcccccggcactggccccgtcccctcccccgccccagggcggcccctccgccccgcccccccgccaggcgcatgtctgcacctccgcttgtaagaggctctacgtcagcgactggatgctcgccatcaaagtccagtggaaattcttcaagaggaaaagcgcccccaccccaggcttccgcgccagtgctgaccacgctcagtgcccgttttcccaataaactgagcgaccccagagccgtgtgtgcctactgctggggccctatttcacaaagtcccgtcgtcgtccaaggtgttcagtctggcacctctcaccgctgccaggtggccctcacgactgccctcctaagcttcatgggtaggcgatggggccgctgcgtggtgctgggaatcccagctaggtgaggatggaaaagccaaatggctttgatggctatgacctgttttggggtgcctcggtgagatgtgcaggacctaggtgggatgtgcaagaccgagtagaaccaaaactgagcccgacaaggaaccgtgaaacttgagagctcctccccacgagtggcacacacttccccctaggtttctggattcccagagaagtccatcttgctctcactccagcctgctgagccagcccccaggtctattctagttccttggcccagatcctcacttcttaaattgcagtaacaccagccccagaagtcaggaggctgatgacactgtcacgtgagctgggcttgatccacctgtcccagagcacgccatgattccagtggccaggcaggacagatggtaggactactctccactcgctcttgtcctgggagctgtcctccctgtcctctcaaagcctattcttgttattgagggttgaggttgggtggggtgagccagtccctccacagagccagagtaaaagtccctggtctctaatattcccacatgttccccttgtgtcagtttccaaggtcggctgcaaatggccaaacacagtgtgacttgagaggcagaccttcagcacccttgggcagaaggcaaaccactgtagatctgctctcccctcctggttttgttggcgtgtctgagctagtggcccaaccatgcagtctctgcttcttggtcatgtgccctcatctcttctagagtgtgacatctgtctcctataaggacacccatgtctgtacttagagagcatgcatggagaacccagataatcttctgccttctcagatgcatcttcagagcccgtccttgcacatagctgccgttccaggtttctgctgttaggctcctaacaccttcagtacactcagcctctatgctagatgaagacagacacagtgcagctgcgatgggcaattctgacatccaaagagatggccacactggtccaaggaattcaaattacaattccagacaaacaatgaactcttttttttttactatatctgtctcaaatttttatattaaaaaggatctgatgtctctctaaagttcatatttgcctgggtatctgtatctagtagccttccctcagaggcctgacatcctcagttcaaacccatcctgtatgggtctgtgggctgtctgcacacccattggtaaccaccttcccaaactcatcactccctagccatgaaggtcttccttccttcctcccttgctccccaccgtcatgggtgttgaggtgccccttctgctctgctgtgtgattaggtaggagaattc

SEQ ID NO: 273 - DNA, 1359 bp, Rattus norvegicus
  ref <308>: DATABASE ACCESSION NUMBER: Refseq / NM_133409
  ref <309>: DATABASE ENTRY DATE: 2003-01-13
atggacgacattttcactcagtgccgggagggcaacgcggtggcggtgcgcttgtggctggacaacacagagaacgacctaaatcagggggatgatcatggcttctcccctttgcactgggcctgccgagaaggccgatctgcagtggttgaaatgctgatcatgcggggagcacggatcaatgtgatgaatcgtggggatgatacccccctgcacttggcagctagtcacggacaccgtgacattgtacagaagctgttgcaatacaaggctgacatcaatgcagtgaatgaacatgggaatgtgccccttcactatgcatgtttctggggccaagaccaggtggcagaggacctagtagctaacggggctcttgtgagcatctgtaacaagtatggagagatgcctgtggacaaagccaaggcaccccttcgagagcttctccgagaacgggcagagaagatgggccagaatcttaatcgtattccatacaaggacacattctggaaggggaccactcgcacaaggccccgaaatgggaccctgaacaaacactctggtattgacttcaaacagcttaacttcctggcaaagctcaacgagaatcattctggagagctatggaaaggccgctggcagggcaatgacattgttgtgaaggtgctgaaggttcgagactggagtacaaggaaaagcagggacttcaatgaggaatgtccccggctcaggattttctctcatcctaacgtgcttccggtactaggtgcttgccaggctcccccagctccccacccaaccctcatcacacactggatgccatatggatctctctacaatgttctacatgaaggcaccaatttcgttgtggaccagagccaagctgtaaagtttgctttggacatggcaagaggcatggcttttcttcatacactagagcctctcatacctcggcacgcactcaatagccgtagtgtaatgatcgatgaagatatgactgcccgaatcagcatggctgatgtaaagttttctttccagtgccctgggcgcatgtatgcacctgcctgggtggcccctgaagccctgcaaaagaagcctgaagatacaaacagacgctcagcagacatgtggagttttgccgtgcttctgtgggaactggtgacacgagaggtgccctttgctgacctttctaatatggagattggaatgaaggtggcactggaaggccttcggcctactatcccaccaggtatttccccccacgtgtgtaagctcatgaagatttgcatgaatgaagaccctgcaaagcgacccaagtttgacatgattgtacctatcttggagaagatgcaggacaagtag

SEQ ID NO: 274 - protein, 452 aa, Rattus norvegicus
  ref <308>: DATABASE ACCESSION NUMBER: Refseq / NP_596900
  ref <309>: DATABASE ENTRY DATE: 2003-01-13
MDDIFTQCREGNAVAVRLWLDNTENDLNQGDDHGFSPLHWACREGRSAVVEMLIMRGARINVMNRGDDTPLHLAASHGHRDIVQKLLQYKADINAVNEHGNVPLHYACFWGQDQVAEDLVANGALVSICNKYGEMPVDKAKAPLRELLRERAEKMGQNLNRIPYKDTFWKGTTRTRPRNGTLNKHSGIDFKQLNFLAKLNENHSGELWKGRWQGNDIVVKVLKVRDWSTRKSRDFNEECPRLRIFSHPNVLPVLGACQAPPAPHPTLITHWMPYGSLYNVLHEGTNFVVDQSQAVKFALDMARGMAFLHTLEPLIPRHALNSRSVMIDEDMTARISMADVKFSFQCPGRMYAPAWVAPEALQKKPEDTNRRSADMWSFAVLLWELVTREVPFADLSNMEIGMKVALEGLRPTIPPGISPHVCKLMKICMNEDPAKRPKFDMIVPILEKMQDK

SEQ ID NO: 275 - DNA, 762 bp, Homo sapiens
  ref <308>: DATABASE ACCESSION NUMBER: Refseq / NM_006284
  ref <309>: DATABASE ENTRY DATE: 2003-01-15
gttcgccgcctctcccaccggcccgatgagctgcagcggctccggcgcggaccccgaggcggcgccggcctccgccgcctcggccccgggccccgcgcccccggtctcggctcccgccgcgctgccctccagcaccgccgcggagaacaaggccagccccgcggggacagcggggggacctggggctggagcagctgctgggggcacgggacccttggcggcgcgggccggggagccagctgagcggcgtggggcggctccggtgtcggcgggtggcgcggcgcccccggagggggccatatctaacggggtttacgtactgccgagcgcggccaacggagacgtgaagcccgtggtgtccagcacgcctttggtggacttcttgatgcagctggaagattacacgcctacgatcccagatgcagtgactggttactacctgaaccgtgctggctttgaggcctcagacccacgcataattcggctcatctccttagctgcccagaaattcatctcagatattgccaatgatgccctacagcactgcaaaatgaagggcacggcctccggcagctcccggagcaagagcaaggaccgcaagtacactctaaccatggaggacttgacccctgccctcagcgagtatggcatcaatgtgaagaagccgcactacttcacctgagccacccaacctaaatgtacttatctgtccccatgtccccacaccagcctgttttcataataaactttattgtgacaggc

SEQ ID NO: 276 - protein, 218 aa, Homo sapiens
  ref <308>: DATABASE ACCESSION NUMBER: Refseq / NP_006275
  ref <309>: DATABASE ENTRY DATE: 2003-01-15
MSCSGSGADPEAAPASAASAPGPAPPVSAPAALPSSTAAENKASPAGTAGGPGAGAAAGGTGPLAARAGEPAERRGAAPVSAGGAAPPEGAISNGVYVLPSAANGDVKPVVSSTPLVDFLMQLEDYTPTIPDAVTGYYLNRAGFEASDPRIIRLISLAAQKFISDIANDALQHCKMKGTASGSSRSKSKDRKYTLTMEDLTPALSEYGINVKKPHYFT

SEQ ID NO: 277 - DNA, 499 bp, Rattus norvegicus
  ref <308>: DATABASE ACCESSION NUMBER: EMBL / AA859643
  ref <309>: DATABASE ENTRY DATE: 2000-03-03
tttttttttttttttttcactttgtagttaacggctcccctgcccctgtaaacagttttatttaattttaagaatcatgcagcaatccataaatattgcatcttgatgtccccactgtaatgtgcccacaagtgtactccagggagtgtgaggggtacacagatggcacacacacacacacacacacacacacacacacaccccaggtgtgcaggccctaaaacaaagtgagcaaccagcagccaacaccaggtggacaggactagctccccagtgagatggcttagtgttcaggtttgtgcccggcagatgccacagcaggtaaaaactctggtgggatgaaattaggtaaagcaaaaggctccttgaggagactgagatcactacagtaccacgtatagaaaggtgtggtgtggtgaggagccaaaggcaccaagagaacgtgcttgccctttcgcttggaccctgacaaaggaactgtttccaaatggactgggta

SEQ ID NO: 278 - DNA, 1831 bp, Rattus norvegicus
  ref <308>: DATABASE ACCESSION NUMBER: Refseq / NM_012670
  ref <309>: DATABASE ENTRY DATE: 2000-11-01
ggccgctatccggtctcagagcggagctatcgcttagttgtctgcgttggtagtgagatttgcttcgtttcctgaagatggagggtcctttgtccgtgttcggggaccgcagcactggggaagcgatccgctcccagaacgttatggctgcagcctctattgccaacattgttaaaagttctcttgggccagttggcttggataaaatgttggtggatgatattggtgatgtaactattactaatgatggggccaccattctgaaattattggaggtggaacatcctgcagccaaagttctgtgtgaactggctgacctgcaagacaaagaagttggagatggaactacctcagtggtaatcattgcagcggagcttctgaaaaatgctgatgagctagtcaagcagaaaattcatccgacatcagttattagtggctatcgtcttgcctgcaaggaagcagtgcgatatatcaatgagaacctaattatcaacacagacgaacttggaagagactgtctgatcaatgctgctaagacatccatgtcttccaaaattattggaataaatggtgatttcttcgctaatatggtggtagacgctgtgcttgctgttaaatacacagatatacgaggccagcctcgctatccagtcaattctgttaatattctaaaagcccacgggagaagtcagatagaaagcatgctgatcaatggctatgcactcaactgtgtggttggatctcagggcatgctcaagagaatagttaatgcaaaaattgcttgtcttgacttcagcctgcagaaaacaaaaatgaagcttggtgtacaggtggttattacagaccctgagaaactggaccagattagacagagagaatccgatatcaccaaggagagaattcagaagatcctggcaactggtgccaacgttattctaaccaccggtgggattgatgacatgtgtctgaagtattttgtggaagctggtgccatggctgttaggagagttttaaaaagagacctcaaacgtattgcaaaagcttctggagcaagtatcctgtctacactggccaatttggaaggtgaagagacttttgaggcaacaatgttgggacaagcggaagaggtcgtacaggagaggatttgtgacgatgagctgatcttaatcaaaaatactaaggctcgtacgtcagcttcaattatcttacgaggggcaaacgacttcatgtgtgatgaaatggaacgctccttacatgacgctctttgtgtggtgaagagagttttggagtcaaagtctgtggtcccaggtggaggtgctgtagaagcggccttgtctatataccttgaaaactatgcgaccagtatgggatctcgggaacagcttgctattgcagagtttgcaagatctctgcttgtgattcctaatacactggcagtgaatgctgcccaagactccactgacctggttgccaagttaagagcttttcacaatgaggctcaagttaacccagaacgtaaaaatctaaagtggattggtcttgatttggtccatgggaaaccacgagacaataagcaagcgggggtgtttgaaccaaccatagttaaagtaaagagcctgaagtttgcaacagaggctgcaatcaccatacttcggattgatgatctgataaaattacacccagaaagcaaagacgacaaacacggaggttatgaaaatgctgttcactctggagcccttgatgactgattggacttcccttttatttatgacagtgttgggtgtaatgtcttagccttgggtgtctcacattaaagtacaacgagctgtcg

SEQ ID NO: 279 - protein, 556 aa, Rattus norvegicus
  ref <308>: DATABASE ACCESSION NUMBER: Refseq / NP_036802
  ref <309>: DATABASE ENTRY DATE: 2000-11-01
MEGPLSVFGDRSTGEAIRSQNVMAAASIANIVKSSLGPVGLDKMLVDDIGDVTITNDGATILKLLEVEHPAAKVLCELADLQDKEVGDGTTSVVIIAAELLKNADELVKQKIHPTSVISGYRLACKEAVRYINENLIINTDELGRDCLINAAKTSMSSKIIGINGDFFANMVVDAVLAVKYTDIRGQPRYPVNSVNILKAHGRSQIESMLINGYALNCVVGSQGMLKRIVNAKIACLDFSLQKTKMKLGVQVVITDPEKLDQIRQRESDITKERIQKILATGANVILTTGGIDDMCLKYFVEAGAMAVRRVLKRDLKRIAKASGASILSTLANLEGEETFEATMLGQAEEVVQERICDDELILIKNTKARTSASIILRGANDFMCDEMERSLHDALCVVKRVLESKSVVPGGGAVEAALSIYLENYATSMGSREQLAIAEFARSLLVIPNTLAVNAAQDSTDLVAKLRAFHNEAQVNPERKNLKWIGLDLVHGKPRDNKQAGVFEPTIVKVKSLKFATEAAITILRIDDLIKLHPESKDDKHGGYENAVHSGALDD

SEQ ID NO: 280 - DNA, 634 bp, Homo sapiens
  misc_feature (1)..(634): n=a, c, g or t
  ref <308>: DATABASE ACCESSION NUMBER: EMBL / BG198443
  ref <309>: DATABASE ENTRY DATE: 2001-04-26
cacctacaagccagctcacaagataaaataggctgcaggcatgttctacctccagtaacttcaggatggttgcaccatcattagtaatggttacatcaccagtatcatccaccaacattttatccaagacaacggaccaagagcactttttacaatattggcaatcgaagctgcagccataatgttctgggagcggatcgcctccccactgctgcggtctccgaacacggacaaaggcccctccatcttcctggcggcggtacataccgaattctgctcctactgcgggcaaccagttatcgtggcctctcggccaaccggctaccacagcagtggcgacggtgtggagcggacccgagtgatgcaccgccccatccgcttcccggctgccccggctggccgcggggcacggcgggaagcagatctctgaacttttattttgccattagaaatattagctcttcttcccaactttcaggcaactatcaaagtactaaacaggatagacaacaaaatcttgtgacaacatttaaatgtatgaaatgtattttattactaaaatatataaaatttaaaaattacatttgaattatgtacttnaaaaataaaaattctaaatgtaaaaaaaaaaaaa

SEQ ID NO: 281 - DNA, 310 bp, Rattus norvegicus
  ref <308>: DATABASE ACCESSION NUMBER: EMBL / AA866362
  ref <309>: DATABASE ENTRY DATE: 2000-03-03
tcagtttccccaccaacccccaaagagaaacatcatttcgtcttttcttctgtctagctgtgtgatgtagaccaaagttgttgcccctctgggcctgggtgtcaattggaactgggcttcagtccagccgtgctgtgtaagcctttgcaaatgctacgacctctcctgagtcttggtcgtctactcttcccaagtagtaaggtcctcgtggaagaaatgacaaaagcaccagcacggtctggatcacctctgtacttccctctaatgcccatgatccctcgttctttgccgggtaaacattccgcacttc

SEQ ID NO: 282 - DNA, 1726 bp, Homo sapiens
  ref <308>: DATABASE ACCESSION NUMBER: Refseq / NM_016202
  ref <309>: DATABASE ENTRY DATE: 2002-12-23
gggaaggcatttgagccattttggggtgtatagatgtagtaagacgatgggttccgtagtggggagaggtgactagacttcgaggtgctaagtgtaggaacaggatggaaaagccctagtgaaatgtggggaattgggttagtggggctctggggaggtacctagagaggaagtgagggaggccacggaatatgaagatggggaggccctgcggcatgtagtggggacggagggccaggaggccgatacgggggccggtgggggggtagggggcggcaaagggaggggaagtaaactgaactggggctgggcaacaggaaaaaagaagaaaccacagattagagaaatctcggcggtcaggaggcccggggtctaagatgtaaagaggtaaacagatttagggattgattgtctgctggggtgggttgagaggagaaaagggaagaaaagtcgggggactacgtcctcagacctgacctgagtggtgagaggtggacccaggaggagtggcaggtggtggcggggttttgcagagctcagttggaggccctctccgaggcagcttgatggaacgtgggagagccgggctggagtcacagtttttattttgctagggaggtagtcagtggcgcacaaagggtaacaagcagtgatagtggggatgctttccattttaggaaacttttcctaaaaggaagtggcaattttaactaatctcccctccgccgctcccagctgccactccagatgctgctgctgccgccgcggccaccccaccctcggtcctcctctccggaggccatggacccaccgccccccaaggctccccctttccccaaggcggaaggcccctcctccactccttcctcggcggcggggccccgacccccgcggctgggccgccacctcctcatcgacgccaatggggtcccctacacatacacggtgcagctggaggaggagccccggggcccgccccagcgcgaggcgcccccaggagagcccggccctcgcaagggctacagctgcccggagtgcgcccgtgtctttgccagccctctgcggctgcagagccaccgcgtgtcgcactcggacctcaagcccttcacgtgcggcgcctgcggcaaggccttcaagcgctccagccacctgtcgcggcatcgcgccacgcaccgcgcccgcgccgggccgccgcacacctgcccgctctgcccacgccgcttccaggacgccgcggagctggcgcagcacgtgcgcctccactaagctcgagacccggcctgtgctgccctgcccgtctcagggccaccaagtctgacccacacagcgtcactcactcccacacacaccccctggctctgctgaggttactgccttaccctgggcctcagccccaccttccaaagggaggagcatcattccttccttaccccctttctagctgtgtgatgtagaccaaagtcgttgcccctccctgggcctgggaaccagtcggaactgggttccagtccagctgtgctgtgtgagcctgtgcaagtgacatgacctctctaaaccttggttttctgctctctggagcggtgaaccggtggttgtctgcggggaagagatgataaagagcacgggcacggtctggttcatttctgtatctaccccccttccgcccacgcccccgaccctttgctcaataaacattccgcactccaaaaaaaaaaaaaaaaaaaaa

SEQ ID NO: 283 - protein, 172 aa, Homo sapiens
  ref <308>: DATABASE ACCESSION NUMBER: Refseq / NP_057286
  ref <309>: DATABASE ENTRY DATE: 2002-12-23
MLLLPPRPPHPRSSSPEAMDPPPPKAPPFPKAEGPSSTPSSAAGPRPPRLGRHLLIDANGVPYTYTVQLEEEPRGPPQREAPPGEPGPRKGYSCPECARVFASPLRLQSHRVSHSDLKPFTCGACGKAFKRSSHLSRHRATHRARAGPPHTCPLCPRRFQDAAELAQHVRLH

SEQ ID NO: 284 - DNA, 439 bp, Rattus norvegicus
  ref <308>: DATABASE ACCESSION NUMBER: EMBL / AA892146
  ref <309>: DATABASE ENTRY DATE: 1999-01-28
gtgtgactaaatgctgtatgccctcttcggtagactctattctcaagattctcttgttttctcaccatcccatttgatatgcttgttagtaactgttacaggtcttctttaccaccgaggaaagacggaatcctactagaggccagaaaaaaaaagggttccaacacgcatagaaggccctcacttctgcctgctctcttcatacccctgaaggtagggagtgctccaggtctgcccccaggctccaagggtgggtctcctaggggctggaaaatgccccaccaatctggctaagataaagaaaagatatgaagagaaagttacagaaacttgaagggttaagctaagtcactgagagagttattgtaagttgcagagaaaataagttgatgcatggttcagggtctgtgcagaaaagtggacagcacctaatagctgt

SEQ ID NO: 285 - DNA, 592 bp, Rattus norvegicus
  ref <308>: DATABASE ACCESSION NUMBER: EMBL / AA894212
  ref <309>: DATABASE ENTRY DATE: 2000-03-03
gaaccaggctgtattttcctttacccagcaagaatcccttgtttggctaagagcctggagaggattccttcttcccaactaatccttccgcctcctatttaaagctggggtacccttctcccgggttctccctgcatcttgaccttttcaagcctccctctgctagcatcagggtattactgtccattcttggccctattatctctgcaacagtcctcaggtgttcaaacaccacacttcccaaaatgcccttgcagggaccagtggtcatccggcatcttagacagactcccagtgggtccccagtattggggcaggaatttcagggccaggttctgggagaggggagagatgtccttcttgttttcctctttgcttttatcatcaaaccagtgtttcagagaccgtggtctcacacatcctgaagaagaaactgaaatgtgcaagtgaaaagccctgggggaacatgctcttagagtagcttctgtctgagccatttctgggctccccatacaacctaccacccagtgtcatccttggcctctgacaggtcagaatgtataaatctttcccaataaagtgttacacatgc

SEQ ID NO: 286 - DNA, 493 bp, Rattus norvegicus
  ref <308>: DATABASE ACCESSION NUMBER: EMBL / AI008074
  ref <309>: DATABASE ENTRY DATE: 2000-03-03
cataaataacttgggaaccattgctaagtctggtacaaaggcgttcatggaggctctccaggctggtgcagacatctccatgattgggcagtttggtgtcggcttctactctgcctacctggtggcagagaaagtggttgtgatcacgaagcacaacgatgatgagcagtatgcctgggagtcttctgctggtggatccttcactgtccgtgcagaccacggtgagcccattggccggggtaccaaagtgatccttcacctcaaagaagaccagacagagtacttagaggagaggagggtcaaggaggtggtgaagaaacactcacagttcataggctaccccatcaccctctatctggagaaggaacgcgagaaggagatcagtgatgatgaggcagaggaagagaaaggggagaaggaggaggaagataaggaggatgaggagaagcctaagattgaggatgtgggatctgatgaggaggatgacagcggc

SEQ ID NO: 287 - DNA, 794 bp, Homo sapiens
  ref <308>: DATABASE ACCESSION NUMBER: EMBL / BE389431
  ref <309>: DATABASE ENTRY DATE: 2000-07-29
tctgagctgctgcgctatcatacctcccagtctggagatgagatgacatctctgtcagagtatgtttctcgcatgaaggagacacagaagtccatctattacatcactggtgagagcaaagagcaggtggccaactcagctttgtggagcgagtgcggaaacggggcttcgaggtggtatatatgaccgagcccattgacgagtactgtgtgcagcagctcaaggaatttgatgggaagagcctggtctcagttaccaaggagggtctggagctgcctgaggatgaggaggagaagaagaagatggaagagagcaaggcaaagtttgagaacctctgcaagctcatgaaagaaatcttagataagaaggttgagaaggtgacaatctccaatagacttgtgtcttcaccttgttgcattgtgaccagcacctacggctggacagccaatatggagcggatcatgaaagcccaggcgcttcgggacaactccaccatgggctatatgatggcgcaaagcacctgggatcatccctgatcaccccacttgttgttgacgctgcggcgaaggtgttggcgcgcccgatgtgtgcgggtgtgggcaccttgtgggtctgtttgtagacgccccgccggttttcggggctcccctgggggtccccaacctcttccgcgcgattgcgggtgaacgctcgcgtgtttgaaaacaggcggcggacccgtggtgtctctgatccccccgggggaggtccccggaaagttggtgtctaaaaccgctttaccgcccagatcacct

SEQ ID NO: 288 - DNA, 882 bp, Rattus norvegicus
  ref <308>: DATABASE ACCESSION NUMBER: Refseq / NM_057114
  ref <309>: DATABASE ENTRY DATE: 2003-01-13
ggctcacggttggttctgtttgtgagacctgtagctcgactctgctgatagcaagatgtcttcaggaaatgcaaaaattgggcatcctgctcccagcttcaaagccacggctgttatgccggatggacaattcaaagatatcagcctaagtgattacaaaggaaaatatgttgtattctttttttaccctcttgactttacttttgtgtgtcccacggagatcattgctttcagtgatagagcagaagaatttaagaaactcaactgccaagtgattggagcttctgtggattctcacttctgtcatctggcatggattaacacacccaagaaacaaggaggattgggacccatgaacattcccttggtatcagatcccaagcgcaccattgctcaggattatggagtcttaaaagctgatgaaggtatctctttcaggggcctctttattattgatgataaaggtatccttcgccagataacaataaatgatcttcctgttggccgctctgtggatgagattctgagactagtccaggccttccagttcactgacaaacatggtgaagtgtgcccagctggctggaaacctggcagtgataccatcaagcctgatgtcaataagagtaaagagtatttctctaagcagaagtgagcactggaccagttttctggcagacagctttgagcagccagaagaaatttgtactctacacatgacgtggtgtgattccagataagcctttcctacaagggctaggggtggttagcctttcttccactattggtaaggggcagaccatcttatatcagtcacagaaaccaacctgttaattctctctctctcttttttttttttaagtatctattaaacgtgaattc

SEQ ID NO: 289 - protein, 199 aa, Rattus norvegicus
  ref <308>: DATABASE ACCESSION NUMBER: Refseq / NP_476455
  ref <309>: DATABASE ENTRY DATE: 2003-01-13
MSSGNAKIGHPAPSFKATAVMPDGQFKDISLSDYKGKYVVFFFYPLDFTFVCPTEIIAFSDRAEEFKKLNCQVIGASVDSHFCHLAWINTPKKQGGLGPMNIPLVSDPKRTIAQDYGVLKADEGISFRGLFIIDDKGILRQITINDLPVGRSVDEILRLVQAFQFTDKHGEVCPAGWKPGSDTIKPDVNKSKEYFSKQK

SEQ ID NO: 290 - DNA, 937 bp, Homo sapiens
  ref <308>: DATABASE ACCESSION NUMBER: Refseq / NM_002574
  ref <309>: DATABASE ENTRY DATE: 2000-10-31
gttcttgcctggtgtcggtggttagtttctgcgacttgtgttgggactgctgataggaagatgtcttcaggaaatgctaaaattgggcaccctgcccccaacttcaaagccacagctgttatgccagatggtcagtttaaagatatcagcctgtctgactacaaaggaaaatatgttgtgttcttcttttaccctcttgacttcacctttgtgtgccccacggagatcattgctttcagtgatagggcagaagaatttaagaaactcaactgccaagtgattggtgcttctgtggattctcacttctgtcatctagcatgggtcaatacacctaagaaacaaggaggactgggacccatgaacattcctttggtatcagacccgaagcgcaccattgctcaggattatggggtcttaaaggctgatgaaggcatctcgttcaggggcctttttatcattgatgataagggtattcttcggcagatcactgtaaatgacctccctgttggccgctctgtggatgagactttgagactagttcaggccttccagttcactgacaaacatggggaagtgtgcccagctggctggaaacctggcagtgataccatcaagcctgatgtccaaaagagcaaagaatatttctccaagcagaagtgagcgctgggctgttttagtgccaggctgcggtgggcagccatgagaacaaaacctcttctgtattttttttttccattagtaaaacacaagacttcagattcagccgaattgtggtgtcttacaaggcaggcctttcctacagggggtggagagaccagcctttcttcctttggtaggaatggcctgagttggcgttgtgggcaggctactggtttgtatgatgtattagtagagcaacccattaatcttttgtagtttgtattaaacttgaactgag

SEQ ID NO: 291 - protein, 199 aa, Homo sapiens
  ref <308>: DATABASE ACCESSION NUMBER: Refseq / NP_002565
  ref <309>: DATABASE ENTRY DATE: 2000-10-31
MSSGNAKIGHPAPNFKATAVMPDGQFKDISLSDYKGKYVVFFFYPLDFTFVCPTEIIAFSDRAEEFKKLNCQVIGASVDSHFCHLAWVNTPKKQGGLGPMNIPLVSDPKRTIAQDYGVLKADEGISFRGLFIIDDKGILRQITVNDLPVGRSVDETLRLVQAFQFTDKHGEVCPAGWKPGSDTIKPDVQKSKEYFSKQK

SEQ ID NO: 292 - DNA, 787 bp, Rattus norvegicus; identical to SEQ ID NO: 48
  ref <308>: DATABASE ACCESSION NUMBER: Refseq / NM_031970
  ref <309>: DATABASE ENTRY DATE: 2002-11-05

SEQ ID NO: 293 - protein, 205 aa, Rattus norvegicus; identical to SEQ ID NO: 49
  ref <308>: DATABASE ACCESSION NUMBER: Refseq / NP_114176
  ref <309>: DATABASE ENTRY DATE: 2002-11-05

SEQ ID NO: 294 - DNA, 4185 bp, Rattus norvegicus
  ref <308>: DATABASE ACCESSION NUMBER: Refseq / NM_019276
  ref <309>: DATABASE ENTRY DATE: 2003-01-13
ctcgctccacagacaccgtcccgcggcagaggcgctttccaactcccgcgcagcagccgaaggacgcgctatgaagtcttatactccatatttcatgctcctgtggagtgctgttggaatagcaagggctgctaaaatcatcattgtgccgccaattatgtttgaaagccatttgtacattttcaagacactagcatcagccttgcacgagagaggccatcacactgtgttcctcctctcagaaggcagagacattgacccatctaatcactacagcctccagcgatacccagggatcttcaacagtaccacctcagatgctttcctgcagtctaaaatgcggaatattttctctggaagattgacagcagttgaactggttgacatactggatcactatactaagaattgtgacatgatggttggcaaccaagccctaatccagggtttgaaaaaagaaaagtttgacctgctactggttgaccccaatgatatgtgtggatttgtgatcgctcatcttttaggcgttaagtatgctgtgttttctactggcctttggtatcctgctgaagttggagcgcctgctcctttagcttatgtcccagagtttaactcactcctcacagaccgcatgaacttcctggaaaggatgaaaaatacaggcgtttacctcatatccagaatgggggttagctttctggttcttccgaaatatgaaaggataatgcagaagtacaacctgctccctgcaaagtccatgtatgatttggttcatgggtccagcttgtggatgttatgtactgacgtagcactggagtttccaaggcccaccctgcctaacgttgtatatgttggaggaatcctaacaaagccggccagcccactgccagaagatctgcagaggtgggtagatggtgctcaggagcatggctttgtcctggtatcttttggagctggtgtcaagtatctgtcagaagacattgctaacaaactggcaggagctctggggagattgcctcagaaagtgatttggaggttttctggaaccaaaccaaagaacctaggaaacaacactaagctcatagaatggttacctcaaaatgacctgcttggccattcaaacatcagagccttcctaagccatggtggtttgaacagtatatttgaaactatgtatcatggtgtccctgtagtaggaatcccactctttggagaccattatgatactatgactagagtacaggcgaaaggcatggggatcttgttagaatggaatacagttactgaaggggagctgtatgatgcactggtgaaagttatcaacaatcccagttatcggcagagggctcagaagttatcggaaattcataaggatcaacccggccaccctgtcaatcggactacctattggatagactacattcttcgccacgacggagcccatcacctccgttcggctgtccatcagatctccttctgtcagtattttctactggatattgcctttgtgcttctgcttggtgctgtcgcgctctacttcatagtgtcctatgtgacaaaatttatctatagaaaagtcaaaagtctgtgttctaggagtacgcacagcacagttaatggacactaccaaaatggaatcctcaatggcagatacaaaggaaatggtcatattaaacatgaaaaaaaggtaaaatgagccaacagcccaggcgacgggagcagatatgtccggtcattgagtttgtagtgctactctttagtctaacagctaccaaaactaaatgtcagcaaacaatcttaacaccctcatcagaccctgttaatgaaatccatggataaaatgtctgtacagagcacaaccccaagtgcaaaaatgtattttattctaacactgatgcagaaagaaggcagtgaaccatttagaagccttaattatttaaatcaattaagtgattgtgtcggacctgagttttaagtgttatgtatgtattacaggtgagggatggtgtttttctcttgataagatgcgtgtatgtttcccgtgtcgttgagttttagcttccatttgtatttagcttgtaacagtatttcaaagactgtttcctaaactcagtgtaacgaggcaagtgaaagatgggtggcacagtttttgtatttttgtttattatagacatttttatttttttcttttgtatatgcttttttcttaccaactatggatacttgcgaaggaaactcgtaatgaagtaactgagtaaaaaggttttcacatttttttctaatattttcctcctaccaataatttttctccagaagaattttctaattaggacaaagcaacaaagctcttacttttgttcaaagtactgaagagtacggctcaaacagcacttggaagcagagccatgtgcaaatgcttgtgtgacttggatatcccatcatttgagtttgaatattcaggtatcaacttctaaaattttagctttaaaataatcacctctcattccttttattatctgggtcacgatatagtacataggtgccaacatataattcctcttaagcagaacatttgcgtttctcctccttggtacctggtttgactgcaggagtttgaagtttgtcagcaaacaagacttcccatgcgacacagaaggtgacagaaattgtgccacccatttgtgcaatgagttcccgttccctcctcactccatcagcccaactcggtagcctttttggtcattgtgcttgacacgggacagtaagagtatctatttggaacagggagacgagtcacaacgttcataaattcaggacctccctgttgaaccacttactaaacggcaactgtaagcttattctacgtcactgtgtttactgagcatttgcactgcacatgcggagtgtgtgctttatttatttgtggttggaaatcccacccttgacacttgagagtagagaaatgaaatatttacttaacgtcactcaccaacctggcagagttgtgaaaaatctagaatgctgtaaatccttgtcatacactgtgacatacaactttgtgacactcccaccaggagccagtctcatgtacttagatatcaccagttttttaatgcacagtgcatacagcctactgctttctgaatacttgaaatggtatctgtacacaccagttagctactccttttcacaatcttatcacaatgttgccgttcaaagaggaaaaaagatcaggcaatgaatggtggggcagcagagcatagagtgtatgaacgagctgagtttacttttggcatttgataaagttggtaataggcactaactggatgattaaacataagttaatttccactgtgatttaaaaaaaacttaaaacaataaacaaagttgaaaatagaaaaatgttgttggaataaaatttttattcggattttattttacagtattatatataggtatatttacattataaacatgtttcttcttttaaaaaagaaaaagaaaagacacccatcatgagtagaactatgaaggaggaaaccaagaagatgttaatcacctaagtgggatatctgttcaaaaacaaaacaaaacaaaacaaaacaggtaaaggactgtagagatccgtgatagagtaagtgataaagacctttagctttcatgtgaaagaagtggatggtgagaaaagtgttctgtgttatcctctgtaaacatcaccagggtgtattagagaagatgacacaaaggggagaatattaggtgaatgctcaggaaagtctaatagcaaagacattagactagtggcaatggaaatcaagagaaactaaagatttgagaagattttaaaaatgtcaatttctgtgaaatctacttcagcatggccaacatagtgactttcaagacaggctgagctgtatagtgggaccctgtctaaaaatttcaaaagggaaaaatttaaaaaataagatatataaagagggctatctattaactagatggaatagttgggatctcttttcatccatgtgatacacacagcaaatgacaaatgttggtatggtagtcctataacattatcatggacttgaaaatttcttattttctcttattgtcagacattgtagtgttgtggtacaacttatgactcaagtttgagatgatgtttacataaagaaacatattccg

SEQ ID NO: 295 - protein, 541 aa, Rattus norvegicus
  ref <308>: DATABASE ACCESSION NUMBER: Refseq / NP_062149
  ref <309>: DATABASE ENTRY DATE: 2003-01-13
MKSYTPYFMLLWSAVGIARAAKIIIVPPIMFESHLYIFKTLASALHERGHHTVFLLSEGRDIDPSNHYSLQRYPGIFNSTTSDAFLQSKMRNIFSGRLTAVELVDILDHYTKNCDMMVGNQALIQGLKKEKFDLLLVDPNDMCGFVIAHLLGVKYAVFSTGLWYPAEVGAPAPLAYVPEFNSLLTDRMNFLERMKNTGVYLISRMGVSFLVLPKYERIMQKYNLLPAKSMYDLVHGSSLWMLCTDVALEFPRPTLPNVVYVGGILTKPASPLPEDLQRWVDGAQEHGFVLVSFGAGVKYLSEDIANKLAGALGRLPQKVIWRFSGTKPKNLGNNTKLIEWLPQNDLLGHSNIRAFLSHGGLNSIFETMYHGVPVVGIPLFGDHYDTMTRVQAKGMGILLEWNTVTEGELYDALVKVINNPSYRQRAQKLSEIHKDQPGHPVNRTTYWIDYILRHDGAHHLRSAVHQISFCQYFLLDIAFVLLLGAVALYFIVSYVTKFIYRKVKSLCSRSTHSTVNGHYQNGILNGRYKGNGHIKHEKKVK

SEQ ID NO: 296 - DNA, 1894 bp, Homo sapiens
  ref <308>: DATABASE ACCESSION NUMBER: Refseq / NM_003360
  ref <309>: DATABASE ENTRY DATE: 2000-11-01
ggctgaggacccgagggaggacacggttaaagcatcgctatcaactgcgtaacccagagagccctccttagccaacacgctaactccgaagcctccccttacgcccccgaaccaccgaaggcggcgacacctgattcagcgcacaaacacaggtcccttctgtcccggatacaattacgcggcagacacacactcagactcgcgcggggcagccaagagacgagctatgaagtcttacactccatatttcattctcctgtggagtgctgttgggatagcgaaggctgctaaaatcatcatcgtgccgccaattatgtttgaaagccatatgtacattttcaagacgctagcctcagccttgcacgagagaggccaccatacagtgttcctcctctctgaaggcagagacatcgccccatctaatcattacagcctccagcgctacccaggaatctttaacagtaccacctcagatgctttcctacagtccaagatgcggaatattttctctgggagattgccagcaatcgaactgtttgacatactggatcactatactaagaactgtgacatgatggttggcaaccatgccctgatccagggtctgaagaaagaaaaatttgacctgctgctggtggaccctaatgatatgtgtggatttgtgatagctcatcttttaggggttaaatatgctgtattttcaactggcctttggtatcctgctgaagtgggtgctcctgctccattagcatacgtcccagagtttaactcactcctcacagaccgcatgaacttgctgcaaaggatgaaaaataccggtgtttacctcatttccagattaggggtcagctttctggttcttcccaaatatgaaaggataatgcagaagtacaacctgctgccggagaagtccatgtatgatttggttcatgggtccagcctgtggatgctgtgtactgacgtagcactggaattcccaagacccactctgcctaatgttgtttatgtaggaggaatcctaaccaaaccagccagcccactaccagaagatctccaaagatgggtaaatggtgctaatgaacatggctttgtcttggtgtcttttggagctggtgtcaagtatctgtcagaagacattgctaacaaactggcaggagctctggggagattgcctcaaaaagtgatttggaggttttctggacccaaaccaaagaatctaggaaacaacactaaactcatagaatggttaccacaaaatgacctgcttgggcattcaaagattaaagccttcgtgagccatggtggtttgaacagtatttttgaaactatgtatcatggtgtgcctgtagtgggaattccagtctttggagaccattatgatactatgaccagagtacaggcaaaaggcatggggatattgctagaatggaagacagttactgaaaaagagctctatgaagcactagtgaaggttatcaataatcccagctaccgtcagagggctcagaagctttcggaaattcacaaggatcaacctggtcaccctgtcaatcgaactatctattggatagattatattattcgtcacaatggagcccatcacctacgtgccgctgtccatcagatctccttttgtcagtattttttactggatattgcctttgtgcttttgcttggtgctgccttgttatactttctcttgtcttgggtgacaaaatttatctacagaaaaatcaaaagtctgtggtctagaaataagcatagcacagttaatggacattaccacaatggaatcctcaatggcaagtacaaaagaaatggccatattaaacatgaaaagaaagtgaaatgagccgacagcccaggtgatagaaataaattggttcactcattg

SEQ ID NO: 297 - protein, 541 aa, Homo sapiens
  ref <308>: DATABASE ACCESSION NUMBER: Refseq / NP_003351
  ref <309>: DATABASE ENTRY DATE: 2000-11-01
MKSYTPYFILLWSAVGIAKAAKIIIVPPIMFESHMYIFKTLASALHERGHHTVFLLSEGRDIAPSNHYSLQRYPGIFNSTTSDAFLQSKMRNIFSGRLPAIELFDILDHYTKNCDMMVGNHALIQGLKKEKFDLLLVDPNDMCGFVIAHLLGVKYAVFSTGLWYPAEVGAPAPLAYVPEFNSLLTDRMNLLQRMKNTGVYLISRLGVSFLVLPKYERIMQKYNLLPEKSMYDLVHGSSLWMLCTDVALEFPRPTLPNVVYVGGILTKPASPLPEDLQRWVNGANEHGFVLVSFGAGVKYLSEDIANKLAGALGRLPQKVIWRFSGPKPKNLGNNTKLIEWLPQNDLLGHSKIKAFVSHGGLNSIFETMYHGVPVVGIPVFGDHYDTMTRVQAKGMGILLEWKTVTEKELYEALVKVINNPSYRQRAQKLSEIHKDQPGHPVNRTIYWIDYIIRHNGAHHLRAAVHQISFCQYFLLDIAFVLLLGAALLYFLLSWVTKFIYRKIKSLWSRNKHSTVNGHYHNGILNGKYKRNGHIKHEKKVK

SEQ ID NO: 298 - DNA, 625 bp, Rattus norvegicus
  ref <308>: DATABASE ACCESSION NUMBER: EMBL / AI236601
  ref <309>: DATABASE ENTRY DATE: 2000-03-03
tcatgaaatgtgtttgccattgtatgtgattctgtatgacagactgagtctatttatattttctttcttcctttttttttttttttaaagactgtctagacattttgtgtattatgagggaaaaaagaaaaagcttgagtctgtagtctctgaccctaaatgagagtgactttggtgacaggctcctgtggagttgggaccccactgagctctgtacagtattgctgctcatatgctgaggagggaggtcgtttgtcttctgaggacgtgaactgcactgacagcgctgggctcagtctgcagcagctgttcttgccaaggggttttctgtgttcttctgcatttgctcttcatttccgcatgtgtggccggggttgttcatatgagactgagtctgatctgcataagggctttccaaattaagtctgtccagtagagtgatttgctttattattaccaagaatacaacagctagtgaaccgtagcagcatgcgaagcagggctgtaactatcaccatacatgcactgtcccgtggaggtgtgacacgggagacgtgtggatcatgtgatcattgtgaacaccttgtgagctttaaaataaagtccaccctgtggtgtcatttct

SEQ ID NO: 299 - DNA, 355 bp, Rattus norvegicus
  misc_feature (1)..(355): n=a, c, g or t
  ref <308>: DATABASE ACCESSION NUMBER: EMBL / H31144
  ref <309>: DATABASE ENTRY DATE: 2000-03-04
aggaccaggcccccttttcccagggaacccctgtaggaatgtggagtgttggacagaatgtgacctgtggcttcactgtgaactcgggcttggctggtcttagatcttgtaantgtaaacagcctgaagtggctnagaaacagaagaggcgccaggatcttctctggcagggaccagggccccaggccccgggtgtggagggagaccccagcggcaccagtacttgtcctgtttgatgcctgttcctcccctgtgtccatttgatgtgttcccatcgcctntgttgccaaagctntgtcccagccatggatatctgcttcttccagagaaataaagtctgtttctattttacgtc

SEQ ID NO: 300 - DNA, 4548 bp, Homo sapiens
  ref <308>: DATABASE ACCESSION NUMBER: Refseq / NM_005781
  ref <309>: DATABASE ENTRY DATE: 2002-05-30
gaattccgggagcccgcggaggctgctgcagcagcccgaaccggcgtccgagtccggggaaggcccccgcgagcgcagggaggggccggaaagttccggcgaactgggggagcggcagtgggagagcgtcgggcgggaggcggtggtcctgggagcggccccggcgcccgaagccgccccgagctggtggggagggtcccggccggtggggccgggctggcgggggaggggcgcctgggggtgcaagaggcgaattggctgcccggggtgcaggagggacaggtggtgcgggctgtcaggaaacctacctgaacgggaaggagccccaggagggagagggacccggcgagggctcaggacccggaggcgccggcggaggaggaggtggtgactggcaggcccgggccccacggtacctccggggctgaaggggacgcaggatgtaggggcatggggagtcgggcgcagaagagtgcggggaacgctgagctctgggagccactgcctgagggcaggccgcggccggcgggaacctcttctgccgtctcagcctgggcgtcgctgaagctgtgtctgcggggaggcagcggaaggcggcagaggctgggaggcggcagaatgcagccagaggagggcacaggctggctgctggagctgctgtccgaggtgcagctgcaacagtacttcctgcggctccgagatgacctcaacgtcacccgcctgtcccactttgagtacgtcaagaatgaggacctggagaagatcggcatgggtcggcctggccagcggcggctgtgggaggctgtgaagaggaggaaggccttgtgcaaacgcaagtcgtggatgagtaaggtgttcagtggaaagcgactggaggctgagttcccacctcatcactctcagagcaccttccggaagacctcgcccgcccctgggggcccagcaggggaggggcccctgcagagcctcacctgcctcattggggagaaggacctgcgcctcctggagaagctgggtgatggttcctttggcgtggtgcgcaggggcgagtgggacgcgccctcagggaagacggtgagtgtggctgtgaagtgcctgaagcccgatgtcctgagccagccagaagccatggacgacttcatccgggaggtcaatgccatgcactcgctcgaccaccgaaacctcatccgcctctacggggtggtgctcacgccgcccatgaagatggtgacagagctggcacctctgggatcgttgttggaccggctacgtaagcaccagggccacttcctcctggggactctgagccgctacgctgtgcaggtggctgagggcatgggctacctggagtccaagcgctttattcaccgtgacctggctgcccgcaatctgctgttggctacccgcgacctggtcaagatcggggactttgggctgatgcgagcactacctcagaatgacgaccattacgtcatgcaggaacatcgcaaggtgcccttcgcctggtgtgcccccgagagcctgaagacacgcaccttctcccatgccagcgacacctggatgttcggggtgacactgtgggaaatgttcacctacggccaggagccctggatcggcctcaacggcagtcagatcctgcataagatcgacaaggagggggagcggctgccccggcccgaggactgtccccaggacatctacaacgtcatggtccagtgctgggctcacaagccagaggacagacccacgtttgtggccctgcgggacttcctgctggaggcccagcccacagacatgcgggcccttcaggactttgaggaaccggacaagctgcacatccagatgaatgatgtcatcaccgtcatcgagggaagggccgagaactactggtggcgtggccagaacacacggacgctgtgtgtggggcccttccctcgcaacgtggtgacctccgtggccggcctgtcggcccaggacatcagccagcccctgcagaacagcttcatccacacagggcatggcgacagtgacccccgccactgctggggcttcccggacaggattgacgaactgtatctgggaaaccccatggacccccccgacctcctgagcgtggaactgagcacctcccggcccccccagcatctaggaggggtgaaaaaaccaacctatgaccctgtgagcgaggaccaagaccccttgtccagcgacttcaagaggctgggcctgcggaagccaggcctgccccgagggctgtggctggcgaagccctcggcgcgggtgccgggcaccaaggccagccgaggcagcggggctgaggtcacgctcatcgacttcggtgaggagcccgtggtcccggccctacggccctgcccgccctccctggcgcagctggccatggacgcctgctccctgctggacgagaccccgcctcagagccccacgcgggcactgccccggcccctgcaccccacgcctgtggtggactgggacgcacgcccgctgccccccccgcccgcctatgacgacgtggcccaggatgaggatgactttgagatctgctccatcaacagcaccctcgtgggcgcgggggtccctgccgggcccagccagggccagaccaactacgcctttgtgcctgagcaggcgcggccgccccctcccctggaggacaacctgttcctcccgccccagggtgggggcaagccgcccagctccgcacagaccgcagagatcttccaggcgctacagcaggagtgcatgaggcaactgcaggctccgggctccccggccccctctcccagcccggggggtgacgacaagccccaggtgcctcctcgggtacccatcccccctcggcccacgcgcccacacgtccagctgtctccagcccccccgggcgaggaggagaccagccagtggcctggacctgcttcccctccccgggtgcctccgcgggagcccctgtcccctcaaggctcgaggacacccagccccctggtaccacctggcagctccccgctgccaccccggctctcaagctcacctgggaagaccatgcccaccacccagagctttgcctcagaccccaagtacgccaccccccaggtgatccaggcccctggcgcgggtggtccctgcatcctgcccatcgtccgggatggcaagaaggtcagcagcacccactattacttgctgcccgagcgaccatcctacctggagcgctaccagcgcttcctgcgtgaggcccagagccccgaggagcctacccccctgcctgtgcctctgctgctgcccccacccagcaccccagcccccgccgcccccacggccaccgtgcggccgatgccccaggctgccttggaccccaaggccaacttctccaccaacaacagcaacccaggggcccggccaccacccccgagggccactgctcggctgccacagaggggctgccctggcgatgggccagaggcgggccggccagcagacaagatccagatggccatggtgcatggggtgaccacagaggagtgccaggcggccctgcagtgccacggctggagcgtgcagagggctgcccagtatctgaaggtggagcagctcttcgggctgggtctgcggcccagaggggagtgccacaaagtgctggagatgttcgactggaacctggagcaggccggctgccaccttctgggctcctggggccctgcccaccacaagcgctgagatgcgtctggagagccagagggcctgcctgaaggaatcacctgagcctgtccgtccaccaggagtggggagatgcccccatccagtcctggaggacccgctgctcctgctgctcccggggatggagcaaggccaaggctgcgggaggctgggagccctgccctgcccatccctcccgcaccagtgctgtccctgcacactttggttcagtcccggtgcccctgccaagatgtggaaggggccgggtgaagacaggcttgagggccgccccagcaggctctgggtatgacctgcctctggccctggtcctgggcggggcctgtgggtggagtagtacccccaggccctgccctgggtgacagactgggaggaaaccaggctggacctgggcaggcgggatgtgttggccacagggagaggcggaccggcacccggtgggacctcctaggactgggccttcttccagggggcccctggcagcagctggggtgtcgggcagaatgtgacttgtggccttaccatggacttgaatgggacttggctggcctcaggatcttgtgcctggaaatagcctgaggtggctcaggaagcggagaaagggtgccagaccattctctggcggggaccagggcccaaggccagggctggaaggagaccaaggggcagcccctggaggacatcagtgcttcctcttccacccaattcccccacgcggttccatgttttcccaccagcctgttgggcgaagttgctgctccggcattcagtcctgcttcttccagagaaataaagttagtttctattttatgttaaaaaaaa

SEQ ID NO: 301 - protein, 1036 aa, Homo sapiens
  ref <308>: DATABASE ACCESSION NUMBER: Refseq / NP_005772
  ref <309>: DATABASE ENTRY DATE: 2002-05-30
MQPEEGTGWLLELLSEVQLQQYFLRLRDDLNVTRLSHFEYVKNEDLEKIGMGRPGQRRLWEAVKRRKALCKRKSWMSKVFSGKRLEAEFPPHHSQSTFRKTSPAPGGPAGEGPLQSLTCLIGEKDLRLLEKLGDGSFGVVRRGEWDAPSGKTVSVAVKCLKPDVLSQPEAMDDFIREVNAMHSLDHRNLIRLYGVVLTPPMKMVTELAPLGSLLDRLRKHQGHFLLGTLSRYAVQVAEGMGYLESKRFIHRDLAARNLLLATRDLVKIGDFGLMRALPQNDDHYVMQEHRKVPFAWCAPESLKTRTFSHASDTWMFGVTLWEMFTYGQEPWIGLNGSQILHKIDKEGERLPRPEDCPQDIYNVMVQCWAHKPEDRPTFVALRDFLLEAQPTDMRALQDFEEPDKLHIQMNDVITVIEGRAENYWWRGQNTRTLCVGPFPRNVVTSVAGLSAQDISQPLQNSFIHTGHGDSDPRHCWGFPDRIDELYLGNPMDPPDLLSVELSTSRPPQHLGGVKKPTYDPVSEDQDPLSSDFKRLGLRKPGLPRGLWLAKPSARVPGTKASRGSGAEVTLIDFGEEPVVPALRPCPPSLAQLAMDACSLLDETPPQSPTRALPRPLHPTPVVDWDARPLPPPPAYDDVAQDEDDFEICSINSTLVGAGVPAGPSQGQTNYAFVPEQARPPPPLEDNLFLPPQGGGKPPSSAQTAEIFQALQQECMRQLQAPGSPAPSPSPGGDDKPQVPPRVPIPPRPTRPHVQLSPAPPGEEETSQWPGPASPPRVPPREPLSPQGSRTPSPLVPPGSSPLPPRLSSSPGKTMPTTQSFASDPKYATPQVIQAPGAGGPCILPIVRDGKKVSSTHYYLLPERPSYLERYQRFLREAQSPEEPTPLPVPLLLPPPSTPAPAAPTATVRPMPQAALDPKANFSTNNSNPGARPPPPRATARLPQRGCPGDGPEAGRPADKIQMAMVHGVTTEECQAALQCHGWSVQRAAQYLKVEQLFGLGLRPRGECHKVLEMFDWNLEQAGCHLLGSWGPAHHKR

SEQ ID NO: 302 - DNA, 664 bp, Rattus norvegicus
  ref <308>: DATABASE ACCESSION NUMBER: Refseq / NM_145878
  ref <309>: DATABASE ENTRY DATE: 2002-11-05
ggcacgagtctccttgctgcttttgtgctctcccgctcgccatggccagccttaaggacctggaagggaagtggcgtctggtggaaagccacgggtttgaggactacatgaaggaactaggagtagggctggctcttaggaagatgggtgccatggccaaaccagactgcatcattaccctcgacaacaacaacctcaccgtcaaaactgagagcacagtgaagacgaccgtgttttcttgcaccttgggagagaagtttgatgaaaccacagctgatggcaggaaaactgagacggtctgcaccttcacagacggtgccctggtccagcaccagaagtgggaagggaaagaaagcacgataacgagaaaactgaaggacgggaagatggtggtggagtgcgtcatgaacaatgccatctgtactcgggtctatgagaaggtacaatgaggactggctaactcgtcatcctggacagcagtcagctggctgagggaatagctcaattcaatgagcaggtcgtacagaaccacactgcttcacttctttggttttatttttcatgacttttcatcatagacactttacccgaaacccatgtcagaccgttggtttacccaggatcattcctttggttagtaaataaatgcgtttgtgctaattca

SEQ ID NO: 303 - protein, 135 aa, Rattus norvegicus
  ref <308>: DATABASE ACCESSION NUMBER: Refseq / NP_665885
  ref <309>: DATABASE ENTRY DATE: 2002-11-05
MASLKDLEGKWRLVESHGFEDYMKELGVGLALRKMGAMAKPDCIITLDNNNLTVKTESTVKTTVFSCTLGEKFDETTADGRKTETVCTFTDGALVQHQKWEGKESTITRKLKDGKMVVECVMNNAICTRVYEKVQ

SEQ ID NO: 304 - DNA, 1009 bp, Rattus norvegicus
  ref <308>: DATABASE ACCESSION NUMBER: Refseq / NM_021989
  ref <309>: DATABASE ENTRY DATE: 2003-01-13
gaattccggtagaaggcagcggaggagccgagccgggctgcgctcgctcgccgccccctagcctctttcttctccgccgggtgcactgccctgcgctgtcccctcgcctcttcgcccccttgacaaagaggacagaaagtttgcgcgggggagcgggccaggtgaggaggggcgtgccggcgccagcccgcgccccagcagccggacccaggcccctagcgcgcccgccatgggcgccgcggcccgcagcctccggctggcgctcggcctcctgctgctggccacgctgctgcgcccggccgacgcctgcagctgctccccggtgcacccgcaacaggcgttttgcaatgcagacgtagtgatcagggccaaagcagtgagcgagaaggaggtggattccgggaatgacatctatggcaaccccatcaagaggattcaatatgagatcaagcagataaagatgttcaaaggacctgacaaggacatcgaatttatctacacggccccctcctcagcagtgtgcggggtctcgctggacgttggaggaaagaaggaatatctaattgcagggaaggcggaaggagatggcaagatgcacattaccctctgtgactttattgtgccctgggacacgcttagcatcacccagaagaagagcctaaaccacaggtaccagatgggctgcgagtgcaagatcacacgctgccctatgatcccatgctacatctcctccccggatgagtgcctctggatggactgggtcacagagaagagcatcaatgggcaccaggccaagttctttgcctgcatcaagagaagtgatggttcttgcgcgtggtaccgcggggcggcacccccgaagcaggagtttcttgacatcgaggacccgtaagcaggctgacagagccccctgtggccaattgaaaagcctctgagggttcagactggtccagctttgacatcccttcctggaaacagcatgaataaaacatcaatcatcccggaattc

SEQ ID NO: 305 - protein, 220 aa, Rattus norvegicus
  ref <308>: DATABASE ACCESSION NUMBER: Refseq / NP_068824
  ref <309>: DATABASE ENTRY DATE: 2003-01-13
MGAAARSLRLALGLLLLATLLRPADACSCSPVHPQQAFCNADVVIRAKAVSEKEVDSGNDIYGNPIKRIQYEIKQIKMFKGPDKDIEFIYTAPSSAVCGVSLDVGGKKEYLIAGKAEGDGKMHITLCDFIVPWDTLSITQKKSLNHRYQMGCECKITRCPMIPCYISSPDECLWMDWVTEKSINGHQAKFFACIKRSDGSCAWYRGAAPPKQEFLDIEDP

SEQ ID NO: 306 - DNA, 1370 bp, Rattus norvegicus
  ref <308>: DATABASE ACCESSION NUMBER: Refseq / NM_017253
  ref <309>: DATABASE ENTRY DATE: 2003-01-14
gcaaccccgggctctcggcagcgccgctgtgccacgcatttccacgcgcccgcagctttgtcatggcctacttgtcccgggcaactgcaaccctggcccgccaggactgcagtaatggatgttcggcatcgtatgctgaagaagaagaattagaagcttcgaccgagtcgtatgatgaagaaggaggatcagaagcttcgacccagacgtttagggccaaagatctcattatcacaaaagccgatgtcttaaaaaagaagcccgaccccagctcgctggtctttggagcttcgttcactgaccacatgctgatggtggagtggacctccaagtatggatgggataagcctcacatcaagccttttgaaaacttgtccatacatcccgctgcctctgttttgcactatgctgtggaattgtttgaaggcttgaaggcttttcggggagttgataacaagatccgattgttccggccggacctcaacatgaaaagaatgtgccgatctgccgtgaggaccactctgccggagtttgacaaggaggagcttctgcaatgcgttcttcagctcatacagctcgaccgagagtgggtcccctactcaacctctgccagtctgtacatccgccccacattcatcgggattgagccatcgcttggagtcaagaagccttctaaagctctgctctttgtgattttgagccccgtgggatcttatttttctaatgggaccttttctccggtgtccctgtgggccaacccaaagttcgtcagatcctggaaaggtgggactggagacttcaagatgggctgcaactatggatcttcccttctggcgcagtgtgaggcggcagagaacggctgtcaccaggtcctgtggctgtacggcaaggaaaaccggataactgaagtgggcacgatgaatctcttcctctactggataaacaaagatggagaagaagaactggcgacgcctccgctagatggcgtcattctcccaggagtcactcggcagagcatcctggagctgggagaagagtggggcgagtttaaggtgtgcgagagacacatcaccatggatgacctgtccaccgccctggaggagaacagagtgaaggagatgttcggctcggggacagcctgcgttgtctgcccagttgccagtattctgtacaagggccagatgctgcacattccaaccatggagaatggccacaagctttcaagtcgcatcatggcaaagttgactgatatccagtatggacggatcaagagcgaatggacactggagttgccctaatgggagagctcagggtatcggtgacggggtgccacagaagaccgactcctgtcctcgagctgggacaacctc

SEQ ID NO: 307 - protein, 411 aa, Rattus norvegicus
  ref <308>: DATABASE ACCESSION NUMBER: Refseq / NP_058949
  ref <309>: DATABASE ENTRY DATE: 2003-01-14
MAYLSRATATLARQDCSNGCSASYAEEEELEASTESYDEEGGSEASTQTFRAKDLIITKADVLKKKPDPSSLVFGASFTDHMLMVEWTSKYGWDKPHIKPFENLSIHPAASVLHYAVELFEGLKAFRGVDNKIRLFRPDLNMKRMCRSAVRTTLPEFDKEELLQCVLQLIQLDREWVPYSTSASLYIRPTFIGIEPSLGVKKPSKALLFVILSPVGSYFSNGTFSPVSLWANPKFVRSWKGGTGDFKMGCNYGSSLLAQCEAAENGCHQVLWLYGKENRITEVGTMNLFLYWINKDGEEELATPPLDGVILPGVTRQSILELGEEWGEFKVCERHITMDDLSTALEENRVKEMFGSGTACVVCPVASILYKGQMLHIPTMENGHKLSSRIMAKLTDIQYGRIKSEWTLELP

SEQ ID NO: 308 - DNA, 1123 bp, Rattus norvegicus
  ref <308>: DATABASE ACCESSION NUMBER: Refseq / NM_012895
  ref <309>: DATABASE ENTRY DATE: 2003-01-15
gggattagagtcaagatggcagctgcggacgagccgaagcccaagaagctcaaggtggaagcgccagaagcgctgagtgaaaatgtgctgtttggaatggggaatcctcttcttgacatctctgctgtggtagacaaagatttccttgataagtattctctgaaaccaaacgaccagatcttggccgaagacaagcacaaggaattgtttgatgaacttgtaaaaaaattcaaagttgaatatcatgccggtgggtccacgcagaattcaatgaaagtggctcagtggatgattcaggagccacacagagcagcaacgttcttcggatgcattgggatagataagttcggggagatcctgaagagcaaagccgcagatgcacacgtggacgcccattactatgagcagaacgagcagcccacaggaacgtgcgctgcatgcatcaccggtggcaaccggtctcttgttgctaaccttgctgccgccaattgttataagaaagaaaagcaccttgatctggagaacaactggatgttggtagagaaagccagagtttactacatagctggcttctttctcaccgtctccccagagtcagtgttgaaagtggctcgctatgctgccgagaacaacaggaccttcactcttaacctgtccgcaccgttacttagccagttcttcaaggaagccttgatggaagtcatgccttatgttgacatcctctttggaaatgagacggaggctgccacttttgctagagagcaaggctttgagactaaagacattaaagaaatagccagaaagacgcaggctcttccaaaggtgaactcgaagaggcagaggaccgtgatcttcacccaagggagagatgacactatagtagctacaggaaatgatgtcactgctttccctgtcttggatcaaaaccaggaagagatcgttgacaccaatggagctggagatgcatttgtaggagggtttctgtctcagctggtctccaacaagcctctgactgaatgcatccgggccgggcactatgcagcgagcgtcatcattaggcgaactggctgtacttttcctgagaagccaaacttccactgacggaagaaaagcaactcaggca

SEQ ID NO: 309 - protein, 361 aa, Rattus norvegicus
  ref <308>: DATABASE ACCESSION NUMBER: Refseq / NP_037027
  ref <309>: DATABASE ENTRY DATE: 2003-01-15
MAAADEPKPKKLKVEAPEALSENVLFGMGNPLLDISAVVDKDFLDKYSLKPNDQILAEDKHKELFDELVKKFKVEYHAGGSTQNSMKVAQWMIQEPHRAATFFGCIGIDKFGEILKSKAADAHVDAHYYEQNEQPTGTCAACITGGNRSLVANLAAANCYKKEKHLDLENNWMLVEKARVYYIAGFFLTVSPESVLKVARYAAENNRTFTLNLSAPLLSQFFKEALMEVMPYVDILFGNETEAATFAREQGFETKDIKEIARKTQALPKVNSKRQRTVIFTQGRDDTIVATGNDVTAFPVLDQNQEEIVDTNGAGDAFVGGFLSQLVSNKPLTECIRAGHYAASVIIRRTGCTFPEKPNFH

SEQ ID NO: 310 - DNA, 1860 bp, Homo sapiens
  ref <308>: DATABASE ACCESSION NUMBER: Refseq / NM_006721
  ref <309>: DATABASE ENTRY DATE: 2001-02-03
cgccttccctccaatcagcaccggggccggctagccaggggccggccgcgcggggtgtgtgaggacgcgctcccagtcgctgagtgcctgagccgggaagcagttgctgtggtacctgcgctgcccgagcggagtggatggcagaggtgggctgtagagccaaagtggggtgggagcgcgaagatggcagctgctgaggaggagccgaagcccaaaaagctgaaggtggaggcgccgcaagcgctgagagaaaatattctctttggaatgggaaatcctctgcttgacatctctgctgtagtggacaaagatttccttgataagtattctctgaaaccaaatgaccaaatcttggctgaagacaaacacaaggaactgtttgatgaacttgtgaaaaaattcaaagtcgaatatcatgctggtggctctacccagaattcaattaaagtggctcagtggatgattcaacagccacacaaagcagcaacattttttggatgcattgggatagataaatttggggagatcctgaagagaaaagctgctgaagcccatgtggatgctcattactacgagcagaatgagcagccaacaggaacttgtgctgcatgcatcactggtgacaacaggtccctcatagctaatcttgctgctgccaattgttataaaaaggaaaaacatcttgatctggagaaaaactggatgttggtagaaaaagcaagagtttgttatatagcaggcttttttcttcacgtttccccagagtcagtattaaaggtggctcaccatgcttctgaaaacaacaggattttcactttgaatctatctgcaccgtttattagccagttctacaaggaatcattgatgaaagttatgccttatgttgatatactttttggaaatgagacagaagctgccacttttgctagagagcaaggctttgagactaaagacattaaagagatagccaaaaagacacaagccctgccaaagatgaactcaaagaggcagcgaatcgtgatcttcacccaagggagagatgacactataatggctacagaaagtgaagtcactgcttttgctgtcttggatcaagaccagaaagaaattattgataccaatggagctggagatgcatttgttggaggttttctgtctcaactggtctctgacaagcctctgactgaatgtatccgtgctggccactatgcagcaagcatcataattagacggactggctgcacctttcctgagaagccagacttccactgatggaagagctgaaaacacaagcccaggagtgcagacactgccctaattgcttcctgacaattcccatattaataaagaagaaaattatctgccattttttcctactataataatgctgaatcttaatttagagggtacaagggtatggtaatgcttgtagaatctttattatctcaacaatctaaaaaatgatgtttatttccatagtttgatagtgccacttaaatgccaattaaacaagaatataacatttcaatagaaatttttatttcattttcaattactttgtaaattcgtgtgtatttagtacactgatttgttttttacatttctgctttgaatgcagatgcaatttaatataatagattttttaatgaattaatcttaacatagtaatctttagctttttatacaaatatatttaatttaggagtatatgtgtgtctatacacacacatacataaatataccacatatacacctgatagtcaaataaggtacagaaattttatcttgtcaattatgccaaataatctctttaatgtgcactcaacatgtaataaactttggataattaaaaaaaaaaaa

SEQ ID NO: 311 - protein, 362 aa, Homo sapiens
  ref <308>: DATABASE ACCESSION NUMBER: Refseq / NP_006712
  ref <309>: DATABASE ENTRY DATE: 2001-02-03
MAAAEEEPKPKKLKVEAPQALRENILFGMGNPLLDISAVVDKDFLDKYSLKPNDQILAEDKHKELFDELVKKFKVEYHAGGSTQNSIKVAQWMIQQPHKAATFFGCIGIDKFGEILKRKAAEAHVDAHYYEQNEQPTGTCAACITGDNRSLIANLAAANCYKKEKHLDLEKNWMLVEKARVCYIAGFFLHVSPESVLKVAHHASENNRIFTLNLSAPFISQFYKESLMKVMPYVDILFGNETEAATFAREQGFETKDIKEIAKKTQALPKMNSKRQRIVIFTQGRDDTIMATESEVTAFAVLDQDQKEIIDTNGAGDAFVGGFLSQLVSDKPLTECIRAGHYAASIIIRRTGCTFPEKPDFH

SEQ ID NO: 312 - DNA, 916 bp, Rattus norvegicus
  misc_feature (1)..(916): n=a, c, g or t
  ref <308>: DATABASE ACCESSION NUMBER: EMBL / X07729
  ref <309>: DATABASE ENTRY DATE: 1997-12-15
gattgaagaggagttgggggaggaggctcgcttcgcgggacacaacttccggaatcccagtgtgctgtgaccccctgcttgcctgaacaccggaacatcatctcattctcctggagcctctttcttgctgtcccgacccgccatagttaccttgataccttgagccccaagtcacccagaacacctcgactcacctgctctggctgttcttggcttccacaaccccttgctgtctcctactcttcctcctctctgggccccatttttggggggattccagtatgcccactttcccttctattctctctaatcttaaaaaaaaaaaaaaaatgacgactagaagaagcggtccacagaagaaccgccagcgtccgacaggagcttcaggattggtgtgttggggcgtttaaagtggggccacgtggcacgtgtgcttccctgccatccatggtgtgttaagccttgaactatgcacagagctggtgtttggggagtgctggatgtgtgtgtgttcacatttgtttgtttgtttatttatttattcacttatttatttctcagcctgtcagtcgtctgccattactcttacagtctgaaagcatcagtattttcacgtggttccatttcaagatgacctaggatgggaggttttgttagcatgggaaaggtcacagaaaggttagcaatggtttttcatttggtgcactaactgaagctcggtactttacagaatggggctgtgtacccggggacttttctcctataactctctcccccagccctaggttcctcagtctttttctccggctgcaccagagcgctgcctcattcccccgtgccatgtcccacagttgccactgtctctgtggctttgaaatgaccaccactattaaagtctgaaccacagtgcacaccn

SEQ ID NO: 313 - DNA, 847 bp, Rattus norvegicus
  ref <308>: DATABASE ACCESSION NUMBER: Refseq / NM_012777
  ref <309>: DATABASE ENTRY DATE: 2003-01-14
ctcgcaggattctcctgtggaaactgccttcatcgtatctgagaggcctctcctgcagccgccaaccccaagatggcgaccatgctgttgctcctggccacactggcaggtctcttcaccacaaccgaaggacaaagcttccatcttgggaaatgcccatctcctccggtgcaagagaatttcgatgtgaaaaagtatcttggaagatggtacgaaatcgagaagatcccggtgagctttgagaaaggaaactgcattcaagccaactactcgctgatggagaacggaaacatcaaagtgctaaacaaggagctgcgtcctgacggaaccctgaaccaagttgagggtgaagccaaacagagcaacatgtcagagccagccaagctggaagtccagttcttctcgttgatgccaccggcaccctactggatcctggccacggattacgagagctatgccctcgtgtattcctgcaccaccttcttctggttcttccacgtggactatgtttggatcctgggaagaaatccttacctccctccagaaacaataacctacctaaaatatatccttacttctaatgacatcgacatcgccaaaataacaacaaaagaccaagcaaactgcccggacttcctgtaaaggggggtgggcaaccgctccaggttatttcttcgctttggctccctggccccacccccactcctcatcaggaccgagcaaccccgccagcactagagggaaagtattgctatagaagccaatggaggggactgatgggaaggtggcccaaacccaagaccccacattgttactcgccagcccaataataaacattttgctgatc

SEQ ID NO: 314 - protein, 189 aa, Rattus norvegicus
  ref <308>: DATABASE ACCESSION NUMBER: Refseq / NP_036909
  ref <309>: DATABASE ENTRY DATE: 2003-01-14
MATMLLLLATLAGLFTTTEGQSFHLGKCPSPPVQENFDVKKYLGRWYEIEKIPVSFEKGNCIQANYSLMENGNIKVLNKELRPDGTLNQVEGEAKQSNMSEPAKLEVQFFSLMPPAPYWILATDYESYALVYSCTTFFWFFHVDYVWILGRNPYLPPETITYLKYILTSNDIDIAKITTKDQANCPDFL

SEQ ID NO: 315 - DNA, 497 bp, Rattus norvegicus
  ref <308>: DATABASE ACCESSION NUMBER: EMBL / AA875286
  ref <309>: DATABASE ENTRY DATE: 2000-03-03
atcttcattggcctcatcccgcatgaccagagcaactttgtcaatggtatccgtcgtgtcattgccaaccagcagcaggtcctgcagcgaagcctggagcaggagcagcagcagcgagggatgggtggctagtggactcctaggctgggcaggtcacagtcccagacgaggccccagtggagactggtgagcggcacttgtgtttgtgggaagcagcagggtgaccctggccttagacctgctgcatgagtcactgcctcctgttaccaatatccctggcaaggaatgggtgccagggccacagcttaagtactgggggggcagggggcagtttcactagtagaagccacccctcctactgcctcccaggtcagatgcttctgagcaggggctcctggggactgtacctgcccagcaacctggaggacagcgtcctgaggtctcccaaggatggtccttgcccctgtatgtttccctaataaagccttttaacccac

SEQ ID NO: 316 - DNA, 318 bp, Rattus norvegicus
  ref <308>: DATABASE ACCESSION NUMBER: Refseq / NM_012839
  ref <309>: DATABASE ENTRY DATE: 2003-01-14
atgggtgatgttgaaaaaggcaagaagatttttgttcaaaagtgtgcccagtgccacactgtggaaaaaggaggcaagcataagactggaccaaacctccatggtctgtttgggcggaagacaggccaggctgctggattctcttacacagatgccaacaagaacaaaggtatcacctggggagaggataccctgatggagtatttggaaaatcccaaaaagtacatccctggaacaaaaatgatcttcgctggaattaagaagaagggagaaagggcagacctaatagcttatcttaaaaaggctactaatgaataa

SEQ ID NO: 317 - protein, 105 aa, Rattus norvegicus
  ref <308>: DATABASE ACCESSION NUMBER: Refseq / NP_036971
  ref <309>: DATABASE ENTRY DATE: 2003-01-14
MGDVEKGKKIFVQKCAQCHTVEKGGKHKTGPNLHGLFGRKTGQAAGFSYTDANKNKGITWGEDTLMEYLENPKKYIPGTKMIFAGIKKKGERADLIAYLKKATNE

SEQ ID NO: 318 - DNA, 891 bp, Homo sapiens
  ref <308>: DATABASE ACCESSION NUMBER: Refseq / NM_014380
  ref <309>: DATABASE ENTRY DATE: 2003-01-08
accccatcccccactcctataccggtcctccattttggtgcctgcaaagctctgggaaagaatcccgggaaacgaaaaatggtgggtttgggggaagggaggtaaggggagaaagctggagggaggggctttaattggaggccccgtagaggacgcgcggaacttctaaggtgggaaaaaacgaaattaaaaaatcctttgatatcagggctctgaatcctgctggtcagagcaccaagcattcagtctctctccttgcctttgtcttacttgtgttcaaagaaaaacaaccagaaaaaaaaaatctcatcatggcaaatattcaccaggaaaacgaagagatggagcagcctatgcagaatggagaggaagaccgccctttgggaggaggtgaaggccaccagcctgcaggaaatcgacggggacaggctcgccgacttgcccctaattttcgatgggccatacccaataggcagatcaatgatgggatgggtggagatggagatgatatggaaatattcatggaggagatgagagaaatcagaagaaaacttagggagctgcagttgaggaattgtctgcgtatccttatgggggagctctctaatcaccatgaccatcatgatgaattttgccttatgccttgactcctgccatttatcatgagattaatactgtgattcccgctgttttctttttccttgcattttcctaatatgcctttactgatccgtttgctgtgaaccctatgttatttccatgtgtcaagtgggtcttgtgttgccagcttctatttgaagattgcctttgcactcagtgtaagtttctgtcagcagtagtttcacccatttgcatggaaaaatttaaagctaataaagcaatttaaaaagc

SEQ ID NO: 319 - protein, 111 aa, Homo sapiens
  ref <308>: DATABASE ACCESSION NUMBER: Refseq / NP_055195
  ref <309>: DATABASE ENTRY DATE: 2003-01-08
MANIHQENEEMEQPMQNGEEDRPLGGGEGHQPAGNRRGQARRLAPNFRWAIPNRQINDGMGGDGDDMEIFMEEMREIRRKLRELQLRNCLRILMGELSNHHDHHDEFCLMP

SEQ ID NO: 320 - DNA, 2492 bp, Rattus norvegicus
  ref <308>: DATABASE ACCESSION NUMBER: EMBL / X94551
  ref <309>: DATABASE ENTRY DATE: 1997-01-07
ccgggcaggtgacaaagccgtggagatctatgccagtgtggcccagctgacccctgtggactcggaggctctagagagtgaagcaaataaaatcaagaaagaagctgcagatctggaccgtctgattgaccagaagctaaaagattacgaggaccttagggaagacatgcgaggaaaggaacatgaagtaaagaaccttctagagaaggggaaagccgaacagcagaccgctgaccaactcctagctcgagccgacgctgccaaggctcttgctgaagaagctgctaaaaagggacgcaataccttacaagaagctaacgacattctcaacaacctgaaagattttgatagacgagtgaacgataacaagacagctgctggaagaagctctaagcgaattcccgccatcaaccggaccatagctgaagccaatgagaagacaagggaggcacagctggcgctgggcaatgcagcagctgacgccacggaggccaagaacaaagcccacgaggcggagaggattgccagtggcgtgcagaagaatgccaccagtaccaaggcggatgcggagagaaccttctcggaagagacagacctggataacgaggtgaatggcatgttgaggcagctagaggaagcggagaatgagctgaagaggaagcaagatgatgccgaccaggacatgatgatggcgggaatggcttcacaggctgctcaggaagctgaacttaatgccagaaaagccaaaaactctgtcagcagcctcctcagccaactgaccgacctcttggagcagctgggacagctggacaccgtggacctgaacaagctcaacgagatcgaaggctctctgaacaaagccaaagacgaaatgaaggtgagcgacctggacaggaaggtgtccaacctggagaacgaggcccggaagcaggaggcagccatcttggactatgaccgagacatagcagagatcataaaggacattcacaacctggaggacatcaagaagacactaccaacaggctgctttaacaccccgtccatcgagaaaccctagtggtgggagggctgtaaggcagtgtccctgacagggggccctgtgaggcctcggtgccttgacagcgaaaaaattacacttttcagaccccccccacttctctgctgctctctgtcactgtccttttgacccaagaaaagtcagagtttaaagagaagcaagttaaacatccttaaccaggaacaaagggttttgcctaataaagtgtctcctccacttctgtcagcaccctaccggaactttcccttgtttgcctgaagtcatagcatcttccagtggcatacccacatcacgtgagcctttgtatgccagggcagacccagccccctcccctctctcaagcaccatcagaacctatcttagtactccatttttctatgaaggagatgttcagctcctcacgtatgcactgagatggccaatatgtccagtcgcatcttctgcctcctcttgaagcaaaggaaataaacatcctgtgccaaaggtattggtcattagacgttggtagccatccatcagacatgctggctgtttgagcataggccactgagccattacgggtaacagtgtagttacgtgtgggtctctgagagagcatggctcaaagatgcttacatttttctcctgtgctaattgactaggaagataaacgtttcccaatcctcagccgcctgatagagagtctggatgggcagcttgcacataccactacactaggtagcttttgatagttttataagcaggactcagtgcagaagaaacagagatgtgataaccactcacgttttttttcccccaaatcttactaattcttggagcttcgttagtgtgttagaattggaacttattgttagcatatctatcaaaacagtcgtcctctaaggtcttgaccaatgaaagaaaagcaaatctcctttccacccattttctgggaagtggatgtaaccggtatgattaggattccataagtgaatttctctttctctgttggagagagatgtgacatttggcccttagctccaagtctcttctgacatttacattctttcaaaacacatcattgttggccagatcctggtggcaaacgctgctctcagtgtttctcaaggccgtggaccccatctagttcctgcgctttgtcgtccgcccactctaagcctttcctctgtgtggggagggaagaaccatgcatggcgtttcctagtgggcttctcgacctctgatcctcagctctgtggttcccttaagaccacaccgggacagttccctgccacacgcccccttcctcctatctacctgcctctgagattcgtatttagcctttaacactatgcaattttgtactttgcgtagcggggggggaaagaaactattatctgacacactggtgctattaattatttgaaatttatatttttttgtgtgaatggatttt

SEQ ID NO: 321 - DNA, 1593 bp, Rattus norvegicus
  ref <308>: DATABASE ACCESSION NUMBER: Refseq / NM_057105
  ref <309>: DATABASE ENTRY DATE: 2003-01-13
atggcttgccttcttcctgctgctcgacttcctgcaggctttctcttcttagtgctctggggctcagttctaggtgacaagctgctggtggtcccccaggatggcagccactggcttagcatgaaggagatagtggagcacctcagtgaacgcggacacgacattgtggtgctagtgccagaagtcaatttgcttttgggagaatccaaatactacaggaggaaaagcttcccggtcccctacaacctagaagagttgcggacccgctatcgctcctttgggaacaaccactttgctgccagttcccccctgatggctcctctaagagagtacaggaacaacatgattgtcattgacatgtgctttttcagctgccagagcctcctgaaggactcggccaccctcagcttcctcagggagaaccagtttgatgctctgttcacagacccggccatgccctgtggtgtgatcctggctgagtatctcaagctgccttccatctacctcttcagaggtttcccatgctctctggagcacatgcttggtcaaagcccaagccccgtatcctatgttcccagattctacaccaaattctcagaccacatgacatttccccaacggctggccaacttcattgctaacatcttggagaactacctttatcattgtctgtactcaaagtatgagatccttgcctcagacctcctcaagagagatgtgtccctacctgccttacaccagaactctctgtggctgttacggtatgattttgtgttcgaatacccccggccagtcatgcccaacatgatcttcattggagggaccaactgcaagaagaaggggaacctgtctcaggaatttgaagcctatgtcaacgcctccggagaacatggcatcgtggttttctctttgggatccatggtctcagagattccagagaagaaagcgatggaaatcgctgaggctttgggcagaattcctcagacggtcctgtggcgctacaccggaactagaccatcgaaccttgcaaagaacactattcttgtcaaatggctaccccaaaacgatctgcttggtcatccaaaggctcgggcgttcatcacacactccggttcccatggtatttatgaaggaatatgcaatggggttccaatggtgatgatgcccttgtttggtgatcagatggacaacgccaagcgcatggaaactcggggagctggggtgaccctgaatgtcctggaaatgactgccgatgatttggaaaacgcccttaaaactgtcatcaataacaagagttacaaggagaacatcatgcgcctctccagccttcacaaggaccgtcctatcgagcctctggacctggctgtgttctgggtggagtacgtgatgaggcacaagggggcgccacacctgcgccccgccgcccacgacctcacctggtaccagtaccactccttggacgtgattggctttctcctggccatcgtgttgacggtggtcttcattgtctataaaagttgtgcctatggctgccggaaatgctttgggggaaagggtcgagtgaagaaatcacacaaatccaagacccactga

SEQ ID NO: 322 - protein, 530 aa, Rattus norvegicus
  ref <308>: DATABASE ACCESSION NUMBER: Refseq / NP_476446
  ref <309>: DATABASE ENTRY DATE: 2003-01-13
MACLLPAARLPAGFLFLVLWGSVLGDKLLVVPQDGSHWLSMKEIVEHLSERGHDIVVLVPEVNLLLGESKYYRRKSFPVPYNLEELRTRYRSFGNNHFAASSPLMAPLREYRNNMIVIDMCFFSCQSLLKDSATLSFLRENQFDALFTDPAMPCGVILAEYLKLPSIYLFRGFPCSLEHMLGQSPSPVSYVPRFYTKFSDHMTFPQRLANFIANILENYLYHCLYSKYEILASDLLKRDVSLPALHQNSLWLLRYDFVFEYPRPVMPNMIFIGGTNCKKKGNLSQEFEAYVNASGEHGIVVFSLGSMVSEIPEKKAMEIAEALGRIPQTVLWRYTGTRPSNLAKNTILVKWLPQNDLLGHPKARAFITHSGSHGIYEGICNGVPMVMMPLFGDQMDNAKRMETRGAGVTLNVLEMTADDLENALKTVINNKSYKENIMRLSSLHKDRPIEPLDLAVFWVEYVMRHKGAPHLRPAAHDLTWYQYHSLDVIGFLLAIVLTVVFIVYKSCAYGCRKCFGGKGRVKKSHKSKTH

SEQ ID NO: 323 - DNA, 2368 bp, Homo sapiens
  ref <308>: DATABASE ACCESSION NUMBER: Refseq / NM_007120
  ref <309>: DATABASE ENTRY DATE: 2002-04-04
acagtcagctgtcggtggcttctgctgagatggccagaggactccaggttcccctgccgcggctggccacaggactgctgctcctcctcagtgtccagccctgggctgagagtggaaaggtgttggtggtgcccactgatggcagcccctggctcagcatgcgggaggccttgcgggagctccatgccagaggccaccaggcggtggtcctcaccccagaggtgaatatgcacatcaaagaagagaaatttttcaccctgacagcctatgctgttccatggacccagaaggaatttgatcgcgttacgctgggctacactcaagggttctttgaaacagaacatcttctgaagagatattctagaagtatggcaattatgaacaatgtatctttggcccttcataggtgttgtgtggagctactgcataatgaggccctgatcaggcacctgaatgctacttcctttgatgtggttttaacagaccccgttaacctctgcggggcggtgctggctaagtacctgtcgattcctgctgtgtttttttggaggtacattccatgtgacttagactttaagggcacacagtgtccaaatccttcctcctatattcctaagttactaacgaccaattcagaccacatgacattcctgcaaagggtcaagaacatgctctaccctctggccctgtcctacatttgccatactttttctgccccttatgcaagtcttgcctctgagctttttcagagagaggtgtcagtggtggatcttgtcagctatgcatccgtgtggctgttccgaggggactttgtgatggactaccccaggccgatcatgcccaacatggtcttcattgggggcatcaactgtgccaacgggaagccactatctcaggaatttgaagcctacattaatgcttctggagaacatggaattgtggttttctctttgggatcaatggtctcagaaattccagagaagaaagctatggcaattgctgatgctttgggcaaaatccctcagacagtcctgtggcggtacactggaacccgaccatcgaatcttgcgaacaacacgatacttgttaagtggctaccccaaaacgatctgcttggtcacccgatgacccgtgcctttatcacccatgctggttcccatggtgtttatgaaagcatatgcaatggcgttcccatggtgatgatgcccttgtttggtgatcagatggacaatgcaaagcgcatggagactaagggagctggagtgaccctgaatgttctggaaatgacttctgaagatttagaaaatgctctaaaagcagtcatcaatgacaaaagttacaaggagaacatcatgcgcctctccagccttcacaaggaccgcccggtggagccgctggacctggccgtgttctgggtggagtttgtgatgaggcacaagggcgcgccacacctgcgccccgcagcccacgacctcacctggtaccagtaccattccttggacgtgattggtttcctcttggccgtcgtgctgacagtggccttcatcacctttaaatgttgtgcttatggctaccggaaatgcttggggaaaaaagggcgagttaagaaagcccacaaatccaagacccattgagaagtgggtgggaaataaggtaaaattttgaaccattccctagtcatttccaaacttgaaaacagaatcagtgttaaattcattttattcttattaaggaaatactttgcataaattaatcagccccagagtgctttaaaaaattctcttaaataaaaataatagactcgctagtcagtaaagatatttgaatatgtatcgtgccccctccggtgtctttgatcaggatgacatgtgccatttttcagaggacgtgcagacaggctggcattctagattacttttcttactctgaaacatggcctgtttgggagtgcgggattcaaaggtggtcccaccgctgcccctactgcaaatggcagttttaatcttatcttttggcttctgcagatggttgcaattgatccttaaccaataatggtcagtcctcatctctgtcctgcttcataggtgccaccttgtgtgtttaaagaagggaagctttgtacctttagagtgtaggtgaaatgaatgaatggcttggagtgcactgagaacagcatatgatttcttgctttggggaaaaagaatgatgctatgaaattggtgggtggtgtatttgagaagataatcattgcttatgtcaaatggagctgaatttgataaaaacccaaaatacagctatgaagtgctgggcaagtttactttttttctgatgtttcctacaactaaaaataaattaataaatttataaa

SEQ ID NO: 324 - protein, 534 aa, Homo sapiens
  ref <308>: DATABASE ACCESSION NUMBER: Refseq / NP_009051
  ref <309>: DATABASE ENTRY DATE: 2002-04-04
MARGLQVPLPRLATGLLLLLSVQPWAESGKVLVVPTDGSPWLSMREALRELHARGHQAVVLTPEVNMHIKEEKFFTLTAYAVPWTQKEFDRVTLGYTQGFFETEHLLKRYSRSMAIMNNVSLALHRCCVELLHNEALIRHLNATSFDVVLTDPVNLCGAVLAKYLSIPAVFFWRYIPCDLDFKGTQCPNPSSYIPKLLTTNSDHMTFLQRVKNMLYPLALSYICHTFSAPYASLASELFQREVSVVDLVSYASVWLFRGDFVMDYPRPIMPNMVFIGGINCANGKPLSQEFEAYINASGEHGIVVFSLGSMVSEIPEKKAMAIADALGKIPQTVLWRYTGTRPSNLANNTILVKWLPQNDLLGHPMTRAFITHAGSHGVYESICNGVPMVMMPLFGDQMDNAKRMETKGAGVTLNVLEMTSEDLENALKAVINDKSYKENIMRLSSLHKDRPVEPLDLAVFWVEFVMRHKGAPHLRPAAHDLTWYQYHSLDVIGFLLAVVLTVAFITFKCCAYGYRKCLGKKGRVKKAHKSKTH

SEQ ID NO: 325 - DNA, 1978 bp, Rattus norvegicus; identical to SEQ ID NO: 125
  ref <308>: DATABASE ACCESSION NUMBER: Refseq / NM_057119
  ref <309>: DATABASE ENTRY DATE: 2003-01-13

SEQ ID NO: 326 - protein, 288 aa, Rattus norvegicus; identical to SEQ ID NO: 126
  ref <308>: DATABASE ACCESSION NUMBER: Refseq / NP_476460
  ref <309>: DATABASE ENTRY DATE: 2003-01-13

SEQ ID NO: 327 - DNA, 1972 bp, Homo sapiens; identical to SEQ ID NO: 127
  ref <308>: DATABASE ACCESSION NUMBER: Refseq / NM_004593
  ref <309>: DATABASE ENTRY DATE: 2003-01-08

SEQ ID NO: 328 - protein, 288 aa, Homo sapiens; identical to SEQ ID NO: 126
  ref <308>: DATABASE ACCESSION NUMBER: Refseq / NP_004584
  ref <309>: DATABASE ENTRY DATE: 2003-01-08

SEQ ID NO: 329 - DNA, 649 bp, Rattus norvegicus
  ref <308>: DATABASE ACCESSION NUMBER: Refseq / NM_022692
  ref <309>: DATABASE ENTRY DATE: 2003-01-13
catggctaatcgaggagcaacaagacccaacgggccaaatactggaaataaaatatgccagttcaaactggttcttctaggagagtctgctgttggcaaatcaagtctggtgcttcgctttgtgaaaggccaatttcatgagtttcaagagagtaccattggggctgcctttctaacccaaactgtgtgtcttgatgacacaacagtaaaatttgaaatatgggatacagctggccaagaacggtatcatagcctagcaccaatgtactaccgaggagcacaagccgccatagttgtgtatgatattacaaatgaggagtccttttcgagagcaaaaaactgggttaaagaacttcaaaggcaagcaagtcctaatattgtgatagctttgtcaggaaacaaggctgacttagcaaataaaagagctgttgacttccaggaagcacagtcctatgcagatgacaacagcttattatttatggagacatcagctaagacatcaatgaatgtaaatgaaatatttatggcaatagctaaaaagctgccaaagaacgaaccacaaaatccaggcgcaaactcagccagaggaagaggagtagaccttactgagcctgcacagccagccaggagtcagtgttgtagtaactaa

SEQ ID NO: 330 - protein, 215 aa, Rattus norvegicus
  ref <308>: DATABASE ACCESSION NUMBER: Refseq / NP_073183
  ref <309>: DATABASE ENTRY DATE: 2003-01-13
MANRGATRPNGPNTGNKICQFKLVLLGESAVGKSSLVLRFVKGQFHEFQESTIGAAFLTQTVCLDDTTVKFEIWDTAGQERYHSLAPMYYRGAQAAIVVYDITNEESFSRAKNWVKELQRQASPNIVIALSGNKADLANKRAVDFQEAQSYADDNSLLFMETSAKTSMNVNEIFMAIAKKLPKNEPQNPGANSARGRGVDLTEPAQPARSQCCSN

SEQ ID NO: 331 - DNA, 2191 bp, Homo sapiens
  ref <308>: DATABASE ACCESSION NUMBER: Refseq / NM_004162
  ref <309>: DATABASE ENTRY DATE: 2002-04-04
atcctacgggccacgcctgggccttgctgccaggaagcttcggccccgcagctcggcttgctgcggtctcaggtttctttacctccggaaagaagaatattggccccttgaattctggaagttcattgaagagtctgaaattagggacttatttcaaatttggacatggctagtcgaggcgcaacaagacccaacgggccaaatactggaaataaaatatgccagttcaaactagtacttctgggagagtccgctgttggcaaatcaagcctagtgcttcgttttgtgaaaggccaatttcatgaatttcaagagagtaccattggggctgcttttctaacccaaactgtatgtcttgatgacactacagtaaagtttgaaatatgggatacagctggtcaagaacgataccatagcctagcaccaatgtactacagaggagcacaagcagccatagttgtatatgatatcacaaatgaggagtcctttgcaagagcaaaaaattgggttaaagaacttcagaggcaagcaagtcctaacattgtaatagctttatcgggaaacaaggccgacctagcaaataaaagagcagtagatttccaggaagcacagtcctatgcagatgacaatagtttattattcatggagacatccgctaaaacatcaatgaatgtaaatgaaatattcatggcaatagctaaaaaattgccaaagaatgaaccacaaaatccaggagcaaattctgccagaggaagaggagtagaccttaccgaacccacacaaccaaccaggaatcagtgttgtagtaactaaacctctagtttgaactagctggaatagtcttctgcttcctaaatgttaataacaatggaattggagcatttaaccagcccagtatgacttccaaaagaagagacttatgatagagtcaagtttctaatacagaattattttaagtgttttgaacttaatttttaataacatgcatgggtccctctcactaatgtttcaacaatagggaaaaatgagaactatgtggacacttgtttcattggaaggttagggggaataatttctcatcactaggaatatagacaaatgactgtctgggcccacacagttaaccagcccatttctccacactggtacagtagtcacctgtgaaaaaaaaaattggaacttactaatttgggcttttcaaaaacattctttgtttagaaggagattctaaagttatttatgatgcttagccatagtattcaggcaaatgttcatttctcctggtacctgtatttaaaatgtacattccacattttaataaattaaccacaagaaaataatcccacatatacaaggtcaggggtggggaagagtattaatggtatcttaattatacccagtctggtttttttttttaaatggggtaaaaatcaaatgcaaccccatcttgttttaggaattttgagaactaataaatgcaccttaatggtcagtgttcctttcaaacatgtgagttctttaacaaaaatgaaataaaccaggtgtctgtgatttctaattaatcaccgctggccattacacaggttttgttgtttggggtggggagggggcttttgttcccttttgacataatatagtcaatgcactaacaattatgtatattcaaacttgattattttaaattcgatcttcagctgtactgtaaatagggtactgcattgtagtctccatatctgtattacttttctgtaatatttaagagttgcttaaaagcatacaaaatgtactgttactaaaacagctaattatttctctctccccctttgacaggaaggggcttcagttgttcctccatggctagaaccataataaacaatgtacccgtaatttgtaacataaagtattgcaatatgttagtaacaatcttgcagccttcctttccaaagttcattttattttgatcagttcagtatattgcactaattattttaggtattttcattatatgaaagctaccatgtgtcagagatgatttaatctatttaagtgttggactgctaggagaacttgtacatttatgataatgcagaattaggaaaacggttcaccagtgtttagttttatattgaggtgctcaggttggaataaagtggtataaaaagcaaaaaaaaaaaaaaaaaaaaaaaaaaaa

SEQ ID NO: 332 - protein, 215 aa, Homo sapiens
  ref <308>: DATABASE ACCESSION NUMBER: Refseq / NP_004153
  ref <309>: DATABASE ENTRY DATE: 2002-04-04
MASRGATRPNGPNTGNKICQFKLVLLGESAVGKSSLVLRFVKGQFHEFQESTIGAAFLTQTVCLDDTTVKFEIWDTAGQERYHSLAPMYYRGAQAAIVVYDITNEESFARAKNWVKELQRQASPNIVIALSGNKADLANKRAVDFQEAQSYADDNSLLFMETSAKTSMNVNEIFMAIAKKLPKNEPQNPGANSARGRGVDLTEPTQPTRNQCCSN

SEQ ID NO: 333 - DNA, 382 bp, Rattus norvegicus
  misc_feature (1)..(382): n=a, c, g or t
  ref <308>: DATABASE ACCESSION NUMBER: EMBL / H33003
  ref <309>: DATABASE ENTRY DATE: 2000-03-04
aaaatgggctcccacnaaggccccagagccatgcatggcatnaaaggccaccagaagcttgagtgcccgaccgagtagagcactcttcccagccaccctgtctgccgcctgcctctgtcctgctggcaccgggactctgggcttcctcccatgatgctgcctggttcccagtggctgccctccctgacccatgcaccctgcccaggancctggacccctcagacctgatacccagcaagaagggcttacatgggagctcctgaaataggggctgccagcacctggggttcccaaactcctgacccccaacttcttccaagctgtgaccccttgcnccaagctcttgtatctgtgnactttcattaaaacttgtgctcagctc

SEQ ID NO: 334 - DNA, 3253 bp, Homo sapiens
  ref <308>: DATABASE ACCESSION NUMBER: EMBL / AK022293
  ref <309>: DATABASE ENTRY DATE: 2002-08-06
agaccagttgagggctgagaggtttcagacatgacgcccccgtgccccaagttcatccgtgtacagtgcccaagggcagagacatgttcctctagaaccatcgttcattcgtcagctctcggaaacaaagcactggtactgtgctgagcactgtggcaccggctctgctgggctcctggatgctccaaggccctgctccctggctgactgcccattttctgtcctcctcccggcttcaggtgcgagacaagaagcttctcaatgacctgaatggagccgtggaggatgcaaagacggcccggctgttcaacatcaccagttctgccctggcagcctcctgcatcatcctcgtcttcatcttcctgcggtaccccctcaccgactactaaggcccgccaggcacggctgctggcggagacaagcactgagacatgtttattctcatggtccctgaaacgcaggatcccatgaggttggggcagggcagggcttcttgtcctggggcccccttgagctgtgaactgggcagcaaggccatcagaagctgagtacagcaagggggcagtgagcttggccctcagtccaccccctccgcctcctggcctccgccctgcctgtgtctggggcctgggggcttctcccctcgctgctgcaccctggcttccagcgtctgcgtccctgccctcacgtgccccttcccaggctcctggggccccttggacctgacacctagcaggaagggcttatgcaaaattgtcccaggttgggaggactcactctgtgctccccgaccctgcctcctccacgatgtgaccccgctcagagcccttgtgtctgtgaactttcaatgaaatacccatgcagctccagcccagccttctactttgtgtccctggcagggcctggagaagtctggaggctttgcaagcctccctcaggaactgcctggcggtcagggccccgggtgctgtgtcccaacagactgcaggggacggtctgctccatcacagctgtgccagacagtgaatgggaagggggggcatttggtggaggtaccccaaactcgagtcacttagagggtcaggcagcctcctggggggacggaagggggtggggcacagcctcagctgcctgcattggccaaatcagagcaaaggaaaccacaaattcactcggaaggaagcagcaggcagagacgatagacgcctggctaacccctgtccctcctggagggctctgggacctggacaggcccctttacctctctcgtgcccatctccttagctgtaaaataggaaaatggcctttcacttctataatcactgtgaaaatgaacggaagatgcctttcaaaggctgaggccagcgccctgacggcccatggcatgtgcagtccacaatgtgggaggcaggatgcagggatgggctctgtccccttggaactcaggcacagtcatgggggtgccggtcagccctgaagacaagctgatgagggtgcactaggaaaagtgcagggcatcggcgaggcacacgaaggaggtggggaggtgaagatggagaagaagccgaggcagtggccatgggtgtggagcttcgcgctgtgggtgcccagctggtctgggaaaccgcaggaaatcccgcagctcaggtgcgcagtgggaaggacttgctattccgtgggaaggcaggcaaaccttcccagggaaggggcatggccgtgcgcctcatgttttgggaagctcgtgccctctggggtagcgaggccagcttggaggggagtccagtggacagaggtggatgcaagtggagggagctgagcctgggctggggctggcagcagagggctggacagcagggcgcctgcgtggcagctgtgcagtcagtggggttgactggtttggaaggtaaggtgggggagaagcccggaggattcctgtcccttgacttggacagcccagtggagagggctgtgtaccaagggcaggaaaccagggagaagaagatgttgactttaagataccaagcagagaagggaagagccttctgggctggagacgtggggtgcctcagaagggaggaccttgagctagcagcagatgggacaaacgcaggggacagggcacagccgtggcaggagtgcagcgagcaagattctggtcacagtcctgacccagaaacctgcagaggaagggagggtggccagcacctgcccgtgggcctggggtgcagcccaggcagaggtggatggagggggtgctcagggaagaggggaggggagtgtgtgacctcaaaatgggagggcttgggggtcagagtcgagagaggggacagggtggggaccatgtgggactcttgagcactgacccttgaacccaggcagtggtgggatgggagggcaggaggcggcgggctgcgaggctgatgcggggctgcacggagctgtcattgagcctcttggaggatggtgggagaagtgccaggggcggctgaaagccttgctgagactgtgggcagcctggttgtgggcacttcggatgcttgcaccattagacccagaggcttcctggacaagcctgggctggaagaggatggcagaggctgctgggccttggaagagagagggtcctggcttctagttcctggggcagctaaggccaaccccagtgtccaggtgtcttccatgttatgcctgggagggaagaaagtagaggggcaaatgctttctttgcctattttccttaaacatttggtggcagtgctggtggctgcctgggacaggggccaggaggaaacacccctgcattagggaagccctcagccagcttttccctgggatgttcctgcgcctggctgaagctttctgagttcatgttggggaaatggaacggtcaccttccagccagtaaaggcacccctagctcttgggatgtttgtatccaactccgggcaatgtggggctacaaaggcccctggcttccataccctggggaccgggggagggctggtgctcccgcggtgggtgtccgcggtgaggtcaggcccccacagcaggtgcattctcgccctcagcaggcaggcaagcaggcatcagctccggcgctggtctctggcttcgaagtctgtgtctttgcctgtctgtactcctgcctgacctgctggcgctccctgtccactgcactcctcccacctcatttttatgtgattttgcacagtgcctggcagacatttgacattcaataaacattgtacgaacg

SEQ ID NO: 335 - DNA, 366 bp, Rattus norvegicus
  ref <308>: DATABASE ACCESSION NUMBER: EMBL / AA893007
  ref <309>: DATABASE ENTRY DATE: 2000-03-03
gaagccaggtgtccgctctttcacgatgatgaactgaggctccagcagtggttggtgcctccagggcacttgctgaacccttagtctgccccaactctgaaataggaagtgtgcgtgcgtgtgcgtgcgtgtgcgcgtgtgtgccgtgttatttattgaaaagagtctaggtgctccctggtgtggctgcagattctgcagaggctcagcctttctgggttgggtatgtggtctgtgtacctggctggaaaagtattttctattgtctttttttaaaagttgttctacgttcctgtaggggggaaggtagatttcctctcactgatgtgggctgagatcagtctgtgcaaccctgacacgcccggt

SEQ ID NO: 336 - DNA, 3551 bp, Rattus norvegicus
  ref <308>: DATABASE ACCESSION NUMBER: Refseq / NM_019362
  ref <309>: DATABASE ENTRY DATE: 2003-01-13
gtctagggcggaggcgcggctgggtaggaagggagcctggcgatccccgaaagcacccctgaagccgccaggctccgagcgcgtggaaacttccctggcggcaagcagggcgggagggggcggcggttccccccagcgctgagagcaccgcgcgcgcgaggatcggggcgcgcggcgggcgcggcggccgccgcctcctcccgtccccgcctccgcggcgcagcctcctccctccgcccggctcggcctcgggctccctcccctcgtggcaggctccggcggcggcggcggcggcggctgcggcggacggggagggcgtgcgccggtcgagaggtgtgggcgacgaggctagggaagtttcaagtggaaggtcgtccgccggccggcgcgtcccctcactctcctcccgcagcatcatggcggagccgagcggctcgcccgtgcacgtccagcttccccagcaggcggccccggtgacagccgcggcggcggctccggcggccgcgacatcagcaccggccccggccccggccccggcggcgcccgcagccccggccccggctccagctgcggctccagccccggccccggcagctcaggcggtcggctggcccatctgcagggacgcgtacgagctccaggaggttatcggcagtggagcgaccgccgtggttcaggcagccctgtgcaaacccaggcaagaacgcgtagccataaagcggatcaacttggaaaagtgccagacgagtatggatgaactcttaaaagaaattcaagccatgagccagtgcagccatcccaacgtagtgacttattatacttcctttgtggtcaaagatgaactttggctggtcatgaaattactaagtggaggttccatgttggatatcatcaaatacatcgtcaatcggggagagcataagaatggtgtcctggaagaggcaataatcgcaacaatccttaaggaggttttggaaggattagactatctgcatagaaatggtcagatccatagggatttgaaagctggcaatattcttctgggtgaggatggatcagtacagatagcagattttggagtaagtgcattcttagcaacagggggtgatgtcacaaggaataaagtcagaaaaacatttgttggtaccccatgttggatggcccctgaggtcatggaacaggtgagaggctatgacttcaaggctgacatgtggagttttggaataacagccattgaattagcaacgggagcagcgccttaccacaaataccctccaatgaaagtgctaatgttgactttgcaaaatgacccgcccactttagaaaccggcgtagaggataaagaaatgatgaaaaaatacggcaagtccttcagaaagttactttcactgtgtctccagaaagatccttccaaaaggcccacagcagcagaacttttaaaatgcaaattcttccagaaagccaagaacagagagtacctgatcgagaagttgctgacacgaacaccagacatagcccaaagagccaagaaggtcaggcgagttcctgggtcaagcggtcaccttcacaagactgaagatggcgactgggagtggagtgatgatgagatggatgagaagagtgaggaggggaaagcggctgcctctcaagagaagtcacgaagagtaaaagaagagaacccagagatctcggtgaacgctggtggcatccccgagcaaatacagtccctctccgtgcacgactctcagggccaaccaaatgctaatgaagactacagagaaggtccttgtgcggtcaaccttgttttaagattaagaaactccagaaaggaacttaatgacatacgatttgagtttactccaggaagagatacagcagatggtgtgtctcaggagctcttctctgctggcttggttgacggtcatgatgtagttatagtggctgctaatttacagaagattgtagatgaccccaaagctttaaaaacgttgacatttaagttggcttctggctgtgatggggcggagattcctgacgaagtgaagctgatcgggttcgcccagttgagtgtgagctgatgtatgtcccttgctgtcaccctcatctgtcgtgccctcccccccttccagccccctctttgcctccttcctctcaccccctcactcccaaatcccagcaaataagaagattgtgaagaggctggcttcgatgaagtgggataaaaaaaataataattttaaaaaaaaactccgagcactctgagttctgctttattctccagcaatccacagtgtgagcacaggcaagtgctgcaatagtgcattgctgatttctttccagagagctatttactattcttagcagtcaatttggatagcccttaagtgaggagtctgaaacacactcaggtggtcctatctcttggcaacaaaaggaatcttctaccagaagccttttctcctcttactgttgtatttctgtttaataattaataataattaattgtacatctgacaatactgcctcttttatgttgtcttagaaattaatatacttataaaattaagatttattagccagacttgaattctagttttaaaactgactgtgaattttatttttcatatatttatgctttacacaccttagctatgagggaaaaagttttgattataatgctttccgcggttgatctcttgttatttaaacaaatggtttcaggtcaatctttggagtatttgtagcttctaatttttgaaatgactgaattgaaaatttgaatgctttctcttttggttggtttgcctaaaatccagtccacaatccagtcgtctcttgggagagggaggtgccttgtaaactttcatacttcgaatgtgcctgagactgcttaaccctggactagtctcagatctcaaacccgcactacacatggaggcatacgtttgcttcatctggacatttagaatactgtacctgtgctgccgttctgttagatcgctgactacatccccgtgtctgattcggctctccttaggtgataggattcattgtttgtaaggcgataaacttgaccacaccagaatctgagttttacttgaaactctgcagaatacacagggggtatgaaaaacaaaacaaaacaaaacagaaagatttttttgtgcaatggcaaaaggtaaaaatgctgtaaacgttcgagaataaatatttccaacccaagaacctcctgcttgactatgtattatgaacctaacaaaccttaggattttcaaatttggagtcaaaaccctcaagaaggtggctccggggatggcaccattgctccttacaagctaaccctagatgcggcagctctttaacgtactttaaaaagcaaatatatattactaaggaaagaagttatttataattgccttgtcataatcgttaaggtgttctagaaccatttgcatacaatttaatgtaattccattccattctattgtttacacaattactcaaagatggctgcaaaggtaaaaggaaaaataaaagcgtcttgcacagtg

SEQ ID NO: 337 - protein, 553 aa, Rattus norvegicus [sequence omitted]

SEQ ID NO: 338 - DNA, 3293 bp, Homo sapiens
  ref <308>: DATABASE ACCESSION NUMBER: Refseq / NM_013233
  ref <309>: DATABASE ENTRY DATE: 2002-12-23
cgctccctcccctcctagctggcttcggcggggacggcggcggcggcggcggcggcggcggcgggcggggagggcgtgcgccggccgagaggtgtcggcggcgaggcaaaggaagtttcaagtggaaggtcgtccgtcggccggcgcgtcctcctgctctcctccgcagcatcatggcggagccgagcggctcgcccgtgcacgtccagcttccccagcaggcggccccggtgacagcggcggcggcggcggccccggcggccgcgacagcagcgccggccccggcagctcccgcggccccggccccggccccggccccggccccggcggcacaggctgtcggctggcccatctgcagggacgcgtacgagctgcaggaggttatcggcagtggagctactgctgtggttcaggcagccctatgcaaacccaggcaagaacgtgtagcaataaaacggatcaacttggaaaaatgccagaccagtatggatgaactattaaaagaaattcaagccatgagtcagtgcagccatcccaacgtagtgacctattacacctcttttgtggtcaaagatgaactttggctggtcatgaaattactaagtggaggttcaatgttggatatcataaaatacattgtcaaccgaggagaacacaagaatggagttctggaagaggcaataatagcaacaattcttaaagaggttttggaaggcttagactatctacacagaaacggtcagattcacagggatttgaaagctggtaatattcttctgggtgaggatggttcagtacaaatagcagattttggggtaagtgcgttcctagcaacagggggtgatgttacccgaaataaagtaagaaaaacattcgttggcaccccatgttggatggctcctgaagtcatggaacaggtgagaggctatgacttcaaggctgacatgtggagttttggaataactgccattgaattagcaacaggagcagcgccttatcacaaatatcctcccatgaaagtgttaatgttgactttgcaaaatgatccacccactttggaaacaggggtagaggataaagaaatgatgaaaaagtacggcaagtcctttagaaaattactttcactgtgtcttcagaaagatccttccaaaaggcccacagcagcagaacttttaaaatgcaaattcttccagaaagccaagaacagagagtacctgattgagaagctgcttacaagaacaccagacatagcccaaagagccaaaaaggtaagaagagttcctgggtcaagtggtcaccttcataaaaccgaagacggggactgggagtggagtgacgacgagatggatgagaagagcgaagaagggaaagcagctttttctcaggaaaagtcacgaagagtaaaagaagaaaatccagagattgcagtgagtgccagcaccatccccgaacaaatacagtccctctctgtgcacgactctcagggcccacccaatgctaatgaagactacagagaagcttcttcttgtgccgtgaacctcgttttgagattaagaaactccagaaaggaacttaatgacatacgatttgagtttactccaggaagagatacagcagatggtgtatctcaggagctcttctctgctggcttggtggatggtcacgatgtagttatagtggctgctaatttacagaagattgtagatgatcccaaagctttaaaaacattgacatttaagttggcttctggctgtgatgggtcggagattcctgatgaagtgaagctgattgggtttgctcagttgagtgtcagctgatgtatgtcccttgatgtcaccctgatctgtcatgccccaccgccacccctactcccttcaaccctccctctttctgcccatttcctcccaccccctcactcccatttcctagcaaaatcagaagattgtgaagaggccggcttcaacaaaatgggataaaaaaataattttttaaaacttacaacactccgagttctgctttattctctagcaatccacagtacaagaacaagcaaatgccacagctgcacgactgttgctcatttttccaaaagctatttaatattcttagcaatcaatttggatatcccttaagtgaaaagaatctgaaatacactcaggtggtcttatttattggcaacaaaaggaattttctatccagaagcctatttctcctttcattgttgttatttctgttataatactttaaattgtacatctgacaatactgcctcttttatgttgtatttagaaattaatatacttataaaattaagatttattagccaaacttgaattctagttttaaaactgactgtgaattttatttttcatatatttatgcattacacaccttagctataagaaaaaaagggttttgattatatgcttcttgcagttaatctcgttatttaaacaaaaagttttgggtctgtctttggagtatttgtaacttctaaattttgaaatgactgaattaggaatttggatgcttattcttttagtctgtttgcctaaaaaccaatttacaatctgactgtctcttgggagagggaggtgccttgcaaactttcacattaagaatgtgcctgaggctgctttactctggaatagtctcagatctaaaatttcctctatataaggtggcatatgttaagttttgcttcattggaccgtttagaatgctatgtaaaatgttgccattctgttagattgctaactatatacccatctctgatttggctctccttaagtgataggatttgttattctaaaggtgataaacttgaaaatatcagaatctgagttttacttgaaattttgcagaatacccaggtggagtgaaaattggaagggttttgtgcaatgactaaaaggtaaaacgctgttaaggttcaagaatcaatactttcaacccaagtagccccctgcttgactgtatattatggaactagtaaaccttaggattttgaaaattggagtctaatctttcaaggaggtgggctcccaggatggtaccattgctctttcctagctaaccctagatatggcagctctttaatgtacttcaaaaagcaaatatatattactaaggaaaaaaagttatttataattgccttgtcataattgttaaggtgttctagagccatttgcatacaatttaatgtaatttcattccattctattgtttacacaacgattactcgaagatgactgcaaaggtaaaaggaaaataaaagtgtattgcacaatgag

SEQ ID NO: 339 - protein, 547 aa, Homo sapiens
  ref <308>: DATABASE ACCESSION NUMBER: Refseq / NP_037365
  ref <309>: DATABASE ENTRY DATE: 2002-12-23
MAEPSGSPVHVQLPQQAAPVTAAAAAAPAAATAAPAPAAPAAPAPAPAPAPAAQAVGWPICRDAYELQEVIGSGATAVVQAALCKPRQERVAIKRINLEKCQTSMDELLKEIQAMSQCSHPNVVTYYTSFVVKDELWLVMKLLSGGSMLDIIKYIVNRGEHKNGVLEEAIIATILKEVLEGLDYLHRNGQIHRDLKAGNILLGEDGSVQIADFGVSAFLATGGDVTRNKVRKTFVGTPCWMAPEVMEQVRGYDFKADMWSFGITAIELATGAAPYHKYPPMKVLMLTLQNDPPTLETGVEDKEMMKKYGKSFRKLLSLCLQKDPSKRPTAAELLKCKFFQKAKNREYLIEKLLTRTPDIAQRAKKVRRVPGSSGHLHKTEDGDWEWSDDEMDEKSEEGKAAFSQEKSRRVKEENPEIAVSASTIPEQIQSLSVHDSQGPPNANEDYREASSCAVNLVLRLRNSRKELNDIRFEFTPGRDTADGVSQELFSAGLVDGHDVVIVAANLQKIVDDPKALKTLTFKLASGCDGSEIPDEVKLIGFAQLSVS

SEQ ID NO: 340 - DNA, 493 bp, Rattus norvegicus
  ref <308>: DATABASE ACCESSION NUMBER: EMBL / X06554
  ref <309>: DATABASE ENTRY DATE: 1988-04-02
atcgcactgtgcagcggccagagacaccgtgcagtgcctgtgtgtggtaaaatccaacccggaaccctccgtggcctttgagctgccttcccgcaacgtgactgtgaacgagacagagagggagtttgtgtactcagagcgcagcggcctcctgctcaccagcatcctcacgctccggggtcaggcccaagccccaccccgcgtcatttgtacctccaggaacctctacggcacccagagcctcgagctgcctttccagggagcacaccgactgatgtgggccaaaatcggccctgtgggtgctgtggtcgcctttgccatcctgattgccattgtctgctacatcacccagacaagaagaaaaaagaacgtcacagagagccccagcttctcagcgggagacaaccctcatgtcctgtacagccccgaattccgaatctctggagcacctgataagtatgagtccagagaggtctctacccgggattgtcac

SEQ ID NO: 341 - DNA, 1838 bp, Rattus norvegicus
  ref <308>: DATABASE ACCESSION NUMBER: EMBL / L08497
  ref <309>: DATABASE ENTRY DATE: 2002-02-08
attcttctgcaaccagaggcgagaggcgagaggaaaaaaaagcgatgagttcgccaaatacatggagcactggaagcacagtctactctcctgtattttcacagaaaatgacgctgtggattctgctcctgctatcgctctacccaggcttcactagccaaaagtcagatgatgactatgaagattatgcttctaataaaacatgggtgttgactccaaaagttcccgagggtgatgtcactgtcatcttaaacaaccttctggaagggtacgacaacaaacttcggcccgacataggagtgaaaccaacattaattcatacagatatgtacgtgaacagcattggtccagtgaatgctatcaatatggaatacacaattgatattttttttgcccaaacctggtatgacagacgtttgaaatttaacagtaccattaaagttctccgattgaatagcaatatggtggggaaaatctggattccagacactttcttcaggaactccaaaaaagcggatgctcactggatcacgactcccaacaggatgctgagaatttggaatgacggtcgagttctctacaccttaaggctaacaattgatgccgagtgccagttgcaattacacaacttcccaatggatgaacactcctgccccctggagttctccagttatggttatcctcgtgaagaaattgtttatcaatggaagcgcagttctgttgaagtgggagacacaaggtcatggaggctgtatcagttttcctttgttggattgaggaataccactgaagtagtgaagacaacttctggtgactatgtggttatgtccgtgtactttgatctgagcagaagaatggggtactttaccatccagacctacattccctgcacactcattgtggttctgtcctgggtgtccttctggatcaataaggatgctgtccctgcaagaacatctttaggaatcacgactgtcctgacgatgaccactctcagcaccatagcccggaagtctctgcccaaggtctcctatgtcacagcaatggatctcttcgtctctgtttgcttcatctttgtgttttcagctttggtggagtatggtaccctgcactattttgtgagcaaccggaaaccaagcaaggataaagacaaaaagaagaaaaaccctgcccctaccattgatatccgtcccagatcagcaacgatccaaatgaacaatgccacccaccttcaagagagggatgaagaatatggctatgagtgtttggatggcaaggactgtgccagtttcttttgctgttttgaagactgccgaacaggagcctggagacacgggaggatacacattcgcattgccaaaatggactcctatgctcggatcttcttccctaccgccttctgcttgttcaatcttgtttactgggtctcctatctttatctgtgaggaggtttgggttttatcgataggggtcttattcgctgaatctcacgaagaaaaaatgtcctttctaagtccaacgatctaataccctatgtgggtcactgaatgtgtttctccgtctcacctagtaatacataggtcctacgatccgtgcccaactctcctttggttattgtaatttgaattttagcgtgcactgtctttcaaacctgcaaggcaagttaagttagaacaagagctgttagactgagcaagatacctttgagcaaaagcactgcaaactgaaatctgtgagtgtttaaaggggcatcattagcctttgattcacgtataacttagtacaaaaggtatacagctgtgtgctacgttcgcttggggtacgttgtgtaaattgaa

SEQ ID NO: 342 - protein, 467 aa, Rattus norvegicus
  misc_feature (1)..(467): Xaa=Unknown amino acid
MSSPNTWSTGSTVYSPVFSQKMTLWILLLLSLYPGFTSQKSDDDYEDYASNKTWVLTPKVPEGDVTVILNNLLEGYDNKLRPDIGVKPTLIHTDMYVNSIGPVNAINMEYTIDIFFAQTWYDRRLKFNSTIKVLRLNSNMVGKIWIPDTFFRNSKKADAHWITTPNRMLRIWNDGRVLYTLRLTIDAECQLQLHNFPMDEHSCPLEFSSYGYPREEIVYQWKRSSVEVGDTRSWRLYQFSFVGLRNTTEVVKTTSGDYVVMSVYFDLSRRMGYFTIQTYIPCTLIVVLSWVSFWINKDAVPARTSLGITTVLTMTTLSTIARKSLPKVSYVTAMDLFVSVCFIFVFSALVEYGTLHYFVSNRKPSKDKDKKKKNPAPTIDIRPRSATIQMNNATHLQERDEEYGYECLDGKDCASFFCCFEDCRTGAWRHGRIHIRIAKMDSYARIFFPTAFCLFNLVYWVSYLYLX

SEQ ID NO: 343 - DNA, 1589 bp, Rattus norvegicus
  ref <308>: DATABASE ACCESSION NUMBER: Refseq / NM_017005
  ref <309>: DATABASE ENTRY DATE: 2003-01-14
ctttccatccacgtacagcagcaccatgaaccgcgcattctgtctcctcgctcgctcgcgtcgcttcccgcgggtcccctccgccggtgctgtattgtcaggggaagcggccaccctcccacggtgtgctccgaacgtcgtgcgaatggcaagccaaaattccttccgtatagaatacgacacctttggtgaactgaaggtcccaaccgataagtattatggtgctcagactgtaagatctacgatgaactttaagattggaggtgcgacggagagaatgccaatcccagtcattaaagcatttggcatcttgaagcgagctgctgctgaagtgaaccaggagtatggtctcgatcccaagattgctagtgcaataatgaaggccgcagatgaggtagctgaaggtaaattaaacgatcactttcctctggtggtatggcagactgggtcaggaacccagacgaacatgaatgtaaatgaagtcattagcaacagggcaatcgaaatgctaggaggtgaacttggcagcaagaagcccgtgcaccccaatgatcacgttaacaaaagccagagctcgaatgacaccttccccacagcaatgcacattgctgctgcactggaagttcaccaggtcctgttgccaggattacagaagctgcacgatgccctcagtgcaaaatccaaagagttcgcgcaggtcataaaaattgggcggactcatacgcaggacgctgtccctcttactcttggacaggagttcagtggttatgttcagcaagtccagtatgcgatggagaggataaaagctgccatgcccagaatctacgagctcgctgctggcggcactgccgtcggcacgggactaaacaccaggatcggcttcgcagaaaaggtggctgcaaaagtcgcagcactcacaggtttgccttttgtcactgccccgaataagtttgaagctctggccgctcatgatgctctggtggagcttagtggagccatgaacactacggcctgcagtctgatgaagattgccaatgacattcgcttcctcggttctggtcctcggtccggtttgggggagctgatcttgcctgaaaatgagccagggagcagcataatgccaggaaaggtgaaccctactcagtgtgaggcgatgaccatggttgcagcccaagtcatggggaatcatgtcgctgttactgttggaggcagcaatggacatttcgaactgaatgtttttaaaccgatgatgattaagaatgtgttgcactcagccaggctactgggagatgcttcagtgtccttcacagagaactgtgtggtagggatccaggccaacacagagaggatcaacaagctaatgaacgagtctttaatgttggttacagctcttaatccgcatatagggtatgacaaagcagcgaagattgccaagactgcacacaagaacggatcaaccttaaagaaaacggctattgaacttggctatctcacagcagagcagtttgatgagtgggtgaaacccaaggacatgctgggtccaaagtgacttaaataaatttatattaaaataaacatgtatgaaattt

SEQ ID NO: 344 - protein, 507 aa, Rattus norvegicus
  ref <308>: DATABASE ACCESSION NUMBER: Refseq / NP_058701
  ref <309>: DATABASE ENTRY DATE: 2003-01-14
MNRAFCLLARSRRFPRVPSAGAVLSGEAATLPRCAPNVVRMASQNSFRIEYDTFGELKVPTDKYYGAQTVRSTMNFKIGGATERMPIPVIKAFGILKRAAAEVNQEYGLDPKIASAIMKAADEVAEGKLNDHFPLVVWQTGSGTQTNMNVNEVISNRAIEMLGGELGSKKPVHPNDHVNKSQSSNDTFPTAMHIAAALEVHQVLLPGLQKLHDALSAKSKEFAQVIKIGRTHTQDAVPLTLGQEFSGYVQQVQYAMERIKAAMPRIYELAAGGTAVGTGLNTRIGFAEKVAAKVAALTGLPFVTAPNKFEALAAHDALVELSGAMNTTACSLMKIANDIRFLGSGPRSGLGELILPENEPGSSIMPGKVNPTQCEAMTMVAAQVMGNHVAVTVGGSNGHFELNVFKPMMIKNVLHSARLLGDASVSFTENCVVGIQANTERINKLMNESLMLVTALNPHIGYDKAAKIAKTAHKNGSTLKKTAIELGYLTAEQFDEWVKPKDMLGPK

SEQ ID NO: 345 - DNA, 1935 bp, Rattus norvegicus
  ref <308>: DATABASE ACCESSION NUMBER: Refseq / NM_133295
  ref <309>: DATABASE ENTRY DATE: 2003-01-13
caaaggaacaaatagcccacagatccgcagaacccttgtccttccacaatgcgcctctaccctctggtctggctttttcttgctgcgtgcacagcttgggggtacccatcctcaccacctgtggtgaacactgttaaaggcaaagtcctggggaagtatgtcaatttggaaggatttgcacagcctgtggctgttttcctgggaatccccttcgccaagccccctcttggctccttgaggtttgctccaccacagcctgcagagccttggaactttgtgaagaatactacctcctacccacctatgtgctctcaagatgctgttggagggcaggttctctcagagcttttcaccaacaggaaggaaaacattcctttacagttttctgaagactgcctctacctgaacgtttatactccggctgacttgacaaagaacagccggctaccagtgatggtgtggatccatggaggtggactggtagtgggtggagcatccacctatgatggacaggtcctctctgcccatgaaaatgtggtggtggtgaccattcagtatcgccttggcatctggggattcttcagcacaggggatgaacacagccggggcaactggggtcacttggaccaggtggctgcactacactgggtccaggacaacattgccaactttgggggtaacccaggctctgtgaccatctttggagaatctgcaggaggtttcagtgtctctgctcttgtgttatctcctctggccaagaacctcttccacagggccatttctgagagtggtgtggtcctcacttctgctctgattacaacagatagcaagcccattgctaagctgattgctacactttctgggtgtaaaaccaccacatcagctgttatggttcattgcctgcgccagaagacagaggatgaactcctggagacttcattaaaattgaatcttttcaaactggacttacttggaaacccaaaagagagctatcccttcctacctactgtgattgacggagtggtgctgccaaagacaccagaagagatcctggctgagaagagtttcaacacagtcccctacatagtgggcatcaacaagcaagagtttggctggatcattccaacgcttatgggctatccactctccgaaggcaaactggaccagaaaacagccaaatccctcttgtggaagtcctacccaacactgaaaatctctgagaaaatgattccagtggttgctgagaagtacttcggagggacagatgaccctgccaaaaggaaagacctgttccaggacttggttgcagatgtgatatttggtgtcccatcagtaatggtgtctcgaagtcacagagatgctggagcccccaccttcatgtatgaatttgagtatcgcccaagctttgtatcagccatgaggcccaagacagtgatcggagaccatggtgatgaactcttctcagtatttggatctccatttttaaaagatggtgcctcagaagaggagaccaatctcagcaaaatggtgatgaaatactgggccaactttgctcggaatgggagccctaatgggggagggctgccccattggccagaatatgaccagaaggaagggtacctgaagattggtgcctcaactcaggcagcccagaggctgaaggacaaagaagtggctttttggtctgagctcagggccaaggaggcagcagaggaaccatcccactggaaacatgttgagctctgatcaggagggtcagccatgtttgagaacctgaagctaaaggggaattattccacagaagattttgtaaagacataacacttcttgtctttgagactataacatcacatggtattttgtacaaatgcattaaagggaaaatacttaaccttattgcttcaacttgtaaaataaaacattgtttagaaattc

SEQ ID NO: 346 - protein, 565 aa, Rattus norvegicus
  ref <308>: DATABASE ACCESSION NUMBER: Refseq / NP_579829
  ref <309>: DATABASE ENTRY DATE: 2003-01-13
MRLYPLVWLFLAACTAWGYPSSPPVVNTVKGKVLGKYVNLEGFAQPVAVFLGIPFAKPPLGSLRFAPPQPAEPWNFVKNTTSYPPMCSQDAVGGQVLSELFTNRKENIPLQFSEDCLYLNVYTPADLTKNSRLPVMVWIHGGGLVVGGASTYDGQVLSAHENVVVVTIQYRLGIWGFFSTGDEHSRGNWGHLDQVAALHWVQDNIANFGGNPGSVTIFGESAGGFSVSALVLSPLAKNLFHRAISESGVVLTSALITTDSKPIAKLIATLSGCKTTTSAVMVHCLRQKTEDELLETSLKLNLFKLDLLGNPKESYPFLPTVIDGVVLPKTPEEILAEKSFNTVPYIVGINKQEFGWIIPTLMGYPLSEGKLDQKTAKSLLWKSYPTLKISEKMIPVVAEKYFGGTDDPAKRKDLFQDLVADVIFGVPSVMVSRSHRDAGAPTFMYEFEYRPSFVSAMRPKTVIGDHGDELFSVFGSPFLKDGASEEETNLSKMVMKYWANFARNGSPNGGGLPHWPEYDQKEGYLKIGASTQAAQRLKDKEVAFWSELRAKEAAEEPSHWKHVEL

SEQ ID NO: 347 - DNA, 1722 bp, Homo sapiens
tcacaatgcgcctctaccctctgatatggctttctcttgctgcgtgcacagcttgggggtacccatcctcaccacctgtggtaaacactgttaaaggcaaagtcctggggaagtatgtcaatttggaaggattcacacagcctgtggcttttttcctgggagtcccctttgccaagccccctcttggctccttgagatttgctccaccacagcctgcagagccctggagcttcgtgaagaacaccacctcctacccgcctatgtgctctcaggatgctgttggttggcaggtgctctcagagctcttcaccaacaggaaggagaacattcctttacagttttctgaagactgcctctacctgaatatttacactcctgctgacttgacaaagaacagcagactaccagtgatggtgtggatccatggaggtggactggtggtgggcggagcatccacctatgatggactggccctctctgcccatgaaaatgtggtggtggtgaccattcagtatcgccttggcatctggggattcttcagcactggggatgaacacagtcggggaaactggggtcacttggaccaggtggctgcactacgctgggtccaggacaacattgccaactttgggggcaacccaggctcggtgaccatctttggagagtcagcaggaggtttcagtgtctctgttcttgtcttgtctcctttggccaagaacctcttccacagggccatttctgagagtggtgtgtccctcactgctgctctgattacaacagatgtaaagcccattgctggtctggttgctactctttctgggtgtaaaactaccacatcagctgttatggttcattgcctgcgccagaagacagaggatgaactactggagacttcactaaaattgaatctttttaaactggacttacttggaaatccaaaagagagctatcccttcctccctactgtgattgatggagtagttctgccaaaggcaccagaagagatcctggctgagaagagtttcagcactgtcccctacatagtgggcatcaacaagcaagagtttggctggatcattccaacgcttatgggctatccactcgctgaaggcaaactggaccagaagacagccaattctctcttgtggaagtcctacccaacacttaaaatctctgagaatatgattccagtggtcgctgagaagtatttaggagggacagatgacctcaccaaaaagaaagacctgttccaggacttgatggctgatgtggtatttggtgtcccatcagtgattgtgtctcgaagtcacagagatgctggagcctccacctatatgtatgagtttgagtatcgcccaagctttgtatcgcgccatgaagacccaaaggcagtaataggagaccatggtgatgagatcttctcagtatttggatctccatttttaaaagatggtgcctcagaagaggagaccaacctcagcaagatggtgatgaaattctgggccaactttgctcggaatgggaaccccaatggtggagggctgccccactggccaagaaatatgaccaagaaggaagggtatctgaagattggtgcctcaactcaggcagcccagaggctgaaggacaaagaagtgagtttttgggctgagctcagggccaaggagtcagcccagaggccatcccacagggaacatgttgagctttgaatgggcggctcca

SEQ ID NO: 348 - protein, 567 aa, Homo sapiens [sequence omitted]

SEQ ID NO: 349 - DNA, 533 bp, Rattus norvegicus
  misc_feature (1)..(533): n=a, c, g or t
  ref <308>: DATABASE ACCESSION NUMBER: EMBL / AA859585
  ref <309>: DATABASE ENTRY DATE: 2000-03-03
tttttttttttttttttggtggtttggaattcttttctcttttgttaaaagaggggtaggaaatggggaccaggtacccctgggctctgggaaacaggcatgcagggaacccttgcaggcaggggctgggtagaagagtcctggagtttcccataatccttcgcaggaaacagcaatgctggcagataaggaggtggagtgaggcagggcccttcaaacaacagggtggcgggccaaggggcttggggctcactctaacatgcaaagtccagctgccccataaactaggttgcttttgaagagcgacatacgtataaatacataagacacagctacacgcacacatgcggagaaggctctgcattcccaagggtanggatctaggcctactggccccaagacaggagtcatcatgtgtctgccaccaagtgattctctgaaacactccaggtggtggggccaggcaggtaagtcttcgttgggatggctgcttggtctccaaggtgctgcccactaggcacccaagccacttt

SEQ ID NO: 350 - DNA, 952 bp, Rattus norvegicus
  ref <308>: DATABASE ACCESSION NUMBER: Refseq / NM_031093
  ref <309>: DATABASE ENTRY DATE: 2003-01-13
cggccaggttgacagttgggcagaagctcttggttcctcttcaagtggtaatgccttcatgccaactttgccgaagtaacctggatgatatttgtcaaagttgatcctgtggtgatgcatgcctccagcattcccgcggcctcctgggtgcttgcggtgcttaccgatgcgaccgtggccgtggctcacgtggccccggagtttccgtcttcctaccagtctggatggcatggcggtgcagattcttttcagtcctctgaagactgcacacaggatggctgcaaacaagcccaagggtcagaattctttggccttacacaaagtcatcatggtgggcagtggtggtgtgggcaagtctgctctgactctgcagttcatgtatgatgagtttgtagaagactatgaacctaccaaagcagacagctacaggaagaaggtagtgctggatggggaggaagtgcagatcgacatcttagatacagcagggcaggaagactacgctgcaattagagacaactacttccgaagtggggaaggattcctctgtgtcttctctatcacagagatggagtcctttgcagctacagcggacttcagggaacagattttaagagtaaaagaagatgagaatgtcccatttctcctggttggtaacaaatcagatttagaagataaaaggcaggtttctgtagaagaggcaaaaaacagagctgaccagtggaacgttaactatgtggagacgtctgctaaaacgcgcgccaacgttgacaaggtattttttgatttaatgagggaaatacgagccagaaagatggaagacagcaaagaaaaaaatggaaaaaagaagaggaaaagtttagccaagagaatcagagaaagatgctgcattttataatcaaagcccaaactcctttcttatcctgacctgaccatactaataaatataatttat

SEQ ID NO: 351 - protein, 206 aa, Rattus norvegicus
  ref <308>: DATABASE ACCESSION NUMBER: Refseq / NP_112355
  ref <309>: DATABASE ENTRY DATE: 2003-01-13
MAANKPKGQNSLALHKVIMVGSGGVGKSALTLQFMYDEFVEDYEPTKADSYRKKVVLDGEEVQIDILDTAGQEDYAAIRDNYFRSGEGFLCVFSITEMESFAATADFREQILRVKEDENVPFLLVGNKSDLEDKRQVSVEEAKNRADQWNVNYVETSAKTRANVDKVFFDLMREIRARKMEDSKEKNGKKKRKSLAKRIRERCCIL

SEQ ID NO: 352 - DNA, 630 bp, Homo sapiens
  ref <308>: DATABASE ACCESSION NUMBER: Refseq / NM_005402
  ref <309>: DATABASE ENTRY DATE: 2000-11-01
atggtcgactacctagcaaataagcccaagggtcagaattctttggctttacacaaagtcatcatggtgggcagtggtggcgtgggcaagtcagctctgactctacagttcatgtacgatgagtttgtggaggactatgagcctaccaaagcagacagctatcggaagaaggtagtgctagatggggaggaagtccagatcgatatcttagatacagctgggcaggaggactacgctgcaattagagacaactacttccgaagtggggaggggttcctctgtgttttctctattacagaaatggaatcctttgcagctacagctgacttcagggagcagattttaagagtaaaagaagatgagaatgttccatttctactggttggtaacaaatcagatttagaagataaaagacaggtttctgtagaagaggcaaaaaacagagctgagcagtggaatgttaactacgtggaaacatctgctaaaacacgagctaatgttgacaaggtattttttgatttaatgagagaaattcgagcgagaaagatggaagacagcaaagaaaagaatggaaaaaagaagaggaaaagtttagccaagagaatcagagaaagatgctgcattttataa

SEQ ID NO: 353 - protein, 209 aa, Homo sapiens
  ref <308>: DATABASE ACCESSION NUMBER: Refseq / NP_005393
  ref <309>: DATABASE ENTRY DATE: 2000-11-01
MVDYLANKPKGQNSLALHKVIMVGSGGVGKSALTLQFMYDEFVEDYEPTKADSYRKKVVLDGEEVQIDILDTAGQEDYAAIRDNYFRSGEGFLCVFSITEMESFAATADFREQILRVKEDENVPFLLVGNKSDLEDKRQVSVEEAKNRAEQWNVNYVETSAKTRANVDKVFFDLMREIRARKMEDSKEKNGKKKRKSLAKRIRERCCIL

SEQ ID NO: 354 - DNA, 2309 bp, Rattus norvegicus
  ref <308>: DATABASE ACCESSION NUMBER: Refseq / NM_032083
  ref <309>: DATABASE ENTRY DATE: 2003-01-13
ggcacgaggacactgatgagcagagaagaaagctttcagcaatgtgtcatttgtcacaattgtcaggctttttaaaaaaggactcccaaagagagatgctgcatgttttctgtgttaacacagactgatttcctctccagactctttaagtttgcagaagcttaaatatagagccctgtttaaaaaaaaaaaggaagagagaatttgtgtgttaatcggccttgtgaagaagtgcttcatcacccttctgcacctccctgtgctctggtgtgtggcgtggccacggctctctaggttagggctctgagctggctgcagcatgctcatgtgttagctgagtagagttcaccggcagtcgcaggctgatacagggttttttgttttttgttttttgtttttctattcctttgagtatcaaaatgccatccaaagagtcctggtcggggaggaaaactaatagagctacagttcacaaatcaaaccaagagggccgtcagcaagatttattgatagcagccttgggaatgaaactgggttctcaaaagtcgtctgtgacaatctggcaacctctgaaactctttgcttattcgcagttgacatcacttgttagaagagcaactctgaaagaaaatgaacaaattccaaaatatgagaaggttcacaatttcaaggtgcatacgttccgagggccacactggtgtgaatactgtgccaacttcatgtggggcctcattgctcagggagtgaaatgtgcagattgtgggttgaatgttcataagcagtgttccaagatggtccccaatgactgtaagccagacctgaagcacgtgaagaaggtgtatagctgtgacctgacaacactcgtgaaagctcacatcaccaagaggcccatggtggtagacatgtgcatcagggagatcgagtccagaggtctgaattctgaaggactctaccgagtgtcgggatttagtgacctaattgaagacgtcaagatggcttttgatagagacggtgaaaaggcggatatttctgtgaacatgtatgaggacatcaacattatcactggagcgcttaaactgtacttcagggatctgccaattcctctcatcacctacgatgcctaccccaagttcatagagtctgccaaaattgtggaccctgatgagcaactggagacccttcatgaagcactgaggtctctgccgcccgcccactgcgagacgctccggtacctcatggcacacctcaagagagtgacccttcacgagaaggagaatctgatgagtgcagagaaccttgggatcgtgtttggtccaaccctcatgagatcaccagagctagaccccatggccgccctgaacgacatacgctatcagagactggtggtggagctgcttatcaaaaatgaagacattttattttagagttttgacttgaggagaaaaagaaatggtttacagatgaaggaatgttttctagtaatttaattagcttcattagctgaattgtttcttggttagaggtttggccaaatacccagattaaaatgaaggaacttcctgtcatttctctagcaccgctcagccgtccttgtaaaaccgtgaacacacgctttctggtcctggtaatcctgggtgtttatcatgttaagagaaactcaagctactgcatgattacccctttttggtgaggaaaccccatattgaagaatcacagacttgttcctgcaccatctctctgtcctgggttgtctgtggttgtcacccagcatgcttcccagagtaaactgtcatgacattgcttttggggtccataccactggtttctgacgcttgcacatgcgcacacgtgcacacgtactcacacacacacacatgcacatacacatacacacacatacacaccacacacacaccacaaacacacacacaccacaaacacacaaacacactcacaccacaaacacgcacacacacaccacaaacacactcacaccacaaacacgcacacacacaccacaaacacactcacacacacacagacacacacgtataagcagcaccctggctgttgcactctcatccctgtaccatacgccagctccacagcagttccttcccagcttcctcctctcagacatagtgctttgtcttcagcagaagcgagacgtgttttcagatgttacttcagtaagcttccaataaaaatgcaccacacagcactttcctgttaaattattggttttcaactgtaaatttatatttttacctggcatgcagttattaatttattaaatttggcctcgtgcc

SEQ ID NO: 355 - protein, 334 aa, Rattus norvegicus
  ref <308>: DATABASE ACCESSION NUMBER: Refseq / NP_114472
  ref <309>: DATABASE ENTRY DATE: 2003-01-13
MPSKESWSGRKTNRATVHKSNQEGRQQDLLIAALGMKLGSQKSSVTIWQPLKLFAYSQLTSLVRRATLKENEQIPKYEKVHNFKVHTFRGPHWCEYCANFMWGLIAQGVKCADCGLNVHKQCSKMVPNDCKPDLKHVKKVYSCDLTTLVKAHITKRPMVVDMCIREIESRGLNSEGLYRVSGFSDLIEDVKMAFDRDGEKADISVNMYEDINIITGALKLYFRDLPIPLITYDAYPKFIESAKIVDPDEQLETLHEALRSLPPAHCETLRYLMAHLKRVTLHEKENLMSAENLGIVFGPTLMRSPELDPMAALNDIRYQRLVVELLIKNEDILF

SEQ ID NO: 356 - DNA, 2315 bp, Homo sapiens
  ref <308>: DATABASE ACCESSION NUMBER: Refseq / NM_001822
  ref <309>: DATABASE ENTRY DATE: 2002-11-05
gccaagcctcctgcctcgcaggtacctcctcccgcgcgcacgctccgcgcctgatggcagcgacaagtgccggctcgcggagagctagcggggctccctgggcccggtgcgcgcacaataacgcgtgaataactttttcttgcagcggtcccccgcgtcccggcctgcagcctccccgggcgccggcgcccccagcacgccccatcgggcaccccactctctccgaggtgtgggtgcggcgggctgatgaggtgatccctagcccgcctgggaggagcgcctggactcgcgggcggcggcgagcgcctttacaatggccctgaccctgtttgatacagatgaatatagacctcctgtttggaaatcttacttatatcagctacaacaggaagcccctcatcctcgaagaattacctgtacttgcgaggtggaaaacagaccaaagtattatggaagagagtttcatggcatgatctccagagaagcagccgaccagctcttgattgtggctgaggggagctacctcatccgggagagccagcggcagccagggacctacactttggctttaagatttggaagtcaaaccagaaacttcaggctctactacgatggcaagcactttgttggggagaaacgctttgagtccatccacgatctggtgactgatggcttgattactctctatattgaaaccaaggcagcagaatacattgccaagatgacgataaacccaatttatgagcacgtaggatacacaaccttaaacagagagccagcatacaaaaaacatatgccagtcctgaaagagacacatgatgagagagattctacaggccaggatggggtgtcagagaaaaggttgacatcacttgttagaagagcaactctgaaagaaaacgagcaaattccaaaatatgaaaagattcacaatttcaaggtgcatacattcagagggccacactggtgtgaatactgtgccaactttatgtggggtctcattgctcagggagtgaaatgtgcagattgtggtttgaatgttcataagcagtgttccaagatggtcccaaatgactgtaagccagacttgaagcatgtcaaaaaggtgtacagctgtgaccttacgacgctcgtgaaagcacataccactaagcggccaatggtggtagacatgtgcatcagggagattgagtctagaggtcttaattctgaaggactataccgagtatcaggatttagtgacctaattgaagatgtcaagatggctttcgacagagatggtgagaaggcagatatttctgtgaacatgtatgaagatatcaacattatcactggtgcacttaaactgtacttcagggatttgccaattccactcattacatatgatgcctaccctaagtttatagaatctgccaaaattatggatccggatgagcaattggaaacccttcatgaagcactgaaactactgccacctgctcactgcgaaaccctccggtacctcatggcacatctaaagagagtgaccctccacgaaaaggagaatcttatgaatgcagagaaccttggaatcgtctttggacccacccttatgagatctccagaactagacgccatggctgcattgaatgatatacggtatcagagactggtggtggagctgcttatcaaaaacgaagacattttattttaaatttttaatttgaggggaaaagaaatgttttacagatgaaggaatgttttatagtaatttaatttgctcctgtagctgcattatttcttgattagaggtttgggcatataaccagattaaagtgaaggaactttctgttgtttttgtagcaccgctcagctgtcttgtaaaacagtgaacacacgctttctggttctagtaatcctgggtgtttatcacgttcagagaaactcaagctattgcatgattagccccctatctggcaaggaaaccccatacagaagaaacaacaaacctgcgcctgcaccgcctctgcgtcctgggtagtctgtgcttgtaatccagcatgtttcacagagtaagcctgttgtgactttgcttttggggtctatgtcattggtttctgatgcttgtacaaacacgcacacacaaatggataaaacagcacctctggctgttacattaccataaaccatatcacatgcctacattttacaaatgatttctggtttctcttagttcttctctaacatagtactttctttccagcaaaagcaaaatgtgttttcagatttgttactttaataaaggttatccataccaataaaaaaaaaaaaaaaaa

SEQ ID NO: 357 - protein, 459 aa, Homo sapiens
  ref <308>: DATABASE ACCESSION NUMBER: Refseq / NP_001813
  ref <309>: DATABASE ENTRY DATE: 2002-11-05
MALTLFDTDEYRPPVWKSYLYQLQQEAPHPRRITCTCEVENRPKYYGREFHGMISREAADQLLIVAEGSYLIRESQRQPGTYTLALRFGSQTRNFRLYYDGKHFVGEKRFESIHDLVTDGLITLYIETKAAEYIAKMTINPIYEHVGYTTLNREPAYKKHMPVLKETHDERDSTGQDGVSEKRLTSLVRRATLKENEQIPKYEKIHNFKVHTFRGPHWCEYCANFMWGLIAQGVKCADCGLNVHKQCSKMVPNDCKPDLKHVKKVYSCDLTTLVKAHTTKRPMVVDMCIREIESRGLNSEGLYRVSGFSDLIEDVKMAFDRDGEKADISVNMYEDINIITGALKLYFRDLPIPLITYDAYPKFIESAKIMDPDEQLETLHEALKLLPPAHCETLRYLMAHLKRVTLHEKENLMNAENLGIVFGPTLMRSPELDAMAALNDIRYQRLVVELLIKNEDILF

SEQ ID NO: 358 - DNA, 310 bp, Rattus norvegicus
  ref <308>: DATABASE ACCESSION NUMBER: EMBL / AA800844
  ref <309>: DATABASE ENTRY DATE: 2000-03-03
aagtaagattagaaacaacaagattttttttgaggctgatgagtgcaaagagaaacgctaaacatcagggggccggcaacagacaaaatggtgttgtagaggagacttaggtacaaaacggggtctggcatccagaggccctgtgggtttgggccatgttcactccctgaggccggcggggagggatgccccagcgggcagctgccctcgccctccggctaggcgggtaggcttcttgggggaggcggcctgcaagcaggtcctgcttttcaaggggagacaacgggggctccgtccactgagatcagga

SEQ ID NO: 359 - DNA, 2328 bp, Homo sapiens
  ref <308>: DATABASE ACCESSION NUMBER: Refseq / NM_005576
  ref <309>: DATABASE ENTRY DATE: 2002-11-05
gccagccgagcggccagccagtgcggggctggccatgtaaggcccacaggcggtcctgcccgcccggtgccctgcggagagcctcgtgcagccctgggcaccgcccctgccctgccctgaccccttggccttgaaatgctgtcatcggaggagccgtcccgctcgggacaaggccagcatggacaaagctagagctggggcaagcaaggagccttcctgtcctcgaggccgtgggaagagaagcacgcccagggggccactcctgagagcctctctgtccaccaggcctctgcagaggggtcaccatggctctggcccgaggcagccggcagctgggggccctggtgtggggcgcctgcctgtgcgtgctggtgcacgggcagcaggcgcagcccgggcagggctcggaccccgcccgctggcggcagctgatccagtgggagaacaacgggcaggtgtacagcttgctcaactcgggctcagagtacgtgccggccggacctcagcgctccgagagtagctcccgggtgctgctggccggcgcgccccaggcccagcagcggcgcagccacgggagcccccggcgtcggcaggcgccgtccctgcccctgccggggcgcgtgggctcggacaccgtgcgcggccaggcgcggcacccattcggctttggccaggtgcccgacaactggcgcgaggtggccgtcggggacagcacgggcatggccctggcccgcacctccgtctcccagcaacggcacgggggctccgcctcctcggtctcggcttcggccttcgccagcacctaccgccagcagccctcctacccgcagcagttcccctacccgcaggcgcccttcgtcagccagtacgagaactacgaccccgcgtcgcggacctacgaccagggtttcgtgtactaccggcccgcgggcggcggcgtgggcgcgggggcggcggccgtggcctcggcgggggtcatctacccctaccagccccgggcgcgctacgaggagtacggcggcggcgaagagctgcccgagtacccgcctcagggcttctacccggcccccgagaggccctacgtgccgccgccgccgccgccccccgacggcctggaccgccgctactcgcacagtctgtacagcgagggcacccccggcttcgagcaggcctaccctgaccccggtcccgaggcggcgcaggcccatggcggagacccacgcctgggctggtacccgccctacgccaacccgccgcccgaggcgtacgggccgccgcgcgcgctggagccgccctacctgccggtgcgcagctccgacacgcccccgccgggtggggagcggaacggcgcgcagcagggccgcctcagcgtaggcagcgtgtaccggcccaaccagaacggccgcggtctccctgacttggtcccagaccccaactatgtgcaagcatccacttatgtgcagagagcccacctgtactccctgcgctgtgctgcggaggagaagtgtctggccagcacagcctatgcccctgaggccaccgactacgatgtgcgggtgctactgcgcttcccccagcgcgtgaagaaccagggcacagcagacttcctccccaaccggccacggcacacctgggagtggcacagctgccaccagcattaccacagcatggacgagttcagccactacgacctactggatgcagccacaggcaagaaggtggccgagggccacaaggccagtttctgcctggaggacagcacctgtgacttcggcaacctcaagcgctatgcatgcacctctcatacccagggcctgagcccaggctgctatgacacctacaatgcggacatcgactgccagtggatcgacataaccgacgtgcagcctgggaactacatcctcaaggtgcacgtgaacccaaagtatattgttttggagtctgacttcaccaacaacgtggtgagatgcaacattcactacacaggtcgctacgtttctgcaacaaactgcaaaattgtccaatcctgatctccgggagggacagatggccaatctctccccttccaaagcaggccctgctccccgggcagcctcccgccgaggggcccagcccccaacccacaggcagggaggggcatccctccctgccggcctcagggagcgaacgtggatgaaaaccacagggattccggatgccagaccccattttatacttcacttttctctacagtgttgttttgttgttgttggtttttattttttatactttggccataccacagagctagattgcccaggtctgggctgaataaaacaaggtttttct

SEQ ID NO: 360 - protein, 574 aa, Homo sapiens
  ref <308>: DATABASE ACCESSION NUMBER: Refseq / NP_005567
  ref <309>: DATABASE ENTRY DATE: 2002-11-05
MALARGSRQLGALVWGACLCVLVHGQQAQPGQGSDPARWRQLIQWENNGQVYSLLNSGSEYVPAGPQRSESSSRVLLAGAPQAQQRRSHGSPRRRQAPSLPLPGRVGSDTVRGQARHPFGFGQVPDNWREVAVGDSTGMALARTSVSQQRHGGSASSVSASAFASTYRQQPSYPQQFPYPQAPFVSQYENYDPASRTYDQGFVYYRPAGGGVGAGAAAVASAGVIYPYQPRARYEEYGGGEELPEYPPQGFYPAPERPYVPPPPPPPDGLDRRYSHSLYSEGTPGFEQAYPDPGPEAAQAHGGDPRLGWYPPYANPPPEAYGPPRALEPPYLPVRSSDTPPPGGERNGAQQGRLSVGSVYRPNQNGRGLPDLVPDPNYVQASTYVQRAHLYSLRCAAEEKCLASTAYAPEATDYDVRVLLRFPQRVKNQGTADFLPNRPRHTWEWHSCHQHYHSMDEFSHYDLLDAATGKKVAEGHKASFCLEDSTCDFGNLKRYACTSHTQGLSPGCYDTYNADIDCQWIDITDVQPGNYILKVHVNPKYIVLESDFTNNVVRCNIHYTGRYVSATNCKIVQS

SEQ ID NO: 361 - DNA, 5186 bp, Rattus norvegicus
  ref <308>: DATABASE ACCESSION NUMBER: Refseq / NM_024364
  ref <309>: DATABASE ENTRY DATE: 2003-01-13
gaatgatctgggcagcatcccaatagcaggtgacacagagtcagggccaggatccagcctccctgtcctcaaagctgagtgtcttctactgagctaaccttttgcagtcttgcttcctaaccatttccaagacttgtaaccagactcctagctccttaaggccagcgcctttcatcctagaagtgaccaccttctattgactttggacccctaaattcagataggggtcagaatttaggaaaggatatcaacttcctgccatgaagtagaatgcttttggccacctgtggaaggctgctttgtgtcctactgttgactgacacttgatttactggtttgagccactttggtgttcctagggtggtgctcatggttaagatacacggcccatgggtctaaggagttcatgctttgtccttacgctccaggacccccccctgggagagccccatgagggtaggagagtgatggagagtatgcccagcttcctgaaggacaccccagcctgggagaagactgcccctgtgaacggcattgtgggacaggagcctggtacctccccgcaggatggcttgcaccatggggcactgtgcctaggagaacctgttcccttttggaggggtgttctgagcgccccagactcctggctccctcctggcttcctccaaggccccaaggacacactctcagtggtggagggtgagggttctcggaatggggagaggaaagccaactggctgggtagcaaggagggactacgttggaaggaagcgatgctggcccatccactggccttctgtgggccagcatgcccacctcgctatggccccctgatacctgagcatagcagtggccatcccaagagtgaccctgtggccttccggcccttgcactgccctttcctgctggagaccaagattctagagcgagctcccttctgggttcctacctgcttgcctccctacctgatgtccagcctgcctccagagcgttcgtatgactggcctttggccccaagcccctgggtatactctgggagccagccaaaagtgccctctgccttcagcttaggcagcaagggcttttaccacaaggatccaaacatcctcaggccagcaaaggagcccttggcagcgtcagagtctgggatgttgggcttagctcctggagggcatctccagcaagcctgcgatgcagaaggcccctcgcttcaccagagggatggggagacaggagctggcaggcagcagaatctttgcccagttttcttggggtacccagacactgttcctcgaaccccctggccttcttgtcccccaggcctggttcacactctcggtaacgtttgggctgggccaggaagtaacagctttgggtaccagctaggcccaccagtcacaccaaggtgcccatcacctgggcctcccacccctccagggggctgttgctcatcccatctgcctgccagagagggtgatcctggcccttgtaggaaatgtcaggatagcccagagggaagtagcagtgggccaggggaatccagtgaagaaagaaacaaggctggctccagggcctctcctccaagccatcacaccaagctgaaaaagacctggctcacacgccactcggaacagttcgagtgcccaggtggctgtcctgggaagggagagagcccagccactgggctccgggcactcaagagggcaggcagtccagaggtccagggagcaaggggcccggctcccaaacgcccatcccacactttcccaggtactgggaggcagggggccagggcttggcaggagacaccagagacatccacaggaagcaaggcagaggcacagcaacaagaggagcaaagagggccccgagatggcaggattcggctccgggaatccagacttgaggatacatcctgccagcatcacttagcaggtgtcactcagtgcccaagctgtgtccaggcagctggagaggtggagatactgaccagccactcccagaaatcacataagttacccctggaagagaagccgttggaggaggattcctgtgccacttctgaggaaggaggagggtctagcccagaagcttccatcaacaagggactagccaagcatctactgagtggtctgggtgaccgactctgccgcctgctgcggaaggagcgggaagccctcgcctgggcacagcgtgaaggccaggggccagccatgacagaggacagcccaggcattccacactgctgcagccgttgccaccacggactcttcaacacccactggagatgttcccactgtagccaccggctgtgtgtagcctgtggtcgcatagccggagctgggaagaacagggagaaaacaggctctcgggagcagcgcacagatgactgtgcccaggaggctgggcatgctgcctgttccctgattctgacccagtttgtctccagccaggcgctggcagaactgagcactgtgatgcaccaagtctgggccaagtttgacattcgggggcactgtttctgtcaagtcgatgcccgtgtgtgggcccccggggatgggggtcagcagaaggaaccaacagagaaaactcccccagctccacaactttcctgcaatggagattccaatcggaccaaggacatcaaagaagagaccccagactccacagagagcccagcagaggaccgtgctggccggtcaccacttccttgtccctctctttgtgagctgctagcctctacagctgtcaaactctgcctggggcatgagcggattcacatggcctttgccccggtcaccccggctctgcccagtgatgaccgcattaccaacatcctggacagcattattgcgcaggtagtagaacggaagatccaagagaaagccctggggccaggccttcgagcagggtcaggcttacgaaagggcctgagcctgcccctgtcaccagtgcgaacccagttgtctcctcctggagctctgctgtggctgcaagagcccaggcctaagcacggctttcgtctcttccaggagcactggcggcagggccagcctgtgttagtatcaggcatccagaagacattgagacttagcctgtggggaatggaagcccttgggacacttggtggccaggtgcagacactgactgcccttgggccgccccaacccaccagcctggacagcacagcattctggaagggattctctcatcctgaggcacgtccaaagttagatgagggctctgtcctcctgctacaccgacccctgggggataaggacgagagcagggtggagaaccttgcctccagccttccactcccagagtactgtgcccaccaagggaaactcaacctagcgtcctacctccccctgggtctcacactgcatccactggagccccagctctgggcagcctatggtgtgaactcgcaccgtggacacctggggaccaagaacctatgtgtggaggtgtctgacctaatcagtatcctggtgcatgctgaggcacagctgcctccctggtaccgagcacagaaagattttctctcaggcctggatggggaagggctctggtctccaggtagccagaccagcactgtgtggcatgtgttccgagcccaggatgcccagcgtatccgtcgctttctccagatggtgtgcccagctggagcaggaaccttggagcctggtgccccaggcagctgctacttggattcagggttgcgacgcaggttaagggaggagtggggtgtgagctgctggacactgctgcaggctcctggagaagcggtgctggtgcctgctggggcaccccatcaggtacagggcttggtgagcacaatcagtgtcactcagcactttctgtctcctgagacctcggccctctctgctcagctctgccaccagggagccagcctgccccctgaccatcgtatgctttatgcccagatggaccgggctgtgttccaagcagtgaaggtggcggtggggacattacaggaagctaaataggggaccctggtgcctggagggggcgggggtggagcaggtaactgagtgttcagtctgcatgatttcagcggggaatggtactgtggaacttaggtggtgtgatccgttctacaaatatctctttgggtacaagcagggaaccctgttccctcaccctggccctggctctaaagggaacaactgtagtgcttacagccgctcccctctccacggtatcaggttcaccctaggggtccatgactccttctaagccccactccaggggataagtacccttccttggggaagcttgggaattgttttagtttaagcaacacttcctctggctgcttcaccctgtgttctccctggcatccccacgcccacccctggctgtgctacagctcaccagcatccacacaaagttccgactgtaggtgtgctggaccgggagccacagaattcttcccttactgtggagttggggaggagaggacctcagttaatgggccatactggctggagggaacaccatgggcagaaccactgggtcccccgcttctgcctctctccttccctgtcactgttaaaattggttgttcagtgactgctgccagcatagttggcctcactctgctggccacgtgggctaggggggaaaaggcaaacacagaaatctgaactggagcagaagccagtggacagggtgagagggactggggactgtgacagagacctcacataccactgccagatctttgggagcccccctggagctttctggggactgaagatgttcctgacttacagagggaaggcagagttctaaggacagcactgagatagcctccctgggtggcatcaacctgtggagattacagaaccccctgcctctgtcccacctgtcctgtgcgttctgacttggagagacatccaggatagccctggctcaacccaactactcttggtgtccaagccaccaggacagagcttcactgcctcaaacagctgacccctaccctcatggcccttctggtgccaacagctgaccccacggccctctggtactgccttgtctcctacctcttccttgtgtatctcaacgcacacatgcgccagctcttgttatacttaacagttcctgctgtggtttggggctttttttttaattaaataaaagtttttattataaat

SEQ ID NO: 362 - protein, 1207 aa, Rattus norvegicus
  ref <308>: DATABASE ACCESSION NUMBER: Refseq / NP_077340
  ref <309>: DATABASE ENTRY DATE: 2003-01-13
MGLRSSCFVLTLQDPPLGEPHEGRRVMESMPSFLKDTPAWEKTAPVNGIVGQEPGTSPQDGLHHGALCLGEPVPFWRGVLSAPDSWLPPGFLQGPKDTLSVVEGEGSRNGERKANWLGSKEGLRWKEAMLAHPLAFCGPACPPRYGPLIPEHSSGHPKSDPVAFRPLHCPFLLETKILERAPFWVPTCLPPYLMSSLPPERSYDWPLAPSPWVYSGSQPKVPSAFSLGSKGFYHKDPNILRPAKEPLAASESGMLGLAPGGHLQQACDAEGPSLHQRDGETGAGRQQNLCPVFLGYPDTVPRTPWPSCPPGLVHTLGNVWAGPGSNSFGYQLGPPVTPRCPSPGPPTPPGGCCSSHLPAREGDPGPCRKCQDSPEGSSSGPGESSEERNKAGSRASPPSHHTKLKKTWLTRHSEQFECPGGCPGKGESPATGLRALKRAGSPEVQGARGPAPKRPSHTFPGTGRQGARAWQETPETSTGSKAEAQQQEEQRGPRDGRIRLRESRLEDTSCQHHLAGVTQCPSCVQAAGEVEILTSHSQKSHKLPLEEKPLEEDSCATSEEGGGSSPEASINKGLAKHLLSGLGDRLCRLLRKEREALAWAQREGQGPAMTEDSPGIPHCCSRCHHGLFNTHWRCSHCSHRLCVACGRIAGAGKNREKTGSREQRTDDCAQEAGHAACSLILTQFVSSQALAELSTVMHQVWAKFDIRGHCFCQVDARVWAPGDGGQQKEPTEKTPPAPQLSCNGDSNRTKDIKEETPDSTESPAEDRAGRSPLPCPSLCELLASTAVKLCLGHERIHMAFAPVTPALPSDDRITNILDSIIAQVVERKIQEKALGPGLRAGSGLRKGLSLPLSPVRTQLSPPGALLWLQEPRPKHGFRLFQEHWRQGQPVLVSGIQKTLRLSLWGMEALGTLGGQVQTLTALGPPQPTSLDSTAFWKGFSHPEARPKLDEGSVLLLHRPLGDKDESRVENLASSLPLPEYCAHQGKLNLASYLPLGLTLHPLEPQLWAAYGVNSHRGHLGTKNLCVEVSDLISILVHAEAQLPPWYRAQKDFLSGLDGEGLWSPGSQTSTVWHVFRAQDAQRIRRFLQMVCPAGAGTLEPGAPGSCYLDSGLRRRLREEWGVSCWTLLQAPGEAVLVPAGAPHQVQGLVSTISVTQHFLSPETSALSAQLCHQGASLPPDHRMLYAQMDRAVFQAVKVAVGTLQEAK

SEQ ID NO: 363 - DNA, 5534 bp, Homo sapiens
  ref <308>: DATABASE ACCESSION NUMBER: Refseq / NM_018411
  ref <309>: DATABASE ENTRY DATE: 2002-11-05
tctcccgggagccactcccatgggcgcctctccagcccctggcctggaagcaccaggaaccctggggatggggcagaccctcacagcccggggtctggagccggtgtcggagctcatctgggcccatgacctctccagacatttggcaaaatcaaggcccttagaccagggacagacccaagcccaggccctcccagaggtcctaggacgcaaccctttgtgcccttgggctctggaagaggtttgggaagggtttggggtggaagatggcaaagagcagcttggccaggtgaggatgaggcagggcagacacaggccagtggggcgtgccatgtgccacagatggagaggaccaggagccagtggcccggcaggcacagcccggttggcgtgggccagagcgcccatcactgacccgtgagaactcgactgcccctgccagctctggcactgccccctcccagccgccccgccctagcaccctggggggcaccccgcccaaccgtggcctggtccggcccctcccgccctttgctccagttcccgggcttggcacctatagtgggggtgccgcccgcctgccaggctccggggccgggcccacgggagggtggggcggctgggaagctggcacgctgccccgggggagcctctctcggcaggcgcccgggtgccgcgggggggagggggaacaaagggctcattctccccgtgcgcagccggtggcatcgccggggcgttggcggaagcccccggggcccgggagggggcaggcccaggcgcggccgccgaatcacgggctcctgtttcccgcagggtgctggaggaggaaaccggcggagcagcttccccactctcagttgcgcttctggcgatggcgatcagaggtcctgctgcgctctccgccgcgctctacctccattagccgcgctgcgcggtgctgcgccctcgccggtgcctctctcctgggtcccaggatcggcccccaccatccaggcacgacccccttccccggcccctcggcctttcccccaactcggccatctccgacccggggcgcgtgttccccccggcccggcgccttctctccctccgggggcacccgctccctagccccggcccggccctccccgcggcgcagcacggagtctcggcgtcccatggcgcaacctacggcctcggcccagaagctggtgcggccgatccgcgccgtgtgccgcatcctgcagatcccggagtccgacccctccaacctgcggccctagagcgcccccgccgccccgggggaaggagagcgcgagcgcgctgagcagacagagcgggagaacgcgtcctcgcccgccggccgggaggccccggagctggcccatggggagcaggcgcccggtgccggccacgacgaccgccaccgcccgcgccgcgaccggccggtgaagcccagggacccccctctgggagagccccatgagggcaggagagtgatggagagtacgcccagcttcctgaagggcaccccaacctgggagaagacggccccagagaacggcatcgtgagacaggagcccggcagcccgcctcgagatggactgcaccatgggccgctgtgcctgggagagcctgctcccttttggaggggcgtcctgagcaccccagactcctggcttccccctggcttcccccagggccccaaggacatgctcccacttgtggagggcgagggcccccagaatggggagaggaaggtcaactggctgggcagcaaagagggactgcgctggaaggaggccatgcttacccatccgctggcattctgcgggccagcgtgcccacctcgctgtggccccctgatgcctgagcatagtggtggccatctcaagagtgaccctgtggccttccggccctggcactgccctttccttctggagaccaagatcctggagcgagctcccttctgggtgcccacctgcttgccaccctacctagtgtctggcctgcccccagagcatccatgtgactggcccctgaccccgcacccctgggtatactccgggggccagcccaaagtgccctctgccttcagcttaggcagcaagggcttttactacaaggatccgagcattcccaggttggcaaaggagcccttggcagctgcggaacctgggttgtttggcttaaactctggtgggcacctgcagagagccggggaggccgaacgcccttcactgcaccagagggatggagagatgggagctggccggcagcagaatccttgcccgctcttcctggggcagccagacactgtgccctggacctcctggcccgcttgtcccccaggccttgttcatactcttggcaacgtctgggctgggccaggcgatgggaaccttgggtaccagctggggccaccagcaacaccaaggtgcccctctcctgagccgcctgtcacccagcggggctgctgttcatcctacccacccactaaaggtgggggtcttggcccttgtgggaagtgccaggagggcctggaggggggtgccagtggagccagcgaacccagcgaggaagtgaacaaggcctctggccccagggcctgtccccccagccaccacaccaagctgaagaagacatggctcacacggcactcggagcagtttgaatgtccacgcggctgccctgaggtcgaggagaggccggttgctcggctccgggccctcaaaagggcaggcagccccgaggtccagggagcaatgggcagtccagcccccaagcggccaccggacccttttccaggcactgcagaacagggggctgggggttggcaggaggtgcgggacacatcgatagggaacaaggatgtggactcgggacagcatgatgagcagaaaggaccccaagatggccaggccagtctccaggacccgggacttcaggacataccatgcctggctctccctgcaaaactggctcaatgccaaagttgtgcccaggcagctggagagggaggagggcacgcctgccactctcagcaagtgcggagatcgcctctgggaggggagctgcagcaggaggaagacacagccaccaactccagctctgaggaaggcccagggtccggccctgacagccggctcagcacaggcctcgccaagcacctgctcagtggtttgggggaccgactgtgccgcctgctgcggagggagcgggaggccctggcttgggcccagcgggaaggccaagggccagccgtgacagaggacagcccaggcattccacgctgctgcagccgttgccaccatggactcttcaacacccactggcgatgtccccgctgcagccaccggctgtgtgtggcctgtggtcgtgtggcaggcactgggcgggccagggagaaagcaggctttcaggagcagtccgcggaggagtgcacgcaggaggccgggcacgctgcctgttccctgatgctgacccagtttgtctccagccaggctttggcagagctgagcactgcaatgcaccaggtctgggtcaagtttgatatccgggggcactgcccctgccaagctgatgcccgggtatgggcccccggggatgcaggccagcagaaggaatcaacacagaaaacgcccccaactccacaaccttcctgcaatggcgacacccacaggaccaagagcatcaaagaggagacccccgattccgctgagaccccagcagaggaccgtgctggccgagggcccctgccttgtccttctctctgcgaactgctggcttctaccgcggtcaaactctgcttgggccatgagcgaatacacatggccttcgcccccgtcactccggccctgcccagtgatgaccgcatcaccaacatcctggacagcattatcgcacaggtggtggaacggaagatccaggagaaagccctggggccggggcttcgagctggcccgggtctgcgcaagggcctgggcctgcccctctctccagtgcggccccggctgcctcccccaggggctttgctgtggctgcaggagccccagccttgccctcggcgtggcttccacctcttccaggagcactggaggcagggccagcctgtgttggtgtcagggatccaaaggacattgcagggcaacctgtgggggacagaagctcttggggcacttggaggccaggtgcaggcgctgagccccctcggacctccccagcccagcagcctgggcagcacaacattctgggagggcttctcctggcctgagcttcgcccaaagtcagacgagggctctgtcctcctgctgcaccgagctttgggggatgaggacaccagcagggtggagaacctagctgccagtctgccacttccggagtactgcgccctccatggaaaactcaacctggcttcctacctcccaccgggccttgccctgcgtccactggagccccagctctgggcagcctatggtgtgagcccgcaccggggacacctggggaccaagaacctctgtgtggaggtggccgacctggtcagcatcctggtgcatgccgacacaccactgcctgcctggcaccgggcacagaaagacttcctttcaggcctggacggggaggggctctggtctccgggcagccaggtcagcactgtgtggcacgtgttccgggcacaggacgcccagcgcatccgccgctttctccagatggtgcagggcctggtgagcacagtcagcgtcactcagcacttcctctcccctgagacctctgccctctctgctcagctctgccaccagggacccagccttccccctgactgccacctgctttatgcccagatggactgggctgtgttccaagcagtgaaggtggccgtggggacattacaggaggccaaatagagggatgctaggtgtctgggatcggggtggggacaggtagaccaggtgctcagcccaggcacaacttcagcaggggatggcgctaggggacttggggatttctggtcaaccccacaagcaccactctgggcacaagcagggcactctgttcccctcccccttaagccaacaaccacagtgccaccaagctcacacctgtccttctcaggctggcatctcccccaccctgtgccccttttcatggtaccaggcccgcactgggggcaattgacttcctccaatccccactcctccgagacccaggagacaaacagcccttccttggggaaacttgggaatcattctggcttaaacaacacctcctcctgctgctcactcccgctgagcccactctactgccccagctccgtttctaccaccgcatcctcactgggctcactgcaggcatgctgaacaaggggcctccaaccttctgccctcctgccaaaagatctggggagtgtgaggagagggtggcatcaggagctgctcaggcttggcggagggagcggcatgggcgatgtcactcagccccttcccggtccgcccgcttccctccttcatgatttccattaaagtctgttgttttgtgaaaaaaaaaaaaaaaaa

SEQ ID NO: 364 - protein, 1134 aa, Homo sapiens
  ref <308>: DATABASE ACCESSION NUMBER: Refseq / NP_060881
  ref <309>: DATABASE ENTRY DATE: 2002-11-05
MESTPSFLKGTPTWEKTAPENGIVRQEPGSPPRDGLHHGPLCLGEPAPFWRGVLSTPDSWLPPGFPQGPKDMLPLVEGEGPQNGERKVNWLGSKEGLRWKEAMLTHPLAFCGPACPPRCGPLMPEHSGGHLKSDPVAFRPWHCPFLLETKILERAPFWVPTCLPPYLVSGLPPEHPCDWPLTPHPWVYSGGQPKVPSAFSLGSKGFYYKDPSIPRLAKEPLAAAEPGLFGLNSGGHLQRAGEAERPSLHQRDGEMGAGRQQNPCPLFLGQPDTVPWTSWPACPPGLVHTLGNVWAGPGDGNLGYQLGPPATPRCPSPEPPVTQRGCCSSYPPTKGGGLGPCGKCQEGLEGGASGASEPSEEVNKASGPRACPPSHHTKLKKTWLTRHSEQFECPRGCPEVEERPVARLRALKRAGSPEVQGAMGSPAPKRPPDPFPGTAEQGAGGWQEVRDTSIGNKDVDSGQHDEQKGPQDGQASLQDPGLQDIPCLALPAKLAQCQSCAQAAGEGGGHACHSQQVRRSPLGGELQQEEDTATNSSSEEGPGSGPDSRLSTGLAKHLLSGLGDRLCRLLRREREALAWAQREGQGPAVTEDSPGIPRCCSRCHHGLFNTHWRCPRCSHRLCVACGRVAGTGRAREKAGFQEQSAEECTQEAGHAACSLMLTQFVSSQALAELSTAMHQVWVKFDIRGHCPCQADARVWAPGDAGQQKESTQKTPPTPQPSCNGDTHRTKSIKEETPDSAETPAEDRAGRGPLPCPSLCELLASTAVKLCLGHERIHMAFAPVTPALPSDDRITNILDSIIAQVVERKIQEKALGPGLRAGPGLRKGLGLPLSPVRPRLPPPGALLWLQEPQPCPRRGFHLFQEHWRQGQPVLVSGIQRTLQGNLWGTEALGALGGQVQALSPLGPPQPSSLGSTTFWEGFSWPELRPKSDEGSVLLLHRALGDEDTSRVENLAASLPLPEYCALHGKLNLASYLPPGLALRPLEPQLWAAYGVSPHRGHLGTKNLCVEVADLVSILVHADTPLPAWHRAQKDFLSGLDGEGLWSPGSQVSTVWHVFRAQDAQRIRRFLQMVQGLVSTVSVTQHFLSPETSALSAQLCHQGPSLPPDCHLLYAQMDWAVFQAVKVAVGTLQEAK

SEQ ID NO: 365 - DNA, 442 bp, Rattus norvegicus
  ref <308>: DATABASE ACCESSION NUMBER: EMBL / AA875017
  ref <309>: DATABASE ENTRY DATE: 2000-03-03
taccaaagactcctttaactgaggaaccagcaacagttaaaacacagacaagcgtgtgttacacccggggctcatgcgcgttgtttgatatgaatgttgaactacaaaggaacgcacaccacacagtttgagatgtaggtcccctctgatcctacagctagaacagtagacaatgttttaaatatcaaaagtgactttcagatactttgaatcgtttgggcaattttgggtggtttcgctatgccgtctcctaaggtcatataggaacaggagatcaacggccttcccaactgtgttgttcaggcctctgtggatctgcctagctgggaagaactaaagcaaaggcaggcatacccctgtagtggggtttggcagtggggatgtttctgtgtctgtcctgtaaataaatgtctgcctcacaataaaatatcttggttgactc

SEQ ID NO: 366 - DNA, 7025 bp, Rattus norvegicus
  ref <308>: DATABASE ACCESSION NUMBER: Refseq / NM_012508
  ref <309>: DATABASE ENTRY DATE: 2002-11-02
cgcagggccgggccgggccgggcgcgcagcaggggcggcggcagcggcagcggcagcggcggcggcggcatcatcgccccggagcgggcgcagggtttgccaccctcggagtgtggactaacagcagccgaggagacagagctgaacttggtcacgcagtccctagagtcagcaagacatgggttccattgtgcagctcctgacacctctgatgtaaccagatgacgtggaggggagctgtcccgaccatgtagatgccagccccagggatgatcagcatgggccccactgaatggagactcctgggtcagcattcctgagcctcttcggcccctggacctcaccccactcctggggacactcctcagagctctccagtgctgtcgccagcccacctcagccatcgcctcctcctgggactggaagttggcctcctggagctaataccctctggtgagggtgtactgaggacagccacacacagccatcacccacaggccccttttccagtgctgaccctcaggcccagcctgagcagaaacttcagcaaacatgggtgatatgaccaacagcgacttttactccaaaaaccaaagaaatgagtcgagccatgggggcgagttcgggtgcagcatggaggagctgcgctccctcatggagctgcggggcactgaggctgtggtcaagatcaaggagacatatggggacactgaatccatctgccggcgcctcaaaacctctcctgttgaaggtttgccaggcaccgctccagacctggaaaagaggaaacagattttcgggcaaaacttcatacctccaaagaaaccaaaaaccttcctgcagctggtgtgggaagcactacaggacgtgacgctcatcatcctggagatcgcggccatcatctccctgggactgtccttctaccacccacccggagagagcaatgaaggatgtgccacggcccaaggtggggcagaagatgaaggtgaagcagaagcaggctggatcgagggggctgccatcctgctgtcagtcatctgtgtggtcctcgtcacagccttcaatgattggagtaaagagaaacagttccggggcctgcagagccgaattgagcaggaacagaagttcaccgtagtccgggctggccaggtggtccagatccctgtggccgagattgtggttggggacattgcccagatcaaatacggtgacctccttcctgctgatggcctcttcatccagggcaatgacctcaagatcgatgaaagctcgctcacaggggagtctgaccaggtgcgcaagtctgtggataaggaccctatgttgctgtcaggaactcatgtgatggaaggctcaggacggatggtggtgactgctgtgggtgtcaactctcaaactggcatcatatttaccctgcttggggctggtggtgaagaggaagagaagaaagacaaaaaagccaagcagcaggatggggcagctgctatggaaatgcagcctctgaagagtgcggagggcggtgatgcagatgacaagaagaaagccaacatgcacaagaaagagaagtcggtgcttcagggcaagctcaccaagctggctgtgcagataggcaaggcgggcctggtgatgtcggccatcacggtgatcatcctggtgctctacttcaccgtggacaccttcgtggtcaacaagaagccgtggctgacggagtgcacaccggtctacgtgcagtacttcgtcaagttcttcatcattggtgtgacggtgctggtggtcgctgtgcccgagggcctccctctggctgtcaccatctcactggcctattccgtgaagaaaatgatgaaggacaacaacctggtccgtcacctggacgcctgtgagaccatgggtaacgccacagccatctgctcagacaagacaggcacgctgaccaccaaccgcatgaccgtggtgcaggcctatgtcggtgatgtccactacaaggagatccctgatcccagctccatcaatgccaagacattggagctgctggtcaacgccattgccatcaacagcgcctacaccaccaagatcctccccccagaaaaagagggcgccctgccccggcaggtgggcaacaagacagagtgtggcctgctgggcttcgtgctggacctgaggcaggattacgagccggtacgcagccagatgccagaggaaaagctgtataaggtgtacaccttcaactctgtgcgcaagtccatgagcaccgtcatcaagatgcctgacgagagcttccgcatgtacagcaaaggtgcttcggagattgtgctcaaaaagtgctgcaagattctcagtggggcaggggagccccgtgtcttccggccccgtgacagggatgagatggttaagaaggtgatcgagcccatggcctgtgacgggctccgtaccatctgtgtggcctatcgtgacttccccagcagccctgagcctgactgggacaatgagaatgacattctcaatgaactcacctgcatctgcgtggtgggcatcgaagacccagtgcgacctgaggtcccagaagccatccgcaagtgccagcgggccggtatcacagtccgcatggtcaccggtgacaacatcaacacagcccgggccatcgccatcaagtgtggcattatccaccctggagaggacttcctgtgcctggaaggcaaagaattcaatcggaggatccgcaacgagaagggggagattgagcaggagcggattgacaagatctggccaaagctgagggtgctggctcgatcctcgcccacggataagcacaccctggtcaaaggcatcatcgacagcacacacactgagcagcggcaggtggtggctgtgacaggggatgggaccaacgatgggcctgctctcaagaaggcagatgtgggcttcgcgatgggcatcgcaggcacggatgtggccaaggaggcctcagacatcatcctgacagacgacaacttcagcagcatcgttaaggcagtgatgtggggccgtaatgtctatgacagcatatccaaattcctgcagtttcagctgactgtcaatgtggtggctgtgatcgtggccttcacgggtgcctgcattacacaggactcccctctcaaggcggtgcagatgctctgggtgaacctcatcatggacacatttgcttccctggccctggcaacagagccacccaccgagactctgctcctgaggaaaccttacggccgcaacaagccgctcatctcgagaaccatgatgaagaacatcctgggccacgccgtctaccagctaaccctcatcttcaccctgctcttcgtgggtgagaagatgttccagattgacagcggaaggaacgccccgctgcactcgccaccctcggagcactacaccatcatcttcaacaccttcgtcatgatgcagcttttcaacgagatcaacgcccgtaagatccacggcgagcgtaacgtcttcgacggaatcttccggaaccccatcttctgcaccatcgttctcggcacttttgccatccagatagtgattgtgcagttcggcggcaaacccttcagctgctccccactccagctggaccagtggatgtggtgcatcttcataggcctgggagagctcgtctggggccaggtcattgccaccatccctaccagcaggctcaagtttctgaaagaggcagggcggctaacacagaaggaggagatccccgaggaagagttaaatgaggatgtggaagagatagaccacgcagagcgggagcttcgccgaggccagatcctatggttccggggcctgaatcggatccagacacagatccgcgtcgtgaaggcgttccgtagctctctctatgaagggttagaaaaacccgagtctcgaacctccatccataacttcatggctcatcctgaattccggatcgaagattcccagccccacatccccctcatcgatgacaccgacctggaagaagatgccgcgctcaagcagaactcgagcccgccgtcctcgctcaacaagaacaatagcgccatcgacagcgggatcaacctgacgaccgacacgagcaaatcagctacctcttcaagtccagggagccccatccacagcctggagacgtcgctttagctgaggcccctgtcgcctggccatgctcatggacccaccgccacccgcctccaggcgcacacccttccaggcaccaactccccgacgcagcaaggagcaatgggcggaacccacacagcggagagagaacccgtttccacacacagaccctttctctggctgccatgctgtttgaactctttttcactccttaggccatgggcggggttgcccccggggtcatctggagcagagagtggcgtggattgttttttttttttttccaaaacataaaaaaataataacgaattaatttttaaaaaaaagagcccttccaggctccagcccagacacggaccagccatgcacccgccagccactgcgtccccagcatgaatgtacctggacacttttaatcccctccctcgattggttcttggagggttagggaggggagttttttgtttgttttcttaggcgggaactgcaaacaggaactgcgaacagactgctgttcattcagtccactggtctatgaggtttcaaatgcttgcccagcatggtctcaaatgtctagattaatttaataactttttgaaatcacagagtaggtttgcaccaatgaaacccaagaactccacagacactcatgaggttatatccgtttctttgtatctatatcaacgtatacttcttgaagactgtatacgtgcgtatagataagtagatattatatatatatatacatatatatacatggatatataaagttcctttgccggcatgttgccttgtttctgcttaaattgctctattttaacttatgtcctaaaagaagaatgtaatttgtttacaaacctgtagataatgtctttggctatttgtgtggtttaagaacactggtggccgagatgcttacaaacagcttggcccaacagacacatcccctggattgcatccttgaagttttacgatagccatgctctgattttttgcctgctatttccgttcaataacgttactactgtgggaagctcaggcagaaagccaacagctcccaaggatccaccctgaggagctacgcaacatgctccaccgtagacaagggagaagaggagagaaggtggttcccccgggctggcaacatggctgtccaggtcccatgacgtcagtagtgcacccggagaaggaaggcttttctctcaatgaaactcgcttgagtttacagagagcatttcagaactgagttgtctttggcactgtctttgtgagtcaaggtagtgttcagatatcacagatgctattgtgttgattttttttttttttttagttagtagtttagaagtttctttccttataaacagcagcatagatactgctgacatactggatgagggttggtacggcttgctgctttcggtttttctttttgaagaatagccttttttctctgcactatttagatccgaatgaaccttatgatgtgtacattgagatgtattcagtgtgatttttaaaccaaattgtcttcctgtagttacaacatatactgtagccttttaacagcaagtcctgctttcccagacagaaagccattccgattatcttcccatatcacaggtgagaaaaggtggctatcccctcccccaacaataacagcactagtaatcccaactcaataagagcttgtctgtcggcctctgactgctaagcactttgtgggtctcagctttttttcataaaagaacttttgtatttaatacaaagtttgctttgagacttttcagcatacaatctttttccataaacttgtacagtgcaaaaagacattttgaataccatgaccggtggtgtcccgtgctttgaggaaaaccaaacactttccgcctcacttgtgaactccatccttcactctctcccttctcacaatcgctcctcgctcttcagcctggtccccagccctcctccaggcccagagacctcttcactaaacaagatgacagccacttgggaaaagagccatagtccgctgggagggcccacgtctggatggctgtgaaaaacttgagtgattggtttggggttcaaagtctgcccgtcccacctggccacaatctctctgtaaggaagaatatctctgaaggattctgaatgtatccaggagagagagagctgcctctccagcaggtggaccagccctagatatactcactggattccagtacagactccaccagaggcagcccacagtacccctccaagggagggaaggaaaccccggggctgccttcaaacaggataggtttttctttgggttttttgttgttgtttgattggtttgggggttttttggttttgttttttttgggggggggtttgttttttgttttttttttttttggtggggagtcctttgtcacatttttcatcctaccctcctccattcaaccatgcatctatgacctcaacctcattccatgccaccagggttcttgtgcttacaaaccagggtccttgggctttggaaccaagcctcaagggcaaagaggaaggggttctctgagcagagccaggttctcagacagggagcagaggaagctagcaaggaggcctgacattagcgctggcttcccggcgtcaggaatgagggatagcctatgctccagcccctcgttctcacactcttccatacacacctacataggagatggttggttggtcagaactcactgtagtacacaaagcttgcacttccgcgtcctatatctagcagcatgggatacgtttggcagttcaccccattagggggtcaataatttatgaccattcatctgtttttatgaatttttttatctagacaataattgtaaataaagaattcaccgtctctgctcatt

SEQ ID NO: 367 - protein, 1198 aa, Rattus norvegicus
  ref <308>: DATABASE ACCESSION NUMBER: Refseq / NP_036640
  ref <309>: DATABASE ENTRY DATE: 2002-11-02
MGDMTNSDFYSKNQRNESSHGGEFGCSMEELRSLMELRGTEAVVKIKETYGDTESICRRLKTSPVEGLPGTAPDLEKRKQIFGQNFIPPKKPKTFLQLVWEALQDVTLIILEIAAIISLGLSFYHPPGESNEGCATAQGGAEDEGEAEAGWIEGAAILLSVICVVLVTAFNDWSKEKQFRGLQSRIEQEQKFTVVRAGQVVQIPVAEIVVGDIAQIKYGDLLPADGLFIQGNDLKIDESSLTGESDQVRKSVDKDPMLLSGTHVMEGSGRMVVTAVGVNSQTGIIFTLLGAGGEEEEKKDKKAKQQDGAAAMEMQPLKSAEGGDADDKKKANMHKKEKSVLQGKLTKLAVQIGKAGLVMSAITVIILVLYFTVDTFVVNKKPWLTECTPVYVQYFVKFFIIGVTVLVVAVPEGLPLAVTISLAYSVKKMMKDNNLVRHLDACETMGNATAICSDKTGTLTTNRMTVVQAYVGDVHYKEIPDPSSINAKTLELLVNAIAINSAYTTKILPPEKEGALPRQVGNKTECGLLGFVLDLRQDYEPVRSQMPEEKLYKVYTFNSVRKSMSTVIKMPDESFRMYSKGASEIVLKKCCKILSGAGEPRVFRPRDRDEMVKKVIEPMACDGLRTICVAYRDFPSSPEPDWDNENDILNELTCICVVGIEDPVRPEVPEAIRKCQRAGITVRMVTGDNINTARAIAIKCGIIHPGEDFLCLEGKEFNRRIRNEKGEIEQERIDKIWPKLRVLARSSPTDKHTLVKGIIDSTHTEQRQVVAVTGDGTNDGPALKKADVGFAMGIAGTDVAKEASDIILTDDNFSSIVKAVMWGRNVYDSISKFLQFQLTVNVVAVIVAFTGACITQDSPLKAVQMLWVNLIMDTFASLALATEPPTETLLLRKPYGRNKPLISRTMMKNILGHAVYQLTLIFTLLFVGEKMFQIDSGRNAPLHSPPSEHYTIIFNTFVMMQLFNEINARKIHGERNVFDGIFRNPIFCTIVLGTFAIQIVIVQFGGKPFSCSPLQLDQWMWCIFIGLGELVWGQVIATIPTSRLKFLKEAGRLTQKEEIPEEELNEDVEEIDHAERELRRGQILWFRGLNRIQTQIRVVKAFRSSLYEGLEKPESRTSIHNFMAHPEFRIEDSQPHIPLIDDTDLEEDAALKQNSSPPSSLNKNNSAIDSGINLTTDTSKSATSSSPGSPIHSLETSL

SEQ ID NO: 368 - DNA, 1581 bp, Rattus norvegicus
  ref <308>: DATABASE ACCESSION NUMBER: Refseq / NM_022668
  ref <309>: DATABASE ENTRY DATE: 2003-01-14
ggcttcttggggtaagggacatgcagccagagggccttagcttggcctgatcctgctgtcagggaccctgtccccagtaaccataaagatggccggtgtgtggagcctttctctgcccagctgcctcctgtccctgctcctcctcctccagttgtcacgcagctacgcaggacagttcagagtgatagggccagggcatcccatccgggctttagttggggatgaagcagaactgccgtgccgtatatctcctgggaagaatgccacgggcatggaggtggggtggtaccgttctcccttttcaagagtggttcatctgtaccgaaatggcaaggaccaagacgcagagcaagcgcctgaataccggggacgcacagagcttctgaaagagtctatcggcgagggaaaggttgccctcaggatccagaacgtgaggttctcggatgaaggaggctacacatgcttcttcagagaccactcctaccaagaagaagccgccgtggagttgaaagtagaagatcccttctactggatcaaccctggcgtgctggctctcattgcccttgtgcctatgctgctcctgcaggtctctgtaggccttgtattcctcttcctgcagcacagactgagaggaaaactccgtgcagaagtcgagaatctccatcggacttttgatcctcacttcctgagagtgccctgctggaagataacactgtttgttattgtccctgttcttggacccctggttgctttgatcatctgctacaactggctgcaccgaagactggcaggacagtttcttgaagagctaagaaaccccttttgagtgatggtgcgtcttcctggagcgaaggaaagcctggcaggtccttggggatgtctctcactggcctctctgttatggacacattccaatctacatctacagaaacactcgggatcctgagtagaacttgattttcctcccacaactgtctttctttcctcagctccttcctctaaatcttttttgactcctgtcttagtctgcctctagaaaacaccccatgactaaggccagggagtctatcaggagacacctatgtaccagagtaatacaggagtgattctgccaaccaggacacccagcgcttcaacattacgatctacagaacatcagctctgcaaatggtggatatttcttccagagccacagtcttgactgggaagaatatcagtggggagagtaagggggtgagggacagaagaacccacaacatgagggaaagctaaatgagccagggtatgaatatgggagcctgaaccaaaacctggagattaaaaaaaaaagtcaaaagaatactgactggatcagagcaacaccatcttgctttggcagcctggtgggaggaccttgagaagcaagggtcgagaactgggtctgttctctcatttttctcctatcttatttgagtacccactgtttggtttttttgtttttttttttttcttcttcgttttttcaacaattactacttggtggtgtatcagacacaaacaagctaggtgctaattaataataatacaagtttctttgtgcac

SEQ ID NO: 369 - protein, 245 aa, Rattus norvegicus
  ref <308>: DATABASE ACCESSION NUMBER: Refseq / NP_073159
  ref <309>: DATABASE ENTRY DATE: 2003-01-14
MAGVWSLSLPSCLLSLLLLLQLSRSYAGQFRVIGPGHPIRALVGDEAELPCRISPGKNATGMEVGWYRSPFSRVVHLYRNGKDQDAEQAPEYRGRTELLKESIGEGKVALRIQNVRFSDEGGYTCFFRDHSYQEEAAVELKVEDPFYWINPGVLALIALVPMLLLQVSVGLVFLFLQHRLRGKLRAEVENLHRTFDPHFLRVPCWKITLFVIVPVLGPLVALIICYNWLHRRLAGQFLEELRNPF

SEQ ID NO: 370 - DNA, 549 bp, Rattus norvegicus; identical to SEQ ID NO: 208
  ref <308>: DATABASE ACCESSION NUMBER: EMBL / AA858621
  ref <309>: DATABASE ENTRY DATE: 2000-03-03

SEQ ID NO: 371 - DNA, 1402 bp, Rattus norvegicus
  ref <308>: DATABASE ACCESSION NUMBER: Refseq / NM_012904
  ref <309>: DATABASE ENTRY DATE: 2003-01-14
cgagcaaagcttctcttcagttccctggaagacaaggcaatacaaagatactttattaaaaatggcaatggtatcagaattcctcaagcaggcctgctatattgaaaagcaagagcaggaatatgttcaagctgtaaaatcctacaaaggtggtcctggatcagcagtgagcccctacccttccttcaatccgtcctcggatgttgctgccttgcacaaagctatcatggttaaaggtgtggatgaggcaaccatcattgacatccttaccaagagaaccaatgctcagcgccagcagatcaaggcagcatacttacaggagactgggaagcccctggatgaaaccttgaaaaaagcccttacgggccacctggaggaggttgttttggctatgctcaagaccccagctcagtttgatgcagatgaactccgtgctgccatgaagggacttggaacagatgaagacactctcattgagattttgacaacaagatctaaccagcaaatcagagagattactagagtctacagagaagagctgaaaagagatctggccaaagacatcacttcggacacatctggagactttcgtaatgccttgcttgctctcgccaagggtgatcgctgtgaggatatgagtgtgaatcaagatttggctgatacagatgccagggctttgtatgaagctggagaaaggagaaaggggacagacgtgaatgtgttcaatacaattttgaccacaagaagctatcctcatcttcggaaagtgtttcagaattatagaaagtacagtcaacatgacatgaacaaagccctggatctggaactgaagggtgacattgagaagtgcctcacaaccattgtgaagtgtgccaccagcactccagctttctttgctgagaaactgtatgaagccatgaagggtgctggaactcgccataagacattgatcaggattatggtctcccgttcggaaattgacatgaatgaaatcaaagtattttaccagaagaagtacggaatccctctctgccaagccatcctggatgaaaccaaaggagactatgaaaaaatcctggtggctctgtgtggaggaaactaaacatcccaactgctctgtaagattccgaggagaacatctcttagccgttgttttcttcctattgcaaggcttaagtaggaaagttgctttgtcagtaagtctaattaccttctttgaataatgtagcctataaatatgttttagatcattcatctgtacaatagagaaatacttgttttgttaattatgtttatcccaaattataaatccctgtaagcaagtcactttggtaccattcctgagaaagaagtttacatagaataaaataaaacaattttataagacaaaaaaaaaaaaaaa

SEQ ID NO: 372 - protein, 346 aa, Rattus norvegicus
  ref <308>: DATABASE ACCESSION NUMBER: Refseq / NP_037036
  ref <309>: DATABASE ENTRY DATE: 2003-01-14
MAMVSEFLKQACYIEKQEQEYVQAVKSYKGGPGSAVSPYPSFNPSSDVAALHKAIMVKGVDEATIIDILTKRTNAQRQQIKAAYLQETGKPLDETLKKALTGHLEEVVLAMLKTPAQFDADELRAAMKGLGTDEDTLIEILTTRSNQQIREITRVYREELKRDLAKDITSDTSGDFRNALLALAKGDRCEDMSVNQDLADTDARALYEAGERRKGTDVNVFNTILTTRSYPHLRKVFQNYRKYSQHDMNKALDLELKGDIEKCLTTIVKCATSTPAFFAEKLYEAMKGAGTRHKTLIRIMVSRSEIDMNEIKVFYQKKYGIPLCQAILDETKGDYEKILVALCGGN

SEQ ID NO: 373 - DNA, 1012 bp, Rattus norvegicus
  ref <308>: DATABASE ACCESSION NUMBER: EMBL / X74293
  ref <309>: DATABASE ENTRY DATE: 1994-01-31
agccgtgcttcatgtctggggccgcctctggaacagcacctttctggaggagtacatgtccgtgaagtccctggaggtgatcggccgagccaacatcacagtgaaatcctccattaagaacttgctgctcagagatgcatccacagtgatcccagtgatggtatacttggacccggtggctgtggttgcagaaggagtcccctggtgggtcatcctcctggcggtgctggctgggctgctagtactggccctgctggtgctgctgctgtggaagtgcggcttcttccgtcggaacagtccaagttcatcatttccagccaactatcaccgagcccatctggccgtgcagccctcggccatggaggctgggggcccagggactgtgggctgggattcttcaagcgggcgaagcaccctgaggccactgtaccccagtaccacgcagtgaagatccttcgggaagaccggcagcagttcaaggaggagaagacaggcaccattcagaggagtaactggggcaattcccagtgggagggctccgacgcacaccctatcctggctgccgactggcaccctgagttgggtcctgatcgacatcctgtgtcagtcactgcctaacttctcctgtcccaagccagcctctgggttccttccaccctttcccaagatggctctttgggggtggagatagtggagtaggttgctggcttcatgttgaaataaggcaggttctgctttctcaggggcacagatctttcccaccgtgagaaccaccccttcccatcttctccgtacaatgctgtgagacacggggcatggctggaaggacaggcatgacctggtgcaggatggagaagaaggggtactgagctgcctctctcacccaccctgtaagaccgtcttccccaaagtgccttagacagagggtcagggaagagatcgtgtcactgtctcaggggcccttccctcctaagtctttcctgtgctctggccttagtgtgctgtaccagcc

SEQ ID NO: 374 - DNA, 4079 bp, Homo sapiens; identical to SEQ ID NO: 161
  ref <308>: DATABASE ACCESSION NUMBER: Refseq / NM_002206
  ref <309>: DATABASE ENTRY DATE: 2000-10-31

SEQ ID NO: 375 - protein, 1137 aa, Homo sapiens; identical to SEQ ID NO: 162
  ref <308>: DATABASE ACCESSION NUMBER: Refseq / NP_002197
  ref <309>: DATABASE ENTRY DATE: 2000-10-31

SEQ ID NO: 376 - DNA, 475 bp, Rattus norvegicus
  ref <308>: DATABASE ACCESSION NUMBER: EMBL / AA894321
  ref <309>: DATABASE ENTRY DATE: 2000-03-03
tgagcagcccttcttctggaatataaagcagatgtgggacacgaagacactggggctgaggcagcatcactgcaggaagtgtgggcaggccgtctgtgggaagtgcagcagcaagaggtccagctaccctgtcatgggctttgagttccaggttcgagtttgtgattcctgttatgactccatcaaagatgaggaccgcacttctctagcaacgtttcatgaaggaaaacataacatttcccatatgtccatggacattgcgaggggactgatggtgacctgtgggacagatcgtgttgtaaagatatgggatatgactcctgtggtgggctgcagcctggcaactggattttctccacactgatcctggagctggatggtacgtctgctacacgttacgcacagcaacctccatgaaccgaagcccttcatgtagctcagcagccgctgtcatgtaaatggacagtagccacct

SEQ ID NO: 377 - DNA, 4585 bp, Homo sapiens
  ref <308>: DATABASE ACCESSION NUMBER: Refseq / NM_020830
  ref <309>: DATABASE ENTRY DATE: 2003-03-01
gaggaggccgcagcagtcgccgcgcgaacatggcggccgaaatccactccaggccgcagagcagccgcccggtgctgctgagcaagatcgaggggcaccaggacgccgtcacggccgcgctgctcatccccaaggaggacggcgtgatcacggccagcgaggacagaaccatccgggtatggctgaaaagagacagtggtcaatactggcccagcatttaccacacaatggcctctccttgctctgctatggcttaccatcatgacagcagacggatatttgtgggccaggataatggagctgtaatggaatttcacgtttctgaagattttaataaaatgaactttatcaagacctacccagctcatcagaaccgggtgtctgcgattatcttcagcttggccacagagtgggtgatcagtaccggccacgacaagtgtgtgagctggatgtgcacgcggagcgggaacatgctcgggaggcacttcttcacgtcctgggcttcgtgtctgcaatatgactttgacactcagtatgctttcgttggtgattattctgggcagatcaccctgctgaagcttgaacagaacacgtgttcagtcatcacaaccctcaaaggacatgaaggtagtgtcgcctgcctctggtgggaccctattcagcggttactcttctcaggagcatctgacaacagcatcatcatgtgggacatcggaggaaggaaaggccggacgctgttacttcagggccatcatgacaaggtgcagtcgctgtgctaccttcagctcaccaggcagctcgtctcctgttcctcggacggcggaattgcagtgtggaacatggatgttagcagagaagaggctcctcagtggttggaaagtgattcttgtcagaaatgtgagcagccatttttctggaacataaagcagatgtgggacaccaagacgctggggctaagacaacatcactgcaggaaatgcgggcaggctgtctgcgggaagtgcagcagcaagcgctcaagttacccagtcatgggcttcgagttccaagtccgggtttgtgattcttgttacgactccatcaaagatgaagatcggacttctctagcgacctttcatgaaggaaaacataacatttcccacatgtccatggacattgccaggggactgatggtgacctgtgggaccgaccgcattgtaaagatctgggacatgacacctgtggtgggctgcagtctggcgactgggttttctccgcactgatctgagagctgggcggcgtccacacctaagaacagcagctccaccaaatgaagtccctctcacgcagctccacagcgctgtctcgtgaatggacagtagccacttacaaacaaatcaacattcttaaaaagaaaatgtaaaggtgtgttttggggcatttgtggaacttacccatggggactaatatggaaaaggtctgtccatagtggttccctgaagactggaattacttcagcaaaacttccccatgaacagctaatgtgtagtgaaagaatgagctagcaaatgagttttagcggggacaaaaaatcaaacaaaaaagtgaatgcttagaaccttctcaaagcagtcacaagtacagacacttcacttagcctagggggccttccagggttcttgtggctgttgtcagagcaggagctgggggagggaagacttgttctctctttcttgaggggtggcattaggaacttacgaaaccagagacctttccctatgacttggcagtatgtgaatatcctctacacttagttattgataaacttcttaaagagatctgttattttcaggtagtgccataatctgcacttagcattggcttgcttcagttgtttctcttcccagccagtatgccacaggtgaactttcgaggttgtcattaagtaagttgtgaaatttctgtaataacaaaggcagtccgcattcttccctttcccccaaattcctagggcaaaacttttttatggtgctgttaacatgggagtcacacaagccgcctgactttttctcattgccattagtaatgactgatggaaaacccagccaccactgtgatgcgaaatgatcagtctgttgcctgaaacagcccagtcctcttaactgaaacagcattctacttcttgttccaagatgagcctctgcaatattctggcaatttaatataccccctacaaaagcactccacagcttttacactattttgactttgagttataactagtattattcatgttttcataaaaagaagttagtgacccagagctataatcatccatcaagtcttccacaataattcccaactcataaattgctttcctaacaactagcaaaagctattgttcataatggcatttaaagcttttgggcactgtgtaccaggatgaggaagagaagaaatgaggagcctgtcttttaatattccagtatttgtgtgtttgattttttttgacaacagtacatatatctatttctctagggatatggaagtaagtggagaagggcctacctttttaaaggacaaatataaaaatagcaacagtatctttgctaatcttactaatggatattgattaaaaaaaaaaaacctcagtactgcatcactgtgttgggatcgtaccaggacaatagggtcattccatatgataaaactaaaggactaaatttgttttataatgatgtcttagagggactgaaaagtttaaggaggcgatcgaactaaaatgtcttaatggctgtgtgacacacgtaaggaaaggaaagggggtcacgcacatcatgtactggaatgatctgcattaaacattgacttgtcttcagaaataagactgaagggttttgttgttccttagagttttcgtgttacatcacctaaagagatttcttttaaaaactttctagactctttgcaaaatgtatattactaacatagtttggaagaaaaattgagtagtggtaagttttgttcaagcacaatgttgaatgttaagcttcctgtattaattttagttcagttaatggttcagcccatacaaaggtgctatcctagggattttatgaattcctgaaaggaaaatagaatatgatcaattccttgccctgtggaagagtgcagaactgtggttttgttttcctttgacttctgtaaaatgtgaccgtttgacatctgtggtagattgaacggaatatcacagctgctgagtttactccatagctttcaaaccttttttattttaagaaattcttgaaaaaccctatgttccatgggaacataaagttattatagtgcctcctaaggggttaatataaatcaaggaggaagtttatatttaaggaagaattggagtgacgtatcttagaaaaggaaaggctgatgtttccatatagcttgctctccaccaggcctatcatttttctttttagagacaaacgtgacaggctagtcttgtctctctcatatgctaggtagcaaatggggtgatatttttatagaagtgggcaaaaattattttctcaattttactgagtaggcacagaagaaaagtacagataggctgatggttattgccttattttgactgcatttctcttaaatggatcatttaaattagttcttcaagtaacagtttactggttgttccattcctgaatatgcaggctaatttgtacagatagggattaaggaatacagactattagagaagatccttatatttacatctagtatatatgtggtaaggaaatgccgattcttcattataaacaagttttaaaattgttctttcttagttcaaatgatagcaatacccctatagcattaggtagaaacaaattattcattacatcgtaaatctctttactatgtcctagctctgtcctgctacctaaaggatataaagaaatattattgctctagaatgtattactttgttctcccatgaaagaattcagtttgttagtacctatatttttaaactggtgaaactgacccaaatatgtaataaataccatagtagctcagacccaaggagatatttttctaaaatcagttttcgttaaagtacttctacttccgttattggatatggtatctcctaaagtgtaaaaaaaatctgttactatatagtgataaaccatctgctcatcgtaagtgtaaggcttaacaaataagtaatacatgctatatttattcaagtgtctattgcttaattgttaattgtgagcagatttattgaatgcctattctattttctgcagtttacaatacaataactctttgagtaagttgaagtttaattgtgcaacaaatttgtattagagtacaatttaaagtgtttttctctatagccttttttgactggggaagcaaggggtaatgttaattagtacactttgttcttgtactagctatgtttctataagatatggtgccctgtgtatcccagagatgctagaaaactgttctttgctcctatttgtgggttctgtttttgtgggttttttttttttttgagaaaatgtacacaataaaacattccttgcttgtt

SEQ ID NO: 378 - protein, 410 aa, Homo sapiens
  ref <308>: DATABASE ACCESSION NUMBER: Refseq / NP_065881
  ref <309>: DATABASE ENTRY DATE: 2003-03-01
MAAEIHSRPQSSRPVLLSKIEGHQDAVTAALLIPKEDGVITASEDRTIRVWLKRDSGQYWPSIYHTMASPCSAMAYHHDSRRIFVGQDNGAVMEFHVSEDFNKMNFIKTYPAHQNRVSAIIFSLATEWVISTGHDKCVSWMCTRSGNMLGRHFFTSWASCLQYDFDTQYAFVGDYSGQITLLKLEQNTCSVITTLKGHEGSVACLWWDPIQRLLFSGASDNSIIMWDIGGRKGRTLLLQGHHDKVQSLCYLQLTRQLVSCSSDGGIAVWNMDVSREEAPQWLESDSCQKCEQPFFWNIKQMWDTKTLGLRQHHCRKCGQAVCGKCSSKRSSYPVMGFEFQVRVCDSCYDSIKDEDRTSLATFHEGKHNISHMSMDIARGLMVTCGTDRIVKIWDMTPVVGCSLATGFSPH

SEQ ID NO: 379 - DNA, 1384 bp, Rattus norvegicus
  ref <308>: DATABASE ACCESSION NUMBER: Refseq / NM_024140
  ref <309>: DATABASE ENTRY DATE: 2003-01-13
ctccagttctccccgcccaccctacagaaagtgtctcctgattggctttgaggccgcagggctcaggttacattcgcaagagttgcggagcgcgggagaccggacccaagaggagagaggctggttctgcaccgattctgtgctggtccgggagtgcccgacagcccctgaactaccacccagcattgtacaaacccacccccactctgagccaggctccaccccagccaaggaccctcaacaccggcaatggactgctgcacggagagcgcctgctccaagccagacgacgatattctagacatcccgttggatgatcccggagccaacgccgctgcagccaaaatccaggcgagttttcggggccacatggcgaggaagaagataaagagtggagagtgtggccggaagggacccggccccgggggaccaggcggagctgggggcgcccggggaggcgcgggcggcggccccagcggagattaagccagaactgaacgttttagaagttccagaggagagtcggatgccgcgtccccttcgcagtgacaagacttccctactgtgtttgtgagcccctccttcccaccaaccagccagcttcaggagccctcccctctccccgccgcgtcccagagattccctctcccaggctggcttcgtcgtggcgtagccaagtccgtgccctttttagctcctcagtctaacgtggtctcctttcgccttttctctccaccctcgtcccaaaccccatactcccaaaaatgtccttttgcttcacgcccacctgtccacgcgcccagcatgcagctctgcctccgcagcctcggtgcgcttcgctgcgcgtactgcagagggcgcccaatgcgtcgcccaagtactctcaaaaaaaaaaaaaaaaaaaaaaaaaaaaaaaaaagaaaagaaaagaaaaaaaaaaagaaagaaagaaagaaaaagaaaagcaaccaccaagtcctttcgttctgtgggcaacgaaagggggcgccccgcgtctttccaccctaacctaacctcaacctcctaaacctggggctaggaaagaggggaagtgtttttcatggttacctgacgacgtcccttgctctaatgggaagtgaagtcctatcccacacctgcctgtcaccccttttctcttgagaacgcgccctgagagcagcccctcccgctctcctttgtttatgcaaaagcctccggagcgctgggaggctggctcccgcaggaggagtcttccgcagccctgaccctatagcctctaccccgttgggctcctggggttgtggctggaaggtttttaatctctgcgtgtgcatgttaccatactgggttggaatgtgaacaataaagaggaatgtctaagtgt

SEQ ID NO: 380 - protein, 78 aa, Rattus norvegicus
  ref <308>: DATABASE ACCESSION NUMBER: Refseq / NP_077054
  ref <309>: DATABASE ENTRY DATE: 2003-01-13
MDCCTESACSKPDDDILDIPLDDPGANAAAAKIQASFRGHMARKKIKSGECGRKGPGPGGPGGAGGARGGAGGGPSGD

SEQ ID NO: 381 - DNA, 1295 bp, Homo sapiens
  ref <308>: DATABASE ACCESSION NUMBER: Refseq / NM_006176
  ref <309>: DATABASE ENTRY DATE: 2000-11-01
ctccacttctccccgcccaccctgccggaggctgctcctgattggcttcccggccgcggggctcaggttacattcgcgagcggagccgagcgcgggagaccggacccgagagcagagctgctgtttcggcgcgggtcggctggcggccgatgccccagagcccccacccggcaccacacagaccccatccccgccctgcgccaccttcgtccccgcagaggacccccgacaccagcatggactgctgcaccgagaacgcctgctccaagccggacgacgacattctagacatcccgctggacgatcccggcgccaacgcggccgccgccaaaatccaggcgagttttcggggccacatggcgcggaagaagataaagagcggagagcgcggccggaagggcccgggccctggggggcctggcggagctggggtggcccggggaggcgcgggcggcggccccagcggagactaggccagaactgagcattttcaaagttcccgaggagagatggatgccgcgtccccttcgcagcgacgagacttccctgccgtgtttgtgaccccctcctgcccagcaacctgccagctacaggagccccctgcgtcccagagactccctcacccaggcaggctccgtcgcggagtcgctgagtccgtgcccttttagttagttctgcagtctagtatggtccccatttgcccttccactccaccccaccctaaaccatgcgctcccaatcttccttcttttgcttctcgcccacctcttcccgcacccagcatgcagctctgcctccgcagcctcagtgcgctttcctgcgcgcactgcggagggcgccctaagcgtcacccaagcacactcacttaaagaaaaaacgagttctttcgttctgtgcgcagtaaaaggggcgccctacatctccgtgccactcccgccccagcctagccccaagactttggatccggggcgagatgaagggaagagggttgttttggtttcggacgacccttgctctgaccggaagagaagtccctatcccacacctgcctgtcacgttccctcccctttccccagcgcactgttgagggcagcctctccagctctcttgtttatgcaaacgccgagcgcctgggaggctcggtaggaggagtcttccacggccccgccccgccctgtcggtcccgccctccccccccgccgggctcctggggctgtggccgaaaggtttctgatctccgtgtgtgcatgtgactgtgctgggttggaatgtgaacaataaagaggaatgtccaa

SEQ ID NO: 382 - protein, 78 aa, Homo sapiens
  ref <308>: DATABASE ACCESSION NUMBER: Refseq / NP_006167
  ref <309>: DATABASE ENTRY DATE: 2000-11-01
MDCCTENACSKPDDDILDIPLDDPGANAAAAKIQASFRGHMARKKIKSGERGRKGPGPGGPGGAGVARGGAGGGPSGD

SEQ ID NO: 383 - DNA, 3144 bp, Rattus norvegicus
  ref <308>: DATABASE ACCESSION NUMBER: Refseq / NM_012732
  ref <309>: DATABASE ENTRY DATE: 2002-10-20
ccgtgactgaagaagccattgccaagggtatcgcaggattgttgctgtcacaggtgctgtagactgaggttgaaggactaccccggagacggctgcagtcgttcggttcctgtctcttccgtgtaggatttgatttctcctaaacttggtttaagacttttaaagaaggccctaatttatcgaggcctgtttgtgaagtaaaattcggctggctactctcaacggaagaaagatgcaactgctaggccgggtgatctgtttcgtcgttgggatcctgctttctgggggcccaacggggaccatatcagctgtggaccctgaagcaaacatgaatgtgactgagataatcatgcactggggatatccagagcactcagtacagacaggagatggctacattctgggtgttcaccgaatcccgcatgggcggaagaaccagtttgataaaggtcccaaaccagttgtgtatcttcagtggcgacatggcttcctggcagattctagtaactgggtcacaaacattgacaacaacagcctgggcttcatcctggcagatgctggctttgatgtgtggatgggaaacagcagaggaaacacctggtctcggaagcacaagactctgtcagtttctcaggatgaatactgggccttcagttttgatgagatggcaaaatatgacctccctgcttcaattaactacattttgaataaaactggccaagaacagctgtataatgtgggccactctcaaggctgcaccataggttttatagcattttcacagatgcctgaactggcaaagaaggttaaaatgttttttgccctggctcctgtgttgtctctcaattttgcttcgggcccgatggtcaaattgggacggttgccggatctgcttcttgaggacttgtttgggcagaagcaatttcttcctcagagtgcaatggtgaaatggctaagcactcacatttgcacgcacgtcatcatgaaggagctttgcgccaacatcttctttctgatatgtggcttcaatgagaagaatttaaacatgtctagagtggatgtgtatacaacacactgtcctgcgggaacctctgtgcaaaacatggtacactggacccaggttgttaaataccataagcttcaagcttttgactggggaagcagtgacaagaattattttcattacaatcagagttatccacccttgtacagcataaaagacatgcaactacccactgctttatggagcgggggcaaggactggctggcagacaccagtgacatcaatatcttactgactgaaatccccacgttagtgtaccacaagaacattcccgagtgggaccatctggattttatctggggtttggatgccccctggaggctgtataatgaagtagtcagtctaatgaagaaataccagtgagtgccaagacttgagatgcttccccttcactaggggaaaaaaggacagatgtttgcttaattcctgcaaaatactgtgttttcctggtctagatcatttgtattttttatgtgcaagaaaacgatgatgttgaagacatacatgggtctggtcagtaagaagcacgctggctgtcttctgcttcattctgactgacaagccagagtcacaaccagtgatgcctttgaagtttttagaaagtatgggtgttacgtgaaagaagccattgcaacctcttgtttactttttacggtcgttttcggtgtctgcatgctgtgcatatacatgcctatgtgtgtgccctgtgctggccagagcctccttgtgtggaggtaatggctcacatcagggtatcttccctcagacactggtctctcgacgaaccagtcagtagcttgctattccagttagactggctgaccagggagcctccagaatctgtccgtctctaccttccctcaccaggtctacggagggtgatgtcccagccagcattttacactggttctagggacaggaactcaggttctcatgcttgatagcaagccctttcttcaccaaaccattgcctcaaaccctctgtgatcgaaaagctgctcaattacctttatgttcccacccaatgcaagtgaacgagcacaagacatttcaagctgttgtttgtgagctaaaaatcaatctgccagtgacttgaacatgctagggagaaactcctggccctgagcttgacaaacctgcagtccaggttctccagagattgagacagggaggctgctgttacatttagggttcatttggagagtgagactttgtctctacaaaaccaaagacaaaggagaagaagaaaaaaaaaaccctaaagtactcagttctcatctgttagcctcagagggcttagagagttcctgtgtttacctatccgaacaacattttcatgtctttatgcagtagctacctagtgaaatccagtgttatcccagcttctccaggcgtaaacattctctcttcaatctcatcagacctcagtagcaagcatttagtgaatatttagatttttcaggccaagccaagacaaaaatgaatagaataaaagaaaaaagagcccagactcttgaaagcggtttgcactgatttaaaaataaaaaaaaagaatcttgaagaatgacatgataaactgtgttggttccgcatgtgtagtcggatcccttttctgtggagaacgttctgtggagggacaaaccactaatttgccccaagtgaatgtggctgtagtgacagcgacagtgcctctgatcctgagaagcagggctggctgccggtgacaagcatcccagttcctttccccagagatgaagaggatgttttcagacagagctcggctcagggaatttcgcttggagaatcagtggtttatgtgcacaatgttttagtgagcctgctctgcgcctgatatggggaagccctcgactgttcaccgggctcgtgggcgacggctgccgtcagctggacagtggataagttttctgagtagtcaccacagattcagggatatcgctttgtgtcgactcctaaggaaggcaggacgatatgacttggtaacattgtaaaggttcacatttaaacttttcaataaatctcagcctcacaggcctgaacatcaaaaaaaaaaaaaaaaaaaa

SEQ ID NO: 384 - protein, 397 aa, Rattus norvegicus
  ref <308>: DATABASE ACCESSION NUMBER: Refseq / NP_036864
  ref <309>: DATABASE ENTRY DATE: 2002-10-20
MQLLGRVICFVVGILLSGGPTGTISAVDPEANMNVTEIIMHWGYPEHSVQTGDGYILGVHRIPHGRKNQFDKGPKPVVYLQWRHGFLADSSNWVTNIDNNSLGFILADAGFDVWMGNSRGNTWSRKHKTLSVSQDEYWAFSFDEMAKYDLPASINYILNKTGQEQLYNVGHSQGCTIGFIAFSQMPELAKKVKMFFALAPVLSLNFASGPMVKLGRLPDLLLEDLFGQKQFLPQSAMVKWLSTHICTHVIMKELCANIFFLICGFNEKNLNMSRVDVYTTHCPAGTSVQNMVHWTQVVKYHKLQAFDWGSSDKNYFHYNQSYPPLYSIKDMQLPTALWSGGKDWLADTSDINILLTEIPTLVYHKNIPEWDHLDFIWGLDAPWRLYNEVVSLMKKYQ

SEQ ID NO: 385 - DNA, 2493 bp, Homo sapiens
  ref <308>: DATABASE ACCESSION NUMBER: Refseq / NM_000235
  ref <309>: DATABASE ENTRY DATE: 2000-10-31
actgcgactcgagacagcggcccggcaggacagctccagaatgaaaatgcggttcttggggttggtggtctgtttggttctctggcccctgcattctgaggggtctggagggaaactgacagctgtggatcctgaaacaaacatgaatgtgagtgaaattatctcttactggggattccctagtgaggaatacctagttgagacagaagatggatatattctgtgccttaaccgaattcctcatgggaggaagaaccattctgacaaaggtcccaaaccagttgtcttcctgcaacatggcttgctggcagattctagtaactgggtcacaaaccttgccaacagcagcctgggcttcattcttgctgatgctggttttgacgtgtggatgggcaacagcagaggaaatacctggtctcggaaacataagacactctcagtttctcaggatgaattctgggctttcagttatgatgagatggcaaaatatgacctaccagcttccattaacttcattctgaataaaactggccaagaacaagtgtattatgtgggtcattctcaaggcaccactataggttttatagcattttcacagatccctgagctggctaaaaggattaaaatgttttttgccctgggtcctgtggcttccgtcgccttctgtactagccctatggccaaattaggacgattaccagatcatctcattaaggacttatttggagacaaagaatttcttccccagagtgcgtttttgaagtggctgggtacccacgtttgcactcatgtcatactgaaggagctctgtggaaatctctgttttcttctgtgtggatttaatgagagaaatttaaatatgtctagagtggatgtatatacaacacattctcctgctggaacttctgtgcaaaacatgttacactggagccaggctgttaaattccaaaagtttcaagcctttgactggggaagcagtgccaagaattattttcattacaaccagagttatcctcccacatacaatgtgaaggacatgcttgtgccgactgcagtctggagcgggggtcacgactggcttgcagatgtctacgacgtcaatatcttactgactcagatcaccaacttggtgttccatgagagcattccggaatgggagcatcttgacttcatttggggcctggatgccccttggaggctttataataaaattattaatctaatgaggaaatatcagtgaaagctggacttgagctgtgtaccaccaagtcaatgattatgtcatgtgaaaatgtgtttgcttcatttctgtaaaacacttgtttttctttcccaggtcttttgtttttttatatccaagaaaatgataactttgaagatgcccagttcactctagtttcaattagaaacatactagctattttttctttaattagggctggaataggaagccagtgtctcaaccatagtattgtctctttaagtcttttaaatatcactgatgtgtaaaaaggtcattatatccattctgtttttaaaatttaaaatatattgactttttgcccttcataggacaaagtaatatatgtgttggaattttaaaattgtgttgtcattggtaaatctgtcactgacttaagcgaggtataaaagtacgcagttttcatgtccttgccttaaagagctctctagtctaacggtcttgtagttagagatctaaatgacattttatcatgttttcctgcagcaggtgcatagtcaaatccagaaatatcacagctgtgccagtaataaggatgctaacaattaattttatcaaacctaactgtgacagctgtgatttgacacgttttaattgctcaggttaaatgaaatagttttccggcgtcttcaaaaacaaattgcactgataaaacaaaaacaaaagtatgttttaaatgctttgaagactgatacactcaaccatctatattcatgagctctcaatttcatggcaggccatagttctacttatctgagaagcaaatccctgtggagactataccactattttttctgagattaatgtactcttggagcccgctactgtcgttattgatcacatctgtgtgaagccaaagccccgtggttgcccatgagaagtgtccttgttcattttcacccaaatgaagtgtgaacgtgatgttttcggatgcaaactcagctcagggattcattttgtgtcttagttttatatgcatccttatttttaatacacctgcttcacgtccctatgttgggaagtccatatttgtctgcttttcttgcagcatcatttccttacaatactgtccggtggacaaaatgacaattgatatgtttttctgatataattactttagctgcactaacagtacaatgcttgttaatggttaatataggcagggcgaatactactttgtaacttttaaagtcttaaacttttcaataaaattgagtgagacttataggccc

SEQ ID NO: 386 - protein, 399 aa, Homo sapiens
  ref <308>: DATABASE ACCESSION NUMBER: Refseq / NP_000226
  ref <309>: DATABASE ENTRY DATE: 2000-10-31
MKMRFLGLVVCLVLWPLHSEGSGGKLTAVDPETNMNVSEIISYWGFPSEEYLVETEDGYILCLNRIPHGRKNHSDKGPKPVVFLQHGLLADSSNWVTNLANSSLGFILADAGFDVWMGNSRGNTWSRKHKTLSVSQDEFWAFSYDEMAKYDLPASINFILNKTGQEQVYYVGHSQGTTIGFIAFSQIPELAKRIKMFFALGPVASVAFCTSPMAKLGRLPDHLIKDLFGDKEFLPQSAFLKWLGTHVCTHVILKELCGNLCFLLCGFNERNLNMSRVDVYTTHSPAGTSVQNMLHWSQAVKFQKFQAFDWGSSAKNYFHYNQSYPPTYNVKDMLVPTAVWSGGHDWLADVYDVNILLTQITNLVFHESIPEWEHLDFIWGLDAPWRLYNKIINLMRKYQ

SEQ ID NO: 387 - DNA, 1238 bp, Rattus norvegicus
  ref <308>: DATABASE ACCESSION NUMBER: EMBL / U31554
  ref <309>: DATABASE ENTRY DATE: 2000-03-04
gtggccagcagcgcgcacacgcgagtccaccgctgaccaactcgccgaggccaccatggtcgggagagttcaacctgatcggaaacagttgccactggtcctactgagactgctctgccttcttcccacaggactgcccgttcgcagcgtggattttaaccgaggcacggacaacatcaccgtgaggcagggggacacggccatcctcaggtgtgtggtagaagacaagaactcgaaagtggcctggttgaaccgctctggcatcatcttcgctggacacgacaagtggtctctggaccctcgggttgagctggagaaacgccatgctctggaatacagcctccgaatccagaaggtggatgtctatgatgaaggatcctacacatgctcagttcagacacagcatgagcccaagacctctcaagtttacttgattgtacaagttccaccaaagatctccaacatctcctcggatgtcactgtgaatgagggcagcaatgtaaccctggtctgcatggccaatgggcgccctgaacctgttatcacctggagacaccttacaccacttggaagagaatttgaaggagaagaagaatatctggagatcctaggcatcaccagggaacagtcaggcaaatatgagtgcaaggctgccaacgaggtctcctccgcggatgtcaaacaagtcaaggtcactgtgaactatccacccaccatcacagagtctaagagcaatgaagccaccacaggacgacaagcttccctcaaatgtgaagcctcagcggtgcctgcacctgactttgagtggtaccgggatgacaccaggataaacagtgcaaacggccttgagattaagagcactgagggccagtcctccctgacggtgaccaacgtcactgaggaacactacggcaactatacctgtgtggctgccaacaagctcggcgtcaccaatgccagcctagtccttttcagacccgggtcggtgagaggaatcaacggatccatcagtctggccgtaccactgtggctgctggcagcgtccctgttctgccttctcagcaaatgttaatagaataaaaatttaaaaataattacaaaacacacaaaaatgcgtcacacagatacagagagagagagagagagagagagaaagtacaagatggggggagactattgtttcacaagattgtgtgtttataaatgaaggggggatatgaaaaaaatgaagaaaatac

SEQ ID NO: 388 - DNA, 2399 bp, Rattus norvegicus
  ref <308>: DATABASE ACCESSION NUMBER: Refseq / NM_145767
  ref <309>: DATABASE ENTRY DATE: 2003-01-14
gcagaggtaggcagggttcccgagccgctctcccggctccctgctctgggccttggggctccaccggcttcttggcccgagctgctgcgcgtgcagatggccttgcgcgatcgccggaccccgctgcggtggccaagtgcagggcttgtggctgggacccctgagaaccaggagccagactgtgctcagcttgccaggccggagccacgcacgggcacaagtctgtcaggccgccatcagtcctggtccagccgtcagggcccatccgaccgtcggcgatgttttatttccactgcccgccacagctagagggcacagcgccttttggtaaccactctacgggggattttgatgatgggtttcttagaagaaaacagcgcagaaatcggacaaccttcgctcttcagcagttggaagctctggaggcagtctttgcccaaacacactacccagatgtcttcaccagagaagagctagccatgaaaataaacctcacagaagccagagtgcaggtttggttccagaaccgaagagccaagtggaggaagacagagagaggggcctctgaccaggaaccaggggctaaggaacccatggcagaggtgacaccacccccagtgaggaacatcaactctccacccccaggggaccaggcccggggcaagaaggaggccctggaggcccagcagagcctgggacgcacagtgggccccgccgggcctttcttcccctcctgcttgccagggaccctcctgaacacagccacttatgcccaggccctgtcccatgtggcatctctgaaagggggcccactgtgctcttgctgcgtcccagaccctatggggctctccttcctccccacttacggttgccagagtaaccgcacagccagcgtggctgccctgcgcatgaaggcccgcgagcattcagaagcggtcctgcagtctgccaaccttctgccgtccaccagcagcagccccggccctgcctccaagcaggtgcctccagaaggcagccaggacaagccctccccaacgaaggaacagagcgagggagagaagagcgtatgagggtccggagaacccagctgggagccctgcccacccctgcttctctcagcctcagccctgccagcctctgaaccacaaggagtagccacctcctcatggatctgacagggcaaacgggacctgcaagctggttgagacctgaagagtccctctagaattctgctggtaggctgtgttgttctcgcttttcctttggtgacattttccgatggctcttagtgactctggacactgctctgtgatgaggtccctgttttttgctttttgttttgtctctttttttttgttttgttttgttttattttccaggccaagcagccttggagcaaagcagattagtttattccaccatccttcttgagatatctgggaaggtcttgtcaattccaaggactgtggcaaggatcatccgtgaaagatgccaagaagtgacatctcatgacaggaaatgagacgggcactcccatattgcttaagaaccacagaactggtggactatcagccagttctcactcccttcagccaggactggcatcggcctcctttgtcttgtttaaaggaattagctgaggttttggctaggaagtgacaagatatgggctgaagacattgtggtcctgaccctagcagatctccctgggcacatctgacctggtccagtcaggcaggttgtcagttcggggatgggggctgctctgctgattctgtgtgtgggttccctgcaattagagtgttcacttgcaggccccgctctcttcagaagagtgatgggaagttcaccaatcagaatgtagctttgtagcccaggaaaggaccagagtccttgaagcggtaggaaatccctaggaaggccccttaaatacttatgcccagatgagctgcccttcttcctatccccgtatgtcgagaggttgacgagacaggaaagccaggaagatgactccgtgtggcagaagagaatggagtccaaagggccaactttcacagagatttctgccgcagtttagcgtggctgtgttctttcacgcgatggtgacttcggagagatcagagggagatgtgcaatagcatgagccccgctcctggcccgggtcctggaaaggttgtggttgtttggtggctttggctgatgatgtttccacgcaaacagatattgctttcatgatggctgttctcatttcagttctgataatcgagacgctgtgctcccaggcgctctgcctccccttaactcttcaggagcaccccctcccctgtaatactcctaagtgtatcgtgcctcacttacggttactgcaacacatttgatggaacacactgtctccttta

SEQ ID NO: 389 - protein, 263 aa, Rattus norvegicus
  ref <308>: DATABASE ACCESSION NUMBER: Refseq / NP_665710
  ref <309>: DATABASE ENTRY DATE: 2003-01-14
MFYFHCPPQLEGTAPFGNHSTGDFDDGFLRRKQRRNRTTFALQQLEALEAVFAQTHYPDVFTREELAMKINLTEARVQVWFQNRRAKWRKTERGASDQEPGAKEPMAEVTPPPVRNINSPPPGDQARGKKEALEAQQSLGRTVGPAGPFFPSCLPGTLLNTATYAQALSHVASLKGGPLCSCCVPDPMGLSFLPTYGCQSNRTASVAALRMKAREHSEAVLQSANLLPSTSSSPGPASKQVPPEGSQDKPSPTKEQSEGEKSV

SEQ ID NO: 390 - DNA, 285 bp, Rattus norvegicus
  ref <308>: DATABASE ACCESSION NUMBER: EMBL / AA860047
  ref <309>: DATABASE ENTRY DATE: 2000-03-03
tttttttttttttttttaattgcaaaggagcaacggaatttattgaccaaatttaaacacaatagttcaaatggcaacattgtattttcattgtaagatggagagacagaaaagcgcccattagtccaacctgtttacatttgctaaaacagtgactatcaaaaccagcaacatgcacagtagtacatatgcacaaaatggaattgtatcaacaaatatacaaaatcttcaaaataaaaatattacaggtttaaaaatataaacattgattcatctatcccatta

SEQ ID NO: 391 - DNA, 2501 bp, Homo sapiens
gacctagcgtgtgctcagctctggacaagacatggatgtaggcagacatgcttcctgcctgctgggcttagtgcaccaatgctaaggacagacatgaagggcttgggaaaggcatgaagatgcagggagtctaggagagaggataagaaaaacaagcattttgtggtgggttgaattgcgttgtcgtttttagaggcatttcgtgatccatggttgcgctcccgtgaagagcgagtctagagaaggaatccgaagcggcggcggcgagcgcggctcaggttgatttagaatacgggtgacagtggcctggcgcgagcccactgctgacgaaagcggcttatcccgcgcggtttccatggagacgagccggagccgcggcggcggcggggctgtcagcgagcgcggcggagctggcgcgtccgtgggggtctgcaggaggaaggcggaggccggggccgggaccgggaccctcgcggcagacatggacttgcattgtgactgtgccgccgaaacgccggccgccgagccgccgtcggggaagattaataaagctgccttcaaattattcaagaagaggaaatcgggtggcaccatgcccagcatttttggggtcaaaaacaaaggggacgggaaaagctcgggtccgacggggctggtgaggagcaggacccacgacggacttgccgaggtgctggtgctggagagcggcaggaaggaggagccgcgcggcgggggcgacagcggcgggggcggcggggggcggccgaacccggggccccccagagccgcagggcccggcgggggctccctcgccagcagctcggtggccaagtcgcacagcttcttctcgctgctgaagaagaacgggcgctcggaaaacggcaagggagagcctgtggacgcgagcaaggccggcggcaaacaaaagcgggggctgcgggggctgttcagcggcatgcgctggcacaggaaagacaagcgggccaaggcggaggccgcggaggggcgcgcgcccgggggcggcttgatcctacccggctcgctcaccgccagcctggagtgcgtcaaggaggagacgcccagagccgcgcgcgagccggaggagcccagccaggacgccccgcgagacccagcaggctgtggagatattattgcagaccaagaggaagaggcaggtcccagctgtgacaagcatgtccccgggccaggcaagccggctctgtctaaaaagaaccccggcgtggtggcctaccaaggaggcggggaagagatggccagcccggacgaggtggacgacacctatctacaggagttctgggacatgctctcccagaccgaggagcagggacccgagccccaggagggcgcggctaaggtggcagctgcgctggaaaccaaggtggtgcccgagacccccaaagacaccaggtgtgtggaagcggccaaggacgcgtcctcggtcaagcgcaggaggctcaaccggattcccatcgagccccatcctaaggaggagcccaagcacccggagaaggagcagcaggaaggcgtccccaacagcgacgagggctactgggactccaccacgccaggcccagaggaagacagctcgagcagcgggaagaaggcgggcatcccccgggatagctacagcggggacgcgctctatgatctctatgctgacccggacggaagtccagcaacccttcctggagggaaggacaacgaggagacgtcctccctgtcccggttaaagcccgtatctccaggcaccatcacctgtccactgcgaacaccaggcagcttgctgaaggactctaagatccctattagcatcaagcacctgaccaaccttccatctagccatcccgtggtgcaccagcaaccctccaggagtgagatgcccagaacaaaaatcccggtttccaaagtgctggtccgcagagtcagcaaccggggcttggctgggaccaccatcagagcaacggcctgccacgacagtgccaaaaagttgtgaggtcttccaggccaaggtggatgggccccatgccaaggaatacaacttttccctggaaaccactaaagtaagttttgcttttcctaaagaaagtcttttaggacaccacccgtcccccgccctgctccagagcgtggaccgaggaggtctttgtgccctgagcagggaccggataacaccagaaagagggatgctacacgggggtttctcctctcaagataagtccctgagaattattttcaagcacttttttcttttttacctttaagtttttcttccttttgctttaatatactgaacacttggaagtcacctttacttgcctttgcagaaaacagaacttagccaaacctaagtaagagtcatgcctggatattgggataagccagtgtctagaggcctgaaggaaccgctgaagaaccagaggagatctcctcttccaagacacgtttccttccttcccttctttcctctttcctttccagtt

SEQ ID NO: 392 - protein, 552 aa, Homo sapiens
METSRSRGGGGAVSERGGAGASVGVCRRKAEAGAGTGTLAADMDLHCDCAAETPAAEPPSGKINKAAFKLFKKRKSGGTMPSIFGVKNKGDGKSSGPTGLVRSRTHDGLAEVLVLESGRKEEPRGGGDSGGGGGGRPNPGPPRAAGPGGGSLASSSVAKSHSFFSLLKKNGRSENGKGEPVDASKAGGKQKRGLRGLFSGMRWHRKDKRAKAEAAEGRAPGGGLILPGSLTASLECVKEETPRAAREPEEPSQDAPRDPAGCGDIIADQEEEAGPSCDKHVPGPGKPALSKKNPGVVAYQGGGEEMASPDEVDDTYLQEFWDMLSQTEEQGPEPQEGAAKVAAALETKVVPETPKDTRCVEAAKDASSVKRRRLNRIPIEPHPKEEPKHPEKEQQEGVPNSDEGYWDSTTPGPEEDSSSSGKKAGIPRDSYSGDALYDLYADPDGSPATLPGGKDNEETSSLSRLKPVSPGTITCPLRTPGSLLKDSKIPISIKHLTNLPSSHPVVHQQPSRSEMPRTKIPVSKVLVRRVSNRGLAGTTIRATACHDSAKKL

SEQ ID NO: 393 - DNA, 539 bp, Rattus norvegicus
  ref <308>: DATABASE ACCESSION NUMBER: EMBL / AA859626
  ref <309>: DATABASE ENTRY DATE: 2000-03-03
tttttttttttttttttaaatttacacttctttatttagtatgtgtgtgtgcaccatagcacacatgtggagttcagaggacagtttgaaggagtcacctccctccttccaccgtgtggatcttagggaattagccttggctgaagcacctctacccaggacgcctgcccaaggagcagggtcatcaactgcttggagtggtgcccagattgcaggctggctctgccgggacaccagctggtagaggccccaaactccagacagaacactgcagttccatgtgccctttgccccaaagctgccgagaaaggctgtggtcgaaagggcactgggaacggtgggcctccatgtcatcactgcttctccccacccccaaccctaagctaacacacttgtgctctgggtgtggggacagagaggcagggcccatagccaccccatgttttggagtcagagctctctgagccagggtcacggtgccaggttgcccttctttcctgtccacagttcacgaagctccacacggcagcccaggtctc

SEQ ID NO: 394 - DNA, 1795 bp, Rattus norvegicus
  ref <308>: DATABASE ACCESSION NUMBER: Refseq / NM_139329
  ref <309>: DATABASE ENTRY DATE: 2003-01-13
gcgagcggaaggaaggaagcctgtgtgcatctagctggtccaccagtccaggacacaacatctcccagtggccagtttgggcgccctgggacttcctacagctggccatggcagactctgcacaggtgccagcactggtatacctggtcacaggtggctgtggcttcctgggggagcatattgttcgaatgctgctggagtgggagcccaggctccgggagctgcgtgtctttgacctgcacctgagttcttggctggaggagctgaaaacagggcctgtgcaggtgactgccatccagggggatgtgactcaggcccacgaggtggcagcagccatggctggatctcatgtggtcatccatacagctgggctggtagatgtgtttgggaaggccagtccagagaccatccacaaagtcaatgtgcagggcacacagaatgtgattgacgcttgtgtgcagaccgggactcggctcctggtctacacgagtagcatggaagtggtagggcctaatgtcaagggccaccccttctacaggggcaatgaagacaccccatatgaggccatccacaggcatccctacccatgtagcaaggccctcgctgagcagttggtcctcgaggccaatggaaggaagggactgcgctttggaggtcggctgtttcgggccatcccagcttccgtggagcatggtcgggtctacgttggcaatgtggcttggatgcatatactggtggcccgagagctggagcagcgggcagcactcatgggtggccaggtgtatttctgctatgataagtcaccttataaaagctacgaggacttcaacatggagtttctgagtccctgtggacttcggctgataggcacccacccactgctgccctactggctactggtgctgctgactgccctcaacgctctgctgcagtggctgcttcggccgctggtgctgtacacacccctgctgaatccctacactctggctgtggccaacaccacctttactgtcagcaccaacaaggcacagcgccatttcggctacaagcccctcttctcatgggaagagagcagggcccgcaccattcactgggtgcaggccatggagggttccgcctggtgatggcagggccaggaactggagaccactgtggcacactccaggtcctgagcccccaaaagcctggacggagagaaatggctaccttttgaagctgctgactctgctagacacatcaggactgtgctatggaccctgccacgtctgtgcctggttcatatcccagtctccaagttctaggacagagtctgggtgcaggcctatctttggtgccaactcgggcctgccagctagttggcaaaaactgattcctgaatggtctcactaccccttcctgtttctagtttctcaagcagggagggacagagactccagaggtctgttgctggcctgcttactccaggtaccattttcagacctggctcctgccacatctggttctccattttcttttcttttttttttttctttttcttttttttttatttttttcggagctggggaccgaacccagggccttcgcttgctaggcaagcgctctaccactgagctaaatcgttttcttaagtgtatctcttttagacatttttcttttaatttgctttaaagaaaactgaaggaatgaatggttttccatgtcttgccttcttaacaaattcagctatgatattgttagcttcctccctgaggatgccaacctgtatctggccacacctggattaaaatcctttgcc

SEQ ID NO: 395 - protein, 338 aa, Rattus norvegicus
  ref <308>: DATABASE ACCESSION NUMBER: Refseq / NP_647545
  ref <309>: DATABASE ENTRY DATE: 2003-01-13
MADSAQVPALVYLVTGGCGFLGEHIVRMLLEWEPRLRELRVFDLHLSSWLEELKTGPVQVTAIQGDVTQAHEVAAAMAGSHVVIHTAGLVDVFGKASPETIHKVNVQGTQNVIDACVQTGTRLLVYTSSMEVVGPNVKGHPFYRGNEDTPYEAIHRHPYPCSKALAEQLVLEANGRKGLRFGGRLFRAIPASVEHGRVYVGNVAWMHILVARELEQRAALMGGQVYFCYDKSPYKSYEDFNMEFLSPCGLRLIGTHPLLPYWLLVLLTALNALLQWLLRPLVLYTPLLNPYTLAVANTTFTVSTNKAQRHFGYKPLFSWEESRARTIHWVQAMEGSAW

SEQ ID NO: 396 - DNA, 2189 bp, Homo sapiens
  ref <308>: DATABASE ACCESSION NUMBER: Refseq / NM_025193
  ref <309>: DATABASE ENTRY DATE: 2003-01-14
gaaggacggtgtgcgggccggccagccctggacgaaagaagagggcccctccaggccagtctgggcaccctgggatagcggctgcagccaggcatggccgactctgcacaggcccagaagctggtgtacctggtcacagggggctgtggcttcctgggagagcacgtggtgcgaatgctgctgcagcgggagccccggctcggggagctgcgggtctttgaccaacacctgggtccctggctggaggagctgaagacagggcctgtgagggtgactgccatccagggggacgtgacccaggcccatgaggtggcagcagctgtggccggagcccatgtggtcatccacacggctgggctggtagacgtgtttggcagggccagtcccaagaccatccatgaggtcaacgtgcagggtacccggaacgtgatcgaggcttgtgtgcagaccggaacacggttcctggtctacaccagcagcatggaagttgtggggcctaacaccaaaggtcaccccttctacaggggcaacgaagacaccccatacgaagcagtgcacaggcacccctatccttgcagcaaggccctggccgagtggctggtcctggaggccaacgggaggaaggtccgtggggggctgcccctggtgacgtgtgcccttcgtcccacgggcatctacggtgaaggccaccagatcatgagggacttctaccgccagggcctgcgcctgggaggttggctcttccgggccatcccggcctctgtggagcatggccgggtctatgtgggcaatgttgcctggatgcacgtgctggcagcccgggagctggagcagcgggcaaccctgatgggcggccaggtatacttctgctacgatggatcaccctacaggagctatgaggatttcaacatggagttcctgggcccctgcggactgcggctggtgggcgcccgcccattgctgccctactggctgctggtgttcctggctgccctcaatgccctgctgcagtggctgctgcggccactggtgctctacgcacccctgctgaacccctacacgctggccgtggccaacaccaccttcaccgtcagcaccgacaaggctcagcgccatttcggctatgagcccctgttctcgtgggaggatagccggacccgtaccattctctgggtacaggccgctacgggttcagcccagtgacggtggggctggggcctggaggcccagatacagcacatccacccaggtcccgagccctcacaccctggacgggaagggacagctgcattccagagcaggaggcagggctctggggccagaatggctgtccttgtcgtagagccctccacattttctttttcttttttgagacagggtcttgctctgtcacccagactggagtgcagtggtgtgatcatagctcactgcaccctcaacctcctgggttcaagcaatcctcctgcctcagcctcctgaacagctgggaccacaggtgcacgccaccacacctggcttttttttgttgtttttagagacagggtctcactatattgctcaggctggtcttgaactcctgggctcaagtgatcttcccacgtgggcctcccaaaacgctggaactacaagtgtgagccaccgcgcctggcccaagccctccacattttcaatccaggagccttgagtctgtgttgtgtcctgacacctccaagttctagggccgtcaggacacgggagggtttggggacagagtgtccttcctctgtcctctcatcccagtcctgatggccgcttggtgagtgtctggtgccctggtggcctgccccagctctcttctggctttctgagcaggaagcgagcagaggctccacaggcttacgctgctctcctgacagccacacgcgaccctcggtgcagagtgcagaggcggctctggttcctccagccacctcagtccctctttgggaggtgatgttcccattgtttttcaaaggcctcaccttcaactgtctgtcttagaattcccctctggagggctatggcctccctatgctttcacttcccacctctctacctaagttccttcccagcacatcgccagccctgggcctggggatgtccccaatgctgtacctggctgaccccggattaaaagcctcatccacgaccgaaaaaaaaaaaaaaaaaaa

SEQ ID NO: 397 - protein, 369 aa, Homo sapiens
  ref <308>: DATABASE ACCESSION NUMBER: Refseq / NP_079469
  ref <309>: DATABASE ENTRY DATE: 2003-01-14
MADSAQAQKLVYLVTGGCGFLGEHVVRMLLQREPRLGELRVFDQHLGPWLEELKTGPVRVTAIQGDVTQAHEVAAAVAGAHVVIHTAGLVDVFGRASPKTIHEVNVQGTRNVIEACVQTGTRFLVYTSSMEVVGPNTKGHPFYRGNEDTPYEAVHRHPYPCSKALAEWLVLEANGRKVRGGLPLVTCALRPTGIYGEGHQIMRDFYRQGLRLGGWLFRAIPASVEHGRVYVGNVAWMHVLAARELEQRATLMGGQVYFCYDGSPYRSYEDFNMEFLGPCGLRLVGARPLLPYWLLVFLAALNALLQWLLRPLVLYAPLLNPYTLAVANTTFTVSTDKAQRHFGYEPLFSWEDSRTRTILWVQAATGSAQ

SEQ ID NO: 398 - DNA, 2959 bp, Rattus norvegicus
  ref <308>: DATABASE ACCESSION NUMBER: Refseq / NM_053947
  ref <309>: DATABASE ENTRY DATE: 2003-01-13
ggcacgagcgtcctcgcccgccttcccgccccgcggcctgcgggagccgcgcgctccccggcgcggcctgctcgcgcgcgcccgccctcgccgaagccctcctcggcccgcgacccgccggacccccggcccgaccccgccgcccgcgcaagatgtcggcgcggacgccattgcccacggtgaacgagcgggacacggagaaccatacatctgtggatggatatactgaaacgcatatcccgcctaccaaatcaagtagcagacaaaacattccccggtgtagaaactccattacgtcagcgacagatgaacagcctcacatcggaaattaccgtttacagaaaacaatagggaaggggaattttgccaaagtgaaattggcaaggcatgtcctaacaggtagagaggtagctgtgaaaataatagacaaaactcagctaaaccctaccagtctacaaaagttgttccgagaagtacgaataatgaagatactgaaccatcctaacatagtgaaactgtttgaagttattgaaacagagaagacgctctacctggtcatggaatacgcaagtgggggtgaagtctttgattacttagttgcccacggaagaatgaaagagaaagaggcccgggccaaattcaggcagattgtatctgctgtacagtattgtcatcaaaaatgcattgtccaccgtgatcttaaggctgaaaaccttctccttgatgctgatatgaatattaaaattgctgactttggttttagcaatgaattcacagtggggaacaaattggacacattctgtggaagcccgccttatgctgcccctgagcttttccaaggcaagaagtacgacgggccggaagtggatgtgtggagtctaggcgtcattctctacacgctggtcagtggctccctgcctttcgatggccagaatctaaaggagctccgggagcgggtcctgcgagggaagtaccgtgttcctttctacatgtccacggactgcgagaacctcctgaagaaactgctagtgctgaaccccataaagaggggcagcctggagcaaataatgaaagaccgatggatgaacgttggtcatgaagaggaagagctaaaaccatattctgagcctgagcttgatctcaatgatgcaaaaagaatagacattatggtcaccatgggttttgcacgagatgaaatcaatgatgccttagtaagccagaaatatgatgaggttatggctacttatattcttctaggtagaaaaccacctgagttcgaaggtggtgagtcactgtccagtggaaacctttgtcagcgatcccggccgagcagtgacctgaacaacagcacgcttcagtcacctgctcacctgaaggtccagcgaagcatctcagccaaccagaagcagaggcgcttcagtgaccatgccggtccctccatcccccctgctgtctcatacaccaaaaggcctcaggccaacagcgtggagagtgaacagaaagaggagtgggacaaagacacagcccgcagacttggcagcaccaccgtgggctcgaagagcgaagtcacagccagccccttggtggggccagacaggaaaaagtcctcagctggcccaagtaacaacgtatattctggcggtagcatgacgaggagaaatacatatgtgtgtgagaggagcacggaccggtacgctgccttgcagaatggaagagacagcagccttacagagatgtctgccagcagcatgtcctccacaggttccactgtggcctctgctggcccctcagcacgtccccgccaccagaagtctatgtcaacctctggccaccctattaaagttacactgccaaccattaaagatggctctgaagcttatcggcctggtacagctcagagagtgcctgctgcttccccgtctgctcacagcattagtgccagtactcctgacaggacccgcttcccccgagggagctccagccgaagcactttccacggggagcagctccgagagcggcgcagtgctgcttatagcggaccacctgcctccccgtcccatgacacagctgcacttgcacatgccagaagggggacgtcaactgggataatcagcaaaatcacctccaagttcgtccgcagggacccaagtgaaggcgaagccagtggcagaaccgacacagccagaggttcatcgggggagccgaaagacaaggaagagggtaaggaggccaagccgaggtcgctgcgcttcacgtggagcatgaagaccactagttcaatggaccccaatgacatggtgagagagatccgcaaggtgctggatgccaacacctgtgactatgaacagagagagaggttcctgctcttctgcgttcacggagacgctcggcaggacagcctcgtacagtgggagatggaggtctgcaagttgcctcggctctcactcaatggggtccgcttcaagcgaatatccgggacatctattgcctttaagaacattgcatccaaaatagcaaatgagcttaagctgtagagatgtgtaggcttcgggatcagggaagatgcacccacatctgaggtaccgtctctgagtgtactggcgacacgtgatgtggtccagctgtgaatctcccatgcagaaatcgtccttaatgcaataaggttatacatagttatgagctgtaaaattcaagtcagtacgagctataataagaaccgtagcttcaaaagtaggttcacatgtacaggtaagtatattgtgtatttctgttcattttctgttcatagagttgtctaataaaatataattgctttaaaacctgtatagttgtctagatctccacacagaaatgtacgtttaatgctgtgagttgaaaaggatttccctgttacttacatctggtgtgtttttaaaactcttacctccgtcatgctattttgaaaattgtgtctcgtgcc

SEQ ID NO: 399 - protein, 793 aa, Rattus norvegicus
  ref <308>: DATABASE ACCESSION NUMBER: Refseq / NP_446399
  ref <309>: DATABASE ENTRY DATE: 2003-01-13
MSARTPLPTVNERDTENHTSVDGYTETHIPPTKSSSRQNIPRCRNSITSATDEQPHIGNYRLQKTIGKGNFAKVKLARHVLTGREVAVKIIDKTQLNPTSLQKLFREVRIMKILNHPNIVKLFEVIETEKTLYLVMEYASGGEVFDYLVAHGRMKEKEARAKFRQIVSAVQYCHQKCIVHRDLKAENLLLDADMNIKIADFGFSNEFTVGNKLDTFCGSPPYAAPELFQGKKYDGPEVDVWSLGVILYTLVSGSLPFDGQNLKELRERVLRGKYRVPFYMSTDCENLLKKLLVLNPIKRGSLEQIMKDRWMNVGHEEEELKPYSEPELDLNDAKRIDIMVTMGFARDEINDALVSQKYDEVMATYILLGRKPPEFEGGESLSSGNLCQRSRPSSDLNNSTLQSPAHLKVQRSISANQKQRRFSDHAGPSIPPAVSYTKRPQANSVESEQKEEWDKDTARRLGSTTVGSKSEVTASPLVGPDRKKSSAGPSNNVYSGGSMTRRNTYVCERSTDRYAALQNGRDSSLTEMSASSMSSTGSTVASAGPSARPRHQKSMSTSGHPIKVTLPTIKDGSEAYRPGTAQRVPAASPSAHSISASTPDRTRFPRGSSSRSTFHGEQLRERRSAAYSGPPASPSHDTAALAHARRGTSTGIISKITSKFVRRDPSEGEASGRTDTARGSSGEPKDKEEGKEAKPRSLRFTWSMKTTSSMDPNDMVREIRKVLDANTCDYEQRERFLLFCVHGDARQDSLVQWEMEVCKLPRLSLNGVRFKRISGTSIAFKNIASKIANELKL

SEQ ID NO: 400 - DNA, 2965 bp, Homo sapiens
  ref <308>: DATABASE ACCESSION NUMBER: Refseq / NM_018650
  ref <309>: DATABASE ENTRY DATE: 2002-02-10
cgggcaaccgcctcgcccgaagccctccctcgttactgtccgcataccccggcggcgccgccgcggaaagcggctccccctcctcttactccgcgtcctcttccctctttcccccgccggggcacgcttgttgcaccgtcccgcggcctgcgggagccgctcgccccggacttgagctcgcgtacgacccatttcctgtcgccccccggagcccgcaccacagcccggccggtctagaccccggcagaccccgctggccgcacaaaatgtcggcccggacgccattgccgacggtgaacgagcgggacacggtaaatcatacgactgtggatggatatactgaaccacacatccagcctaccaagtcgagtagcagacagaacatcccccggtgtagaaactccattacgtcagcaacagatgaacagcctcacattggaaattaccgtttacaaaaaacaatagggaagggaaattttgccaaagtcaaattggcaagacacgttctaactggtagagaggttgctgtgaaaataatagacaaaactcagctaaatcctaccagtctacaaaagttatttcgagaagtacgaataatgaagatactgaatcatcctaatatagtaaaattgtttgaagttattgaaacagagaagactctctatttagtcatggaatacgcgagtgggggtgaagtatttgattacttagttgcccatggaagaatgaaagagaaagaggcccgtgcaaaatttaggcagattgtatctgctgtacagtattgtcatcaaaagtacattgttcaccgtgatcttaaggctgaaaaccttctccttgatggtgatatgaatattaaaattgctgactttggttttagtaatgaatttacagttgggaacaaattggacacattttgtggaagcccaccctatgctgctcccgagcttttccaaggaaagaagtatgatgggcctgaagtggatgtgtggagtctgggcgtcattctctatacattagtcagtggctccttgcctttcgatggccagaatttaaaggaactgcgagagcgagttttacgagggaagtaccgtattcccttctatatgtccacagactgtgaaaatcttctgaagaaattattagtcctgaatccaataaagagaggcagcttggaacaaataatgaaagatcgatggatgaatgttggtcatgaagaggaagaactaaagccatatactgagcctgatccggatttcaatgacacaaaaagaatagacattatggtcaccatgggctttgcacgagatgaaataaatgatgccttaataaatcagaagtatgatgaagttatggctacttatattcttctaggtagaaaaccacctgaatttgaaggtggtgaatcgttatccagtggaaacttgtgtcagaggtcccggcccagtagtgacttaaacaacagcactcttcagtcccctgctcacctgaaggtccagagaagtatctcagcaaatcagaagcagcggcgtttcagtgatcatgctggtccatccattcctcctgctgtatcatataccaaaagacctcaggctaacagtgtggaaagtgaacagaaagaggagtgggacaaagatgtggctcgaaaacttggcagcacaacagttggatcaaaaagcgagatgactgcaagccctcttgtagggccagagaggaaaaaatcttcaactattccaagtaacaatgtgtattctggaggtagcatggcaagaaggaatacatatgtctgtgaaaggaccacagatcgatacgtagcattgcagaatggaaaagacagcagccttacggagatgtctgtgagtagcatatcttctgcaggctcttctgtggcctctgctgtcccctcagcacgaccccgccaccagaagtccatgtccacttctggtcatcctattaaagtcacactgccaaccattaaagacggctctgaagcttaccggcctggtacaacccagagagtgcctgctgcttccccatctgctcacagtattagtactgcgactccagaccggacccgttttccccgagggagctcaagccgaagcactttccatggtgaacagctccgggagcgacgcagcgttgcttataatgggccacctgcttcaccatcccatgaaacgggtgcatttgcacatgccagaaggggaacgtcaactggtataataagcaaaatcacatccaaatttgttcgcagggatccaagtgaaggcgaagccagtggcagaaccgacacctcaagaagtacatcaggggaaccaaaagaaagagacaaggaagagggtaaagattctaagccgcgttctttgcggttcacatggagtatgaagaccactagttcaatggaccctaatgacatgatgagagaaatccgaaaagtgttagatgcaaataactgtgattatgagcaaaaagagagatttttgcttttctgtgtccatggagacgctagacaggatagcctcgtgcagtgggagatggaagtctgcaagttgccacgactgtcacttaatggggttcgcttcaagcgaatatctgggacatctattgcctttaagaacattgcatcaaaaatagcaaatgagcttaagctgtaaagaagtccaaatttacaggttcagggaagatacatacatatatgaggtacagtttttgaatgtactggtaatgcctaatgtggtctgcctgtgaatctccccatgtagaatttgcccttaatgcaataaggttatacatagttatgaactgtaaaattaaagtcagtatgaactataataaatatctgtagcttaaaaagtaggttcacatgtacaggtaagtatattgtgtatttctgttcattttctgttcatagagttgtataataaaacatgattgcttaaaaacttgaaaaaaaaaaaaaaaaaaa

SEQ ID NO: 401 - protein, 795 aa, Homo sapiens
  ref <308>: DATABASE ACCESSION NUMBER: Refseq / NP_061120
  ref <309>: DATABASE ENTRY DATE: 2002-02-10
MSARTPLPTVNERDTVNHTTVDGYTEPHIQPTKSSSRQNIPRCRNSITSATDEQPHIGNYRLQKTIGKGNFAKVKLARHVLTGREVAVKIIDKTQLNPTSLQKLFREVRIMKILNHPNIVKLFEVIETEKTLYLVMEYASGGEVFDYLVAHGRMKEKEARAKFRQIVSAVQYCHQKYIVHRDLKAENLLLDGDMNIKIADFGFSNEFTVGNKLDTFCGSPPYAAPELFQGKKYDGPEVDVWSLGVILYTLVSGSLPFDGQNLKELRERVLRGKYRIPFYMSTDCENLLKKLLVLNPIKRGSLEQIMKDRWMNVGHEEEELKPYTEPDPDFNDTKRIDIMVTMGFARDEINDALINQKYDEVMATYILLGRKPPEFEGGESLSSGNLCQRSRPSSDLNNSTLQSPAHLKVQRSISANQKQRRFSDHAGPSIPPAVSYTKRPQANSVESEQKEEWDKDVARKLGSTTVGSKSEMTASPLVGPERKKSSTIPSNNVYSGGSMARRNTYVCERTTDRYVALQNGKDSSLTEMSVSSISSAGSSVASAVPSARPRHQKSMSTSGHPIKVTLPTIKDGSEAYRPGTTQRVPAASPSAHSISTATPDRTRFPRGSSSRSTFHGEQLRERRSVAYNGPPASPSHETGAFAHARRGTSTGIISKITSKFVRRDPSEGEASGRTDTSRSTSGEPKERDKEEGKDSKPRSLRFTWSMKTTSSMDPNDMMREIRKVLDANNCDYEQKERFLLFCVHGDARQDSLVQWEMEVCKLPRLSLNGVRFKRISGTSIAFKNIASKIANELKL

SEQ ID NO: 402 - DNA, 2443 bp, Rattus norvegicus
  ref <308>: DATABASE ACCESSION NUMBER: Refseq / NM_134350
  ref <309>: DATABASE ENTRY DATE: 2003-01-13
gatggttcttagcacagaggaaaacaggagtgttgatttagtcaacttacccagtgtcccactgcccgatggagaggctggcgtaggggagaacaacaaggattccgtgaacaacctctgcagtcagtatgaggagaaggtgcggccctgcattgacctcatcgactccctgcgagctctgggtgtggagcaagacctggccctgcctgccatcgctgtcatcggggaccagagttcagggaagagctctgtgctggaagcactgtctggagtggccctccccagaggcagtggtattgtcaccagatgtcccctggtgctgaaattgaagaagctgaatcagggagaggagtggaaaggcaaagtcacctatgatgacatcgaagtggagctctctgatccttcagaggtggaagaggccatcaacacaggtcagaaccatattgctggggtagggctggggatcagtgataaactcattagcctggatgtcagctccccacacgtcccagacctgactctgattgaccttcctggaatcaccagggtggctgtaggcaaccagccttcagacataggacggcagatcaagagacttatcactaactacatccaaaaacaagagaccatcaacctggtggtggtccccagcaatgtggacattgccaccacagaggccctgagcatggctcaggaggtggaccctgatggggataggaccatcgggatcttgaccaagcctgatctggtggacagagggactgaagacaaggtcgtggatgtggtgaggaacctcgtgtgccacctgaagaagggctacatgatagtcaagtgcaggggtcagcaggacatccaggagcagctgagcctggctgaggctcttcagaaggagcaagtcttcttcaaggaacaccctcaattcagagctcttctggaggatgggaaggccacagtgccctgcctggcagagaggctgaccatggagctcatctcacacatctgtaaatctcttcctttgttagaaaatcaaataaaggaaagtcaccagagtacaagtgaggagctgcagaagtatggtgcagacataccagaagatgagaatgaaaaaactctcttcctgattgaaaaaatcaatgcttttaaccaggacatcactgccatagtagaaggggaagagattgtgagggagaaagaatgtcgcctattcaccaagctccgtaaagagttcttcttgtggagtgaggagatcgaaaggaatttccaaaaaggttctgatgctttatataaagaagtctacacattcgaaatgcagtatcgtggccgagaactaccagggtttgtgaattacaaaacatttgagaacatcataagaagacaaatcaaaaccctggaagaaccagctatggaaatgcttcacaaggtcactgaaattgtacgggctgcctttacaacggtttctgagaaaaatttctctgagttttttaatctccacagaactaccaagtccaaacttgaagacatcagattagaacaggaaacggaagcagagaaggcgatccggcttcacttccagatggaacaaatcatctactgccaggaccaaatttataggaaagccttgcagaaggtgagagaggaggaagctgaggaggaggagaggaagcatggcaaaagcaggtccgctcagtccccaaatttacagacctcatccatggatgaaatcttccagcatctgaatgcctaccgccaggaggctcacaactgcatctccagccacattccattgatcatccagtatttcatcttgaagatgtttgctgagaagctgcagaagggcatgctccagctcctgcaggacaaggattcctgcagctggctcctgaaggaaaagagtgacaccagtgagaagaggagattcctgaaggagcggttggcaaggctggcccaagctcagcgcaggctagccaaattccctggttaagctggccctgtcctttcctgtgtctcctggataattaaatattcagggacagaagggttccagccttgttgtggtttgccctaagatatctgtattttgatgctaattccactgccccagggacagctgcctagtcctgtactcaggaatcaggtgacttcaccagaaacttctccccattgaatttgtaaaatacaggtgaggggcacatagaggatagaaagaggcctgtaattggaccagaagtaaggattggtgggagagaagtttaaaggaaggggaggatactggaagggaaagaaggagaggagagagatagagagaagccatggcaggacaatatggcaggtgacattaagattccatgctgtacctttacaggttgttacaaatgttcttaagggatggatggtactgggctttgtatgtttaggtgggcaattatatcttaccaattgggtc

SEQ ID NO: 403 - protein, 659 aa, Rattus norvegicus
  ref <308>: DATABASE ACCESSION NUMBER: Refseq / NP_599177
  ref <309>: DATABASE ENTRY DATE: 2003-01-13
MVLSTEENRSVDLVNLPSVPLPDGEAGVGENNKDSVNNLCSQYEEKVRPCIDLIDSLRALGVEQDLALPAIAVIGDQSSGKSSVLEALSGVALPRGSGIVTRCPLVLKLKKLNQGEEWKGKVTYDDIEVELSDPSEVEEAINTGQNHIAGVGLGISDKLISLDVSSPHVPDLTLIDLPGITRVAVGNQPSDIGRQIKRLITNYIQKQETINLVVVPSNVDIATTEALSMAQEVDPDGDRTIGILTKPDLVDRGTEDKVVDVVRNLVCHLKKGYMIVKCRGQQDIQEQLSLAEALQKEQVFFKEHPQFRALLEDGKATVPCLAERLTMELISHICKSLPLLENQIKESHQSTSEELQKYGADIPEDENEKTLFLIEKINAFNQDITAIVEGEEIVREKECRLFTKLRKEFFLWSEEIERNFQKGSDALYKEVYTFEMQYRGRELPGFVNYKTFENIIRRQIKTLEEPAMEMLHKVTEIVRAAFTTVSEKNFSEFFNLHRTTKSKLEDIRLEQETEAEKAIRLHFQMEQIIYCQDQIYRKALQKVREEEAEEEERKHGKSRSAQSPNLQTSSMDEIFQHLNAYRQEAHNCISSHIPLIIQYFILKMFAEKLQKGMLQLLQDKDSCSWLLKEKSDTSEKRRFLKERLARLAQAQRRLAKFPG

SEQ ID NO: 404 - DNA, 1531 bp, Rattus norvegicus
  ref <308>: DATABASE ACCESSION NUMBER: Refseq / NM_012531
  ref <309>: DATABASE ENTRY DATE: 2002-11-14
atgccgttggctgcagtctcattgggtctcctgttgttggccctcctcctgctcttgcgacacctgggctggggcttggtgactattttctggtttgagtacgtgctgcagccagtccacaacctgatcatgggtgacacaaaggagcagcgcatcctgcgctacgtgcagcagaatgcaaagcctggagaccctcagagcgtcctggaggccatcgacacctactgcacacagaaggaatgggccatgaatgtgggtgacgcgaaaggccaaatcatggatgcagtgattcgggagtacagcccctccctggtgctggaactgggagcttactgtggctactcagcagtgcgaatggctcgcctgctgcagcctggagccaggcttctcaccatggagatgaaccctgactacgctgccatcacccagcaaatgctgaactttgcaggcctacaggacaaagtcaccatcctcaatggggcatcccaggatcttatcccccagctgaagaagaagtacgacgtggacacactagacatggtctttcttgaccactggaaagaccgctaccttccagacacacttctcctggagaaatgtggcctgctgcgcaaggggacagtgctcctagctgacaacgtcatcgtcccgggaacccctgacttcctggcgtatgtgagagggagcagcagcttcgagtgcacacactacagctcatacctggagtacatgaaagttgtagacggcttggagaaggcaatctaccagggtccaagtagccctgacaagtcttgatccctcagcctgcccccctgctccccttccagcttctctctgcgagatgacacacattcaatctgaccctttctatgctcctggggcttgtcctcgggggctgtggttccagactgtcatacactggcacattttaaaggtagtgagcccactatgcaaaatcacttcaataaccctgaaaagcacctatggatgaaaggctgaattgaggccaaaggtacactagatcacagcctgcccagcatgcaaaaggcctcaaggttaatcctctgcacccgagcctcatggtctcgctaactagaagaggagatcttcacggggtttcagtgtgggatcactaggcattgtatcaccagttaggcccagcaggaagtcagcaaactgtaaatgtccagacgccaaataacagcagaggctcagagacagtactgtcacttactgtccccagcagctcacaccacatctcatctgaagaatgagtcacaagctttccaggtatggtggtgcacgcctgtcatccccagtatccaggaggcagaggcatcggagttcagcgccagcctggtctacataagtgagttccaagacagccagggctacgtagaaatacatttttaaaaaagttataaccttggggttggggatttagctcagtggtagagcgattgcctagcaagctctaccactgagctaaatccccagccccaacctcttttatattataaaagaaattaaa

SEQ ID NO: 405 - protein, 264 aa, Rattus norvegicus
  ref <308>: DATABASE ACCESSION NUMBER: Refseq / NP_036663
  ref <309>: DATABASE ENTRY DATE: 2002-11-14
MPLAAVSLGLLLLALLLLLRHLGWGLVTIFWFEYVLQPVHNLIMGDTKEQRILRYVQQNAKPGDPQSVLEAIDTYCTQKEWAMNVGDAKGQIMDAVIREYSPSLVLELGAYCGYSAVRMARLLQPGARLLTMEMNPDYAAITQQMLNFAGLQDKVTILNGASQDLIPQLKKKYDVDTLDMVFLDHWKDRYLPDTLLLEKCGLLRKGTVLLADNVIVPGTPDFLAYVRGSSSFECTHYSSYLEYMKVVDGLEKAIYQGPSSPDKS

SEQ ID NO: 406 - DNA, 610 bp, Rattus norvegicus
  ref <308>: DATABASE ACCESSION NUMBER: EMBL / AA891255
  ref <309>: DATABASE ENTRY DATE: 2000-03-03
tgtggcttgaggctgtggtctctggatcatgactgtatctccaagtgagtgtatgttgagttcacacggaatgcttttatgtagaatagacggtctccctcccaccttctcagatgggttttctgttacctctgttccttttgtttttattgtggaaatcattcatattgaaagcctaatatagagtcatgtgtatattgatatgggattatatgatgtcaaatttagtacaacaaatttagaacttaagtgaatacaaatacttttttaacacagaatgtattttaatataaaaatataatgataaagtcatactggtagaaaatatttttggctatgtttaccatcattttccctccacttcagtattgtgctgtgtgaactgaccactatatccaaatgaagcagcttcctgttaaaatttacagactgcaaggacagaggtgtggtcagaattgagaaaaactgatgaggccaggagacacgtggtggaccgtgctttgttatgtttgtatgtcaagctcttctgaagctcagagaggaaaacgtttggcgaactctataccaccatcaccttttctatattacatgaataaagctaattttctct

SEQ ID NO: 407 - DNA, 6042 bp, Homo sapiens
  ref <308>: DATABASE ACCESSION NUMBER: Refseq / XM_113763
  ref <309>: DATABASE ENTRY DATE: 2003-01-05
ctttggaggaagttctggaattactaggaacagggtttctacgtgggagttcaggattccttcgagccagtggagatatgctgaaaggaaccagttcagtcagtagggatgttcgagttggagttactcaggcttatgtggtatttgtttcaacactaggaggagcttggctagagaaaaattttgctgcctttttttctcatatcctaagccttgcgtcaccgtcacaccctaaagccacccaaactcagatcgatgccgtctgctgtcgccgttgtgtttcatttattcttcgaactactataggtggtcttcttggagaaaaggctcagcttgctgctgtaaaggatatttgccaggccatctggaagctaaagaaagttatggatgccgtaatgagtgatggtaatttggaaacccggcttggttccacagatgtagccgctagccaacatatgctggtttgtgctttacaagaacttggaaatctcatacacaatcttggcaccacagcggcacctttgctacaggattcaagtacaggtctccttgacagtatcttgtcagttattcttcatcctagcatttctgttcgactagcagcagcttggtgtttacactgcattgccgtggcattaccctcctacctaacaccactcttggatcgttgccttgaacggcttactggacataagtcttcacctgaagcagtgactggcttcagttttgctgtagcagctttgttgggagcagtaaaacattgtcctttaggaattcctcatggaaaaggcaagattattatgacattagcagaggatttgctgtgttctgctgctcaaaacagtcgcctttcagctcagcgcacacaagctggatggttgctgatttctgctctgatgacattaggtcctgcagttgttagccatcaccttgctcgagttctgctgttgtggaagtgtgtctttccagcatctcctaaagatctagaaacagaaaagagccgaggagattcgtttacatggcaggtgaccctggaaggacgagctggtgcactgtgtgctatcaagagctttgtttcccactgtggtgatcttcttactgaggaagtaactcagcgtcttcttccaccacttccttgtgctgtggatttgctaactcagctttcttcaatactaaaaatgtatggaagtcctttgaaaacaccgtcagtggtttatagacaaagactttatgaactgttgattttattacctcctgagacctatgaaggaaacctctgtgctatcctcagagagctggctgctgacttgactgcccctgatattcaggtggcagcatctacatttttacttccacccctctgtcatcaggatgatcttttgatactaagtcctttcctacaagagactgaccatagatttattgaagaacagctcctgcttggtaatggtgttgcttgcggaagtcttgaatatgacccttattcgatttatgagaaagatgtagagggagattcagtgcctaagcccttacctccagcactatcagttattagttctgcatccaagctctttggggttgtatgcgctcatgtgggagaaactcaaaggcttcttatattggaacagcttttggacagtataaagcacacaaaaggagctcgtcagcaagtggttcagttacatgttgtttcttcagtttctagtttcttgaagtacgtggctggctccaagggatgtttaggtccagaagaaatgaaaagatttgccttaacattagttatgggagccctagaaagccccaaccccttgctgagatgtgcagctgcagagtcatgggctagattagcccaagtggtagatgatggagcttttactgctggattagctcaagttagctttgacaaattgaaatcagcaagggatgtggttaccagaacaggacactcattggccttggggtccctacataggtatttaggaggaataagttcttctcaacacctaaattcttgtattggaatcctttatactttggcgcaggacagcacttctcctgatgtgcagacctgggcattacattctctatcattgatcattgattctgctggcccactctattatgtgcatgtggaacctaccctttctcttattataatgttgttgttaaatgtgcctcctactcatgctgaagttcaccaaagccttggtcgctgtttgaatgcccttattaccacgttaggtccagagctacaaggtaacagtacttcaatttctaccttaaggacttcctgtctactgggttgtgcagtaatgcaagataacccagactgccttgttcaagctcaggccatctcttgccttcagcagcttcatatgtttgctccacgacatgtcaacttgtctagcctggttagctgcctctgtgtgaatctttgtagcccctacttgttactgagaagagcagtactggcttgcttacgtcagcttgtacaaagagaagcagctgaagtttcagaacatgctgttatgcttgctaaggatagcagagaagagttgactccagatgctaacatcagagaagttggccttgagggggcattgttgatcttactagacaaggagacagatgagagattatgccatgatatcaaagagactttaaattatatgcttacatctatggcagtggaaaaactctccctgtggttaaagctttgtaaagatgtacttgctgcatcagctgattttacagctgtaacttgtgtggatacaatgcaagaagaagaaggagataaaggggatgatgcctcagtcctgaccaccagacgtgatgaaaaatcccatccttttaccaatccccgatgggctactagagtctttgctgctgaatgtgtctgtaggataattaaccaatgtgagaatgctaacagtgcacattttgacattgctttagcacaagaaatgaaaaaaagagattcaagaaatgactttttggtactgcatcttgctgacttaattcgcatggcttttatggctgccacagatcacagtgaccagctccgtctttctggccttgaaatgctgttagttgttattcggcgatttgcaactgttccagaaccagagtttccaggtcatgtgattctggaacagtatcaagccaatgtaggagcagcgcttagaccagccttcacttcagagacaccacctgatgtcactgccaaagcatgtcaggtttgcagtgcctggatagcaagtggagttgtaagtgaccttaatgatctccgaagagttcatcagttgcttgtttcatcgttaactaaaatacaggctggaaaagaagctctaagtcacttatataatgaaagtgcttctaccatggagatcttagctgtgcttaaagcctgggcagaggtctacataattgctgtgcaaagacataaaaaccacagacaacctttgaagactaccacctgtttagaagacggtatcagaaatggatcatgttcatcagatggactgcttgacttagtctatgcagatcttggcacactaagcagactctggcttgctgcacttcaggattttgctcttttaactttgccttcagaatttgcctcccaacttcctgctgaaggtggtgctttctacacagcagagactagtgaaaatgcaaaattgcattattacaactcctgggcacttatcctccatgctacagcattgtggcttacaagcacgggttttgttgttgctgacccagatgaaggagcatctaatctctccaggcctgtaacaccaacttccatgtgtcagggttcatcatctggggctaccataaagtcccctgaggatgtctacactgatagattccatcttattttaggaatcagcgtggaatttctatgttccttacgttcagatgcaaccatggaaagcataactgcttgtttacatgcattgcaagcacttctagatgtaccttggcccagatcaaaaattggcagtgatcaggacttgggtatagaattgctgaatgttctacatcgagtaattttaaccagagaatcaccttccattcagttggcttcacttgaagtggtaaggcagattatctgtgctgctcaagaacatgtgaaggaaaaaagacgaagtgcagaagttgatgatggggctgctgaaaaggaaactctgccagagtttggagagggaaaggacaccggaggacttgtgcctggaaagtctttggtctttgcaacactggaattgtgtgtatgcattctagttagacagctcccagaattaaaccctaaattgacaggtagcccaggagtaaaagctacgaagccacagatactattagaagatggaagtagattggtttcagctgcattggttatcctttccgaacttcctgcagtgtgctctcctgaaggaagcatctcaattctccctactatattgtacctcacaatcggggtcctcagagagactgctgtgaagttacctgggggccagttatcttcgacagttgcagcttccctacaggctctaaaaggaatattatcttctcccatggcccgggcagaaaagagccgtactgcttggactgaccttctccgaagtgccttaacaacaattcttgactgttgggatccagttgatgaaacacaccaagaacttgatgaagtcagtctacttactgctatcacagtgtttattttgtctaccagtccagaagtaactaccatcccatgccttcagaagcgctgtattgataaatttaaagctactcttgagataaaagatcctgtggtacaaatcaagacctaccagctcctacattccatctttcagtatccaaatccagctgtttcctacccatacatttactctttagcatcctgtatcatggaaaaactgcaggaaatagacaagagaaaacctgaaaacactgctgagcttgagatcttccaagaaggcataaaggtcttagaaacactggttactgttgctgaagaacaccatcgcgctcagctggtggcctgtcttttgcccatcctcatttccttccttttggatgaaaattctctgggatcagcaacttccataatgagaaatttacatgactttgctctacaaaatctcatgcaaattggacctcagtattcatctgtttttaaaagtttagtggcttcttctccagccctaaaagcccgccttgaggctgctataaagggcaatcaggaaagtgtcaaagtcaagataccaacatctaaatatactaagagtcctggaaaaaactcaagcatccaattaaagaccagtttcctctgattttttttttggaatagtaagcaccttaatataataaatacttgatcattgcctttggtgacaaaagggacattgtagacacaagtgcccttagaggtctagttgattgttttaccttaaatagctgtgactcttcaaagtaacagcatacttaacatttttgtgtgtgtgcgtggggtttgtgttttgttttgttttgtttttctatttaaaaagacaatggagctaacttgccaggaattttaagaaagtgctaaagaactaaacttactaaacaatccactgctttaaaaatgaaatgaatttcttctaacagtccatacatatgtggtatacttaatactgtgacagatataaatatgactctagtgtaaattatctgcactaatattgtatcccaattgctgatttaaaattctgctttggcccggcacagtggctcatccctgtaattccagcactttggaaggccaaggcgggcggatcacgaagtcgggagtttgagaccagcctgaccaacatggtgaaaccccgtctctactaaaaatacaaaaattagccgggtgtggtggcacacacctgtaatcccagctactcaggaggccgaggcaggaaaatcgcttgaacctggcaggcagaggttgcagtgagccaagattgtgccactgcactccagcctgggcgacagagtgagactccatct

SEQ ID NO: 408 - protein, 1753 aa, Homo sapiens
  ref <308>: DATABASE ACCESSION NUMBER: Refseq / XP_113763
  ref <309>: DATABASE ENTRY DATE: 2003-01-05
MLKGTSSVSRDVRVGVTQAYVVFVSTLGGAWLEKNFAAFFSHILSLASPSHPKATQTQIDAVCCRRCVSFILRTTIGGLLGEKAQLAAVKDICQAIWKLKKVMDAVMSDGNLETRLGSTDVAASQHMLVCALQELGNLIHNLGTTAAPLLQDSSTGLLDSILSVILHPSISVRLAAAWCLHCIAVALPSYLTPLLDRCLERLTGHKSSPEAVTGFSFAVAALLGAVKHCPLGIPHGKGKIIMTLAEDLLCSAAQNSRLSAQRTQAGWLLISALMTLGPAVVSHHLARVLLLWKCVFPASPKDLETEKSRGDSFTWQVTLEGRAGALCAIKSFVSHCGDLLTEEVTQRLLPPLPCAVDLLTQLSSILKMYGSPLKTPSVVYRQRLYELLILLPPETYEGNLCAILRELAADLTAPDIQVAASTFLLPPLCHQDDLLILSPFLQETDHRFIEEQLLLGNGVACGSLEYDPYSIYEKDVEGDSVPKPLPPALSVISSASKLFGVVCAHVGETQRLLILEQLLDSIKHTKGARQQVVQLHVVSSVSSFLKYVAGSKGCLGPEEMKRFALTLVMGALESPNPLLRCAAAESWARLAQVVDDGAFTAGLAQVSFDKLKSARDVVTRTGHSLALGSLHRYLGGISSSQHLNSCIGILYTLAQDSTSPDVQTWALHSLSLIIDSAGPLYYVHVEPTLSLIIMLLLNVPPTHAEVHQSLGRCLNALITTLGPELQGNSTSISTLRTSCLLGCAVMQDNPDCLVQAQAISCLQQLHMFAPRHVNLSSLVSCLCVNLCSPYLLLRRAVLACLRQLVQREAAEVSEHAVMLAKDSREELTPDANIREVGLEGALLILLDKETDERLCHDIKETLNYMLTSMAVEKLSLWLKLCKDVLAASADFTAVTCVDTMQEEEGDKGDDASVLTTRRDEKSHPFTNPRWATRVFAAECVCRIINQCENANSAHFDIALAQEMKKRDSRNDFLVLHLADLIRMAFMAATDHSDQLRLSGLEMLLVVIRRFATVPEPEFPGHVILEQYQANVGAALRPAFTSETPPDVTAKACQVCSAWIASGVVSDLNDLRRVHQLLVSSLTKIQAGKEALSHLYNESASTMEILAVLKAWAEVYIIAVQRHKNHRQPLKTTTCLEDGIRNGSCSSDGLLDLVYADLGTLSRLWLAALQDFALLTLPSEFASQLPAEGGAFYTAETSENAKLHYYNSWALILHATALWLTSTGFVVADPDEGASNLSRPVTPTSMCQGSSSGATIKSPEDVYTDRFHLILGISVEFLCSLRSDATMESITACLHALQALLDVPWPRSKIGSDQDLGIELLNVLHRVILTRESPSIQLASLEVVRQIICAAQEHVKEKRRSAEVDDGAAEKETLPEFGEGKDTGGLVPGKSLVFATLELCVCILVRQLPELNPKLTGSPGVKATKPQILLEDGSRLVSAALVILSELPAVCSPEGSISILPTILYLTIGVLRETAVKLPGGQLSSTVAASLQALKGILSSPMARAEKSRTAWTDLLRSALTTILDCWDPVDETHQELDEVSLLTAITVFILSTSPEVTTIPCLQKRCIDKFKATLEIKDPVVQIKTYQLLHSIFQYPNPAVSYPYIYSLASCIMEKLQEIDKRKPENTAELEIFQEGIKVLETLVTVAEEHHRAQLVACLLPILISFLLDENSLGSATSIMRNLHDFALQNLMQIGPQYSSVFKSLVASSPALKARLEAAIKGNQESVKVKIPTSKYTKSPGKNSSIQLKTSFL

SEQ ID NO: 409 - DNA, 574 bp, Rattus norvegicus
  ref <308>: DATABASE ACCESSION NUMBER: EMBL / AA859994
  ref <309>: DATABASE ENTRY DATE: 2000-03-03
acacaaggttctgtatttatggcccacgaggacaaaatgccaaaagttttaaaatggatcaaccctggtgtgtagctagcaagcaatcactgactactcgtcacctacagttgtactaaatgtatctaaagaaacacagtcctacaaaagttgttctcagagaaatatcattgaggtgggggcacctcttcccaggatgctcaaagttctccgtgataaaagcacaaattaaccacctgatcaaggcgcaatctactgcagctttgagacgcctatgcccgggagacagttgcccctcacattccacaatgttgtagagattttttttttcccaagaaaatgtcatttgaaacatatttacaactgaactcaacagagactgtgaaattgaacaggcactgctcatttgtttgagttttttggtaaacattttgctggtttttttgttttttgtttttttttttttgtttttgtttttttgtttctttctcattttgcatcaacttttatcagtccatgcaacttcaatgccctcgatgaagaatgcataataagccatacttctttttttctt

SEQ ID NO: 410 - DNA, 1465 bp, Homo sapiens
  ref <308>: DATABASE ACCESSION NUMBER: EMBL / AL110126
  ref <309>: DATABASE ENTRY DATE: 2000-02-18
tgggccctttgaccctgcacaatgacctttgcatcagccaaactcattgccatgacaactctttgtactgtgtccgtgccacagatctgttggtcacattgttaatagtaaaggggacaagttggagacggtcaatttttacattttttgttgcaattttttcttcaatggttgtaagtagttttttttttttttaataataaaggggttcactagttaatactctagaaatatctgtgtgttgcaattcaaatgtatgttgagattgtgaaaagcgcttcagtgccactagcttaccggtacactagactaagcccttgatgacttattgcatgatacagtaccaggaacaacaggtggcctaaatacatgaaaagcagtgtaagctagtgacactaaagccagtcttgtattactgtatttttgacagaatggttttgaaaactgtgctacagggactgatgtggcaaatatatctctttatgcagaaggaagtctttttttttctttttttttttttttaagaagtatggctttttatgcatccttcatcgagggcattggagttgcatggactgataaaagttgatgcaaaacaagaaagaaacaaacaaaaaaaaaaaaaccagcaaaatgtttaccaaaaaactcaaacaaatgagcagtgcctgttcaatttcacagtctctgttgagttcagttgtaaatatgtttcaaatgacattttcttgggaaaaaaaatctctacaacattgtagaatgtgaggggtaactacatcccaggcataggtttctcaaagctgcagtagattatgtcttcatcaagctgttaatttgtgcttatatcatatagaacttttagcatcctgggaagagctgcccccacctcaatgatatttctctgagaacaacttttgtaggactgtgtgtttctttagatacatttagtacaactgtaggtgacgagtagtcagttattgcttgctagctacacaccagggttgatccattttaaaacttttggcattttgtcctcatgggccataaatacagaaccttgtattttaattaaatttttttacaaaaggaggcacatgcacaatctccatgtaacaaacctttagcagtaggatgtattatacgacagttacttaatttctagagttcaggcctctgggatcaaccccagactgggccagaatgttagtgaaggttttattgtgcccggttggaggataacgttctttgggtactttttgtgggttgcaaatgaactcaattgccacaagttttaaactggtgtaaatcaagcttgacttaatgtgattgttactgttatatccagcctatactgctagcagctgctcatactgcagtcaattactggaagcggatatatttcctatgcaaaaactgtttaaacaataaaatgagctatgctacagaaaaaaaaaaaaaaaaaaaa

SEQ ID NO: 411 - DNA, 463 bp, Rattus norvegicus
  ref <308>: DATABASE ACCESSION NUMBER: EMBL / X89696
  ref <309>: DATABASE ENTRY DATE: 1997-04-07
catctgcaagcccttgcactacatgaccatcatgagccgacctgtgtgtatattcctagtgggtgctgctgtaatcttaggattcatccatggagcaatacaaactttatttatggcccagttacccttctgtggtcccaatatcatcaaccattttatgtgtgacttaataccactcctggagttggcctgcactgacacacacactctggggcccctgatcgctgccaacagtgggtcactgtgtttgcttactttctctatgctggttgtttcctatgtggtcatccctcgctccctgaggaatcacagttcagaagggcgtcgcaaagctctgtctacctgtgcctctcatgtcactgttgttgtcttattccttgtaccttgttcttacctgtacctaaggcccatgacctccttccccactaacaaagctgtaactgtgttttgcaccctagtgaca

SEQ ID NO: 412 - DNA, 2905 bp, Rattus norvegicus
  ref <308>: DATABASE ACCESSION NUMBER: Refseq / NM_133555
  ref <309>: DATABASE ENTRY DATE: 2002-03-13
cgcaagtacagagcaccagaggatgcagactagcagtgaagaatcacaagacctgtaacatgagtgcggcccaacccccagccaagctttgacacagaaccccaggacaatgaggacaccaccctgcccatagctccctgtgcagccacctaaagtgccaaaatggaccagcacatggcatttatctgggggctgtgctacatggccctggtggctctctgctggagacacggggtaacaaaggcagaagaaactgtccctctgaagactctgcagtgctacaacgactatatcgagcgcatcatctgcagctgggccgacacggaggacgcccaggggctcgttaacctgaccctctatcactggctagacaagaaacagccaatgtcctgtgagctcagtgaggacctcatgtggtcagagtgcccgtcatcccaccgctgtgtgcctagaagatgtgtcctcccctatacacagttttccgtctcaaaagaagactactactcactccagccggatcgtgatctgagtatccatctcgtggttccgctggcccagcatgtgcagccaccacctcccaaggacatcagcatcagcccctctggggaccatttcctgctgaagtggagtgtgccccttggggatgcccaggtctctctgctttcacaaaaggacatacagtttgaggtggcttataagcagcttcaggactcctgggaggatgcctccagcctccacacttgcaacctctgggtcactctcgagccaaagctcttcctacccaacagtatctatgtggcccgcgtgcgcgctcagctagccccaggttcgagcttgtccggaagacccagcggatggagcccagaggtacactgggactctccgacagaggacaaggctcggccacagaaccttcagtgcttctttgatgggatccagtccctcaactgctcctgggaggtgtggaccaaggtgactgactctgtttcctttgggctcttctatagctccagtcccaaagctggggagaagaaatgctctccagtggtgaaggagctgcaggccagccgctacacccggtaccactgcagcctaaatgtgtccgaccccgctgcacacagccagtacaccgtctctgttaagcggctggaacaagggaagttcatcgagagctttaaccacatccagatgaatcctccaaccctcaacctgaccaagaacagagacagctacagcctgcattgggagactcagaaaatgtcctatccattcatccagcatgcattccaggtccagtacaagaagaaactggaccgctgggaggacagcaagacagagaacctaaatcatgcccacagcatggacctgccacagctggagcctggcacctcatactgcgccagggtgagggtcaagaccatccctgaatacaaagggctctggagcgagtggagcaatgagtgcacctggacgactgactgggtgatgccaacattgtggatagtcctcatcctggtcttcctcatcctcaccttcctcctggccctccgctttggctgcatctatgggtgcaagttgtacagaagatggaaggagaaaatccccaaccccagcaagagcctccttttccaggatggaggtaaaggactctggcctcctggcagcacggtgaccttctccagtaagaaccccactccccaggggccacagaacaaccttttctctgagctacagggggtgtcatatacacatctggaggacaacgaagtgtcacctctcaccatagaggaccccaacattattcgagatccatcatctggccctgatacaaccccagctgcctcatctgaacccatggagcagtcttccaatgttcaagtagacccaccaactctttctggcagacccaggaagcaattacccagctttgacttcaatggcccgtacctggggcctccccaatcccactccctgcccgatctcccaggccagctggtttccccccagggggttggaagcctgaagccagcactgccaggctccttggagtacatgtgtctgccccctggagggcaagtgcaactggtcccactgtcccaggtgatggggcagggccgggatgtggatgtgcagtgtgggtccagcctggagaccacagagagcccttccatggaatcaagggagagccctccagttgagctgaaggaggaggaacaggagccaagggacaacccagtgactctccccataagctctggaggccccaaagacagtaaggtggcctctgagtatgtcacacctgcagatctggtgctcactctgcccacagagcccttgtctacctctctgggtccctctctagaggtctcctcagcccaaagccccagtctctgtctcaagctgcccagggtcccttctgaaagtccagctcttgcaccagcagtgtttgaagattacgtggagctgcctccaagcatgagccagcctgccaagtcccttccaggcaatcctgctcctcctgggccaagcagccccgcagtgagcccaggagagcccagggaggaagtaggcgcagcccccacacaccctgaaggcctccttgttcttcagcaggttggggactactgcttcctccctggcctgggacccagccccctctcaccacccagtaagccaccctctccgggcctgtgtctcgagactgaggacctagacaaggacttgtctgtcaaaaagcttccctaccaacccataccccaggtgccagccattcagtttttcaagtccctaaagcatcaggactacctgtcactgcccccttgggacaatagccagcctgggaaggtgtgctgagtctcccccctcccaatctcaccagcagccctgcgcctcagcctgtggacct

SEQ ID NO: 413 - protein, 896 aa, Rattus norvegicus
  ref <308>: DATABASE ACCESSION NUMBER: Refseq / NP_598239
  ref <309>: DATABASE ENTRY DATE: 2002-03-13
MDQHMAFIWGLCYMALVALCWRHGVTKAEETVPLKTLQCYNDYIERIICSWADTEDAQGLVNLTLYHWLDKKQPMSCELSEDLMWSECPSSHRCVPRRCVLPYTQFSVSKEDYYSLQPDRDLSIHLVVPLAQHVQPPPPKDISISPSGDHFLLKWSVPLGDAQVSLLSQKDIQFEVAYKQLQDSWEDASSLHTCNLWVTLEPKLFLPNSIYVARVRAQLAPGSSLSGRPSGWSPEVHWDSPTEDKARPQNLQCFFDGIQSLNCSWEVWTKVTDSVSFGLFYSSSPKAGEKKCSPVVKELQASRYTRYHCSLNVSDPAAHSQYTVSVKRLEQGKFIESFNHIQMNPPTLNLTKNRDSYSLHWETQKMSYPFIQHAFQVQYKKKLDRWEDSKTENLNHAHSMDLPQLEPGTSYCARVRVKTIPEYKGLWSEWSNECTWTTDWVMPTLWIVLILVFLILTFLLALRFGCIYGCKLYRRWKEKIPNPSKSLLFQDGGKGLWPPGSTVTFSSKNPTPQGPQNNLFSELQGVSYTHLEDNEVSPLTIEDPNIIRDPSSGPDTTPAASSEPMEQSSNVQVDPPTLSGRPRKQLPSFDFNGPYLGPPQSHSLPDLPGQLVSPQGVGSLKPALPGSLEYMCLPPGGQVQLVPLSQVMGQGRDVDVQCGSSLETTESPSMESRESPPVELKEEEQEPRDNPVTLPISSGGPKDSKVASEYVTPADLVLTLPTEPLSTSLGPSLEVSSAQSPSLCLKLPRVPSESPALAPAVFEDYVELPPSMSQPAKSLPGNPAPPGPSSPAVSPGEPREEVGAAPTHPEGLLVLQQVGDYCFLPGLGPSPLSPPSKPPSPGLCLETEDLDKDLSVKKLPYQPIPQVPAIQFFKSLKHQDYLSLPPWDNSQPGKVC

SEQ ID NO: 414 - DNA, 1908 bp, Rattus norvegicus
  ref <308>: DATABASE ACCESSION NUMBER: Refseq / NM_053769
  ref <309>: DATABASE ENTRY DATE: 2003-01-13
gcgcggtgaagccagattaggatcagcgagcacttgaggatttagggccacaaaaaaccgcacaagatcgacagactatttctggagagctgcagaacgggcacgctggggtcgctggtgctggccatggtgatggaggtgggcatcctggacgccggggggctgcgcgcgctgctgcgagagcgcgccgctcagtgcctgcttctggattgtcgctccttcttcgccttcaacgccggccacatcgtgggctcagtgaacgtgcgcttcagcaccatcgtgcggcgccgcgccaagggcgccatgggcctggagcatatcgtgccgaacaccgaactgcgcggccgcctgctggccggagcctatacgcccgtagtgctgctggacgaacgcagcgccgccctggacggccgcaagcgcgacggcaccctggccctggccgcgggcgcgctctgccgagaagcgcgctccactcaagtcttcttcctccaaggaggatatgaagcgttttcggcttcctgccctgagctgtgcagcaaacagtccacccccatggggctcagcctcccgctgagtactagtgtgcctgacagtgcagaatccggatgcagctcctgtagcacccctctctacgaccaggggggcccagtggagatcctgtccttcctgtacctgggcagtgcttaccatgcttcccggaaagatatgctcgacgccttgggtatcactgctttgatcaacgtctcggccaattgtcctaaccactttgagggtcactaccagtacaagagcatccctgtggaggacaaccacaaggcagacattagctcctggttcaacgaggcgattgactttatagactccatcaaggatgctggaggaagggtgtttgtgcactgccaggccggcatctccaggtcagccaccatctgccttgcttacctcatgaggactaaccgagtgaagctggacgaggcctttgagttcgtgaagcagaggcggagtattatctcccccaacttcagcttcatgggccagctgctgcaatttgagtcccaagtactggcccctcactgttctgcagaagctgggagcccggccatggctgtccttgaccggggcacctctactacaacggtcttcaacttccctgtctccatccctgttcaccccacgaacagtgccctgaactaccttcaaagccccatcacaacctctccgagctgctgaagggccaggggaggtgtggagtttcacgtgccaccgggacgacactcctcccatgggaggagcaatgcaataactctgggagaggctcatgtgagctggtccttatttatttaacacccccccccccaaacacctcccgagttccactgagttcccaagcagtcataacaatgacttgaccgcaagacatttgctgaactcagcccgttcgggaccaatatattgtgggtacatcgagcccctctgacaaaacagggcagaagggaaaggactctgtttgagccagtttcttcccttgcctgttttttctagaaacttcgtgcttgacatacctaccagtattaaccattcccgatgacatacacgtttgagagttttaccttatttatttttgtgtgggtgggtggtctgccctcacaaatgtcattgtctactcatagaagaacgaaatacctcactttttgtgtttgcgtactgtactatcttgtaaatagacccagagcaggctttcagcactgatggacgaagccagtgttggtttgtttgtagcttttagctatcaacagttgtagtttgtttatttatgatctgaagtaatatatttcttcttctgtgaagacattttgttactgggatgactttttttatacaacagaataaattatgacgtttctattg

SEQ ID NO: 415 - protein, 367 aa, Rattus norvegicus
  ref <308>: DATABASE ACCESSION NUMBER: Refseq / NP_446221
  ref <309>: DATABASE ENTRY DATE: 2003-01-13
MVMEVGILDAGGLRALLRERAAQCLLLDCRSFFAFNAGHIVGSVNVRFSTIVRRRAKGAMGLEHIVPNTELRGRLLAGAYTPVVLLDERSAALDGRKRDGTLALAAGALCREARSTQVFFLQGGYEAFSASCPELCSKQSTPMGLSLPLSTSVPDSAESGCSSCSTPLYDQGGPVEILSFLYLGSAYHASRKDMLDALGITALINVSANCPNHFEGHYQYKSIPVEDNHKADISSWFNEAIDFIDSIKDAGGRVFVHCQAGISRSATICLAYLMRTNRVKLDEAFEFVKQRRSIISPNFSFMGQLLQFESQVLAPHCSAEAGSPAMAVLDRGTSTTTVFNFPVSIPVHPTNSALNYLQSPITTSPSC

SEQ ID NO: 416 - DNA, 2015 bp, Homo sapiens
  ref <308>: DATABASE ACCESSION NUMBER: Refseq / NM_004417
  ref <309>: DATABASE ENTRY DATE: 2003-01-15
tcgctgcgaaggacatttgggctgtgtgtgcgacgcgggtcggaggggcagtcgggggaaccgcgaagaagccgaggagcccggagccccgcgtgacgctcctctctcagtccaaaagcggcttttggttcggcgcagagagacccgggggtctagcttttcctcgaaaagcgccgccctgcccttggccccgagaacagacaaagagcaccgcagggccgatcacgctgggggcgctgaggccggccatggtcatggaagtgggcaccctggacgctggaggcctgcgggcgctgctgggggagcgagcggcgcaatgcctgctgctggactgccgctccttcttcgctttcaacgccggccacatcgccggctctgtcaacgtgcgcttcagcaccatcgtgcggcgccgggccaagggcgccatgggcctggagcacatcgtgcccaacgccgagctccgcggccgcctgctggccggcgcctaccacgccgtggtgttgctggacgagcgcagcgccgccctggacggcgccaagcgcgacggcaccctggccctggcggccggcgcgctctgccgcgaggcgcgcgccgcgcaagtcttcttcctcaaaggaggatacgaagcgttttcggcttcctgcccggagctgtgcagcaaacagtcgacccccatggggctcagccttcccctgagtactagcgtccctgacagcgcggaatctgggtgcagttcctgcagtaccccactctacgatcagggtggcccggtggaaatcctgccctttctgtacctgggcagtgcgtatcacgcttcccgcaaggacatgctggatgccttgggcataactgccttgatcaacgtctcagccaattgtcccaaccattttgagggtcactaccagtacaagagcatccctgtggaggacaaccacaaggcagacatcagctcctggttcaacgaggccattgacttcatagactccatcaagaatgctggaggaagggtgtttgtccactgccaggcaggcatttcccggtcagccaccatctgccttgcttaccttatgaggactaatcgagtcaagctggacgaggcctttgagtttgtgaagcagaggcgaagcatcatctctcccaacttcagcttcatgggccagctgctgcagtttgagtcccaggtgctggctccgcactgttcggcagaggctgggagccccgccatggctgtgctcgaccgaggcacctccaccaccaccgtgttcaacttccccgtctccatccctgtccactccacgaacagtgcgctgagctaccttcagagccccattacgacctctcccagctgctgaaaggccacgggaggtgaggctcttcacatcccattgggactccatgctccttgagaggagaaatgcaataactctgggaggggctcgagagggctggtccttatttatttaacttcacccgagttcctctgggtttctaagcagttatggtgatgacttagcgtcaagacatttgctgaactcagcacattcgggaccaatatatagtgggtacatcaagtccatctgacaaaatggggcagaagagaaaggactcagtgtgtgatccggtttctttttgctcgcccctgttttttgtagaatctcttcatgcttgacatacctaccagtattattcccgacgacacatatacatatgagaatataccttatttatttttgtgtaggtgtctgccttcacaaatgtcattgtctactcctagaagaaccaaatacctcaatttttgtttttgagtactgtactatcctgtaaatatatcttaagcaggtttgttttcagcactgatggaaaataccagtgttgggtttttttttagttgccaacagttgtatgtttgctgattatttatgacctgaaataatatatttcttcttctaagaagacattttgttacataaggatgacttttttatacaatggaataaattatggcatttctattg

SEQ ID NO: 417 - protein, 367 aa, Homo sapiens
  ref <308>: DATABASE ACCESSION NUMBER: Refseq / NP_004408
  ref <309>: DATABASE ENTRY DATE: 2003-01-15
MVMEVGTLDAGGLRALLGERAAQCLLLDCRSFFAFNAGHIAGSVNVRFSTIVRRRAKGAMGLEHIVPNAELRGRLLAGAYHAVVLLDERSAALDGAKRDGTLALAAGALCREARAAQVFFLKGGYEAFSASCPELCSKQSTPMGLSLPLSTSVPDSAESGCSSCSTPLYDQGGPVEILPFLYLGSAYHASRKDMLDALGITALINVSANCPNHFEGHYQYKSIPVEDNHKADISSWFNEAIDFIDSIKNAGGRVFVHCQAGISRSATICLAYLMRTNRVKLDEAFEFVKQRRSIISPNFSFMGQLLQFESQVLAPHCSAEAGSPAMAVLDRGTSTTTVFNFPVSIPVHSTNSALSYLQSPITTSPSC

SEQ ID NO: 418 - DNA, 562 bp, Rattus norvegicus
  ref <308>: DATABASE ACCESSION NUMBER: EMBL / AA800179
  ref <309>: DATABASE ENTRY DATE: 2000-03-03
caggattataaaaggctacaactgtttaatgggaataacctgggacaagcagggggagctttgatgggcagggttgggcagcacaggactaagaacccaaagcccagatagcccacagctctctctccacagccccgccctgaaggatgccggctgcacccgttccaaggcacacattacagacttgcagcttcccatgggctaacccactatgcctctacatttaaaaatacgctttcatcttctctgtagtggagtctccagtcgtggtccttgtctagcacaggtgtagaactgctttgttgatctctgggtttgtccagtcgctccgaatgtcatccaggtgattatcaaaatctacaagtgtctcataggagcggctgtccaggagcgaagcggagatcctctgagcctccggccaatcttcacagtagtcgtgatgtgggtctcggcaccgccacctgttctcgtgttgctcatacacgtggatcgtgggcgctgcacagtccatcgtgaacttggcgttgtccaccatgatgagtgcagcatcactgaagccctc

SEQ ID NO: 419 - DNA, 1950 bp, Homo sapiens
  ref <308>: DATABASE ACCESSION NUMBER: Refseq / NM_006067
  ref <309>: DATABASE ENTRY DATE: 2002-11-05
ggcacgaggcttcccagaggcgcgagtcgcttttccaggagccgaggcccaaacggggccgggcctgaagggtcccccgccagcccgcggccgcgccatcaatcgccgccgcctcgtcccgcttctcggctgaggcgccgcgcggccaggcagcgggtccaggcctcagccgcgcgcccaggggcctccggggccctcccgggtcagcatgcccggggtgaaactgaccacccaggcctactgcaagatggtgctgcacggcgccaagtacccgcactgcgccgtcaacgggctcctggtggccgagaagcagaagccgcgtaaggagcacctccccctgggcggccccggcgcccaccacaccctcttcgtggactgcatccccctcttccacggcaccctggccctcgcccccatgctggaggtggctctcaccctgattgattcatggtgcaaagatcatagctacgtgattgctggttattatcaagctaatgagcgagtaaaggatgccagtccaaaccaggttgcagagaaggtggcctccagaatcgccgagggcttcagcgacactgcgctcatcatggtagacaacaccaagtttacgatggactgcgtagcgcctacgatccacgtgtacgagcaccatgagaacagatggcggtgcagagacccacaccatgactactgtgaagactggccagaggcacagaggatctcagcctcgctcctggacagccggtcctacgagacgctcgtggatttcgataaccacctggatgacattcggaatgactggacaaacccagagatcaataaagctgtcctacacttgtgctaggcaggcaccgctgtgactgggctccgggcctttccactacgttgaagaagaaaacctatttttaaatgtaaataaaatatctggtagcctgtgtggaaagctgaccgttttaagaagtggcatgtgccttgaaagggggcagaatgttcagtcggtcgtgtttttaacacagagtctctagaagaggtgcagacatcccgtctgactgtccctgtggactctctcagttgtatgttgctataatcctccaaatcaaagctctttctgcttgtgcaagattgttcctattaaacagttttaactaaccttttataatctggagagaatactttttaaggcttttgaactatctttttttaaaaaaaaaaaaaagcccacatcttatactccaatgagtgtgtttgtgagtttttatcctgtttgaattttgatgtcgtccaggcgtcctgggatcagggtagacacgtggagtgctggtgctgagctgtttgagaagctctgtgtgggtgtttctgtggtcaggtaggctgggctgtgaacagcactgctccacatggtgtcggctcacagagccaccgcaactctgcccagcgggagtgacaccactgatgccacagaagcctttatcgttaggggcaaaagcagacatctctggtagcaggagctcagtgtggtgctcttcagccacgcagaaagctcacgtgcctgcagggccaggaaagggaaatgatcgtttcttttgtattaggaaaaacaagacttagacttcccgagttgtgcagagtgacgtctgtactttttatacttagaacatttggtcaagttttgtaaccaaaccttagggaattgagagggaaactttatggtacgtttaccttttttcctttttatatgaattattttgtacaaagttcagagagcggtacctttcctactgtcttttctttgactccatggaggaatttgtaacgatcggtgtgacctgaaagggtttgtgatacagcggtcactattttctcttaacacataggaaaaaagttcagacatcgctacaataaatgtgctttatttgatccaaaaaaaaaaaaaaaaaaaaaaaaaaaaaaaaa

SEQ ID NO: 420 - protein, 210 aa, Homo sapiens
  ref <308>: DATABASE ACCESSION NUMBER: Refseq / NP_006058
  ref <309>: DATABASE ENTRY DATE: 2002-11-05
MPGVKLTTQAYCKMVLHGAKYPHCAVNGLLVAEKQKPRKEHLPLGGPGAHHTLFVDCIPLFHGTLALAPMLEVALTLIDSWCKDHSYVIAGYYQANERVKDASPNQVAEKVASRIAEGFSDTALIMVDNTKFTMDCVAPTIHVYEHHENRWRCRDPHHDYCEDWPEAQRISASLLDSRSYETLVDFDNHLDDIRNDWTNPEINKAVLHLC

SEQ ID NO: 421 - DNA, 481 bp, Rattus norvegicus
  ref <308>: DATABASE ACCESSION NUMBER: EMBL / AI639257
  ref <309>: DATABASE ENTRY DATE: 2000-03-04
ttttagccaaacaatacataatctaaaattatatattagaacatttcccttgtcttcaaactacttgatgtaacaaaatattgatatgcagcttggtgaatctcaccaattaatgcaccccctcctttccaattatatgtacactgagaatatgggttggtttgagggattattttgtttctaccacttaatgaatctcaacattttgagtaaatgtacctcagtctaatcagactttttatgacctttataactacatttaaaacccttaaattctatttctgggtgtttgcgagcctgattgctatcatgaagtaaaaatttattactctaggtattcactagataaataaagatagttcttgtttagtaagcatatactgtttctcaactcttctccagcttttgcagtgtactggcatccttaaaatactttgaaaatatggccttgatccatgaattaaatcagtatctaagtgaa

SEQ ID NO: 422 - DNA, 423 bp, Rattus norvegicus
  ref <308>: DATABASE ACCESSION NUMBER: EMBL / AA800912
  ref <309>: DATABASE ENTRY DATE: 2000-03-03
aaaaaggccttggcggcaggaatatagtgtaaaaatcattggaaaaactaaaaggcatcgatacatatccgaatatactttgtacataaattacattttcctttagtcttttgagttgaggtcctgattcggctctgaggtctaataatcaagggggcctggaagctgcacgtttagtccggaatagtccaccatgtacactggccactgctagagagagggggaggggggatagagggaccacgttaggactccaggtgacacggaggaactcccagaataatcagcgcgcttgctttgagggtgagctcaaacgttaacttagtacgcagacactgaggcctggagagggaaagagatctgtccgaggtcatgcaggtagaacgtggtgattgtccccacctgtgttccaggggctcaatc

SEQ ID NO: 423 - DNA, 3446 bp, Homo sapiens
  ref <308>: DATABASE ACCESSION NUMBER: Refseq / NM_016328
  ref <309>: DATABASE ENTRY DATE: 2002-02-05
taaatggcagccaatggagggtggtgttgcgcggggctgggattagggccggggcgaatggctggcaatcttactgggattacagaacaaagagcctccccgcgctcccgctctccgctcctctccccgcgccgccccgccctccgccgcagcccgcgccgggggtgggggccgccgagcgccagccccccggccggccgattccccccccgcgccccctccccgcgcctccctccccgccctcgccgcgccgccgtcctcgcctccctctgcctctccttcccccattctcccggattaattaaggaggcagcggcaggaggctgagtcctggccgcgggccggggccggggcgccgctggcaggagcgcttggggatcctccaaggcgaccatggccttgctgggtaagcgctgtgacgtccccaccaacggctgcggacccgaccgctggaactccgcgttcacccgcaaagacgagatcatcaccagcctcgtgtctgccttagactccatgtgctcagcgctgtccaaactgaacgccgaggtggcctgtgtcgccgtgcacgatgagagcgcctttgtggtgggcacagagaaggggagaatgttcctgaatgcccggaaggagctacagtcagacttcctcaggttctgccgagggcccccgtggaaggatccggaggcagagcaccccaagaaggtgcagcggggcgagggtggaggccgtagcctccctcggtcctccctggaacatggctcagatgtgtaccttctgcggaagatggtagaggaggtgtttgatgttctttatagcgaggccctgggaagggccagtgtggtgccactgccctatgagaggctgctcagggagccagggctgctggccgtgcaggggctgcccgaaggcctggccttccgaaggccagccgagtatgaccccaaggccctcatggccatcctggaacacagccaccgcatccgcttcaagctcaagaggccacttgaggatggcgggcgggactcgaaggccctggtggagctgaacggtgtctccctgattcccaaggggtcacgggactgtggcctgcatggccaggcccccaaggtgccaccccaggacctgcccccaaccgccacctcctcctccatggccagcttcctgtacagcacggcgctccccaaccacgccatccgagagctcaagcaggaagcaccttcctgcccccttgcccccagcgacctgggcctgagtcggcccatgccagagcccaaggccaccggtgcccaagacttctccgactgttgtggacagaagcccactgggcctggtgggcctctcatccagaacgtccatgcctccaagcgcattctcttctccatcgtccatgacaagtcagagaagtgggacgccttcataaaggaaaccgaggacatcaacacgctccgggagtgtgtgcagatcctgtttaacagcagatatgcggaagccctgggcctggaccacatggtccccgtgccctaccggaagattgcctgtgacccggaggctgtggagatcgtgggcatcccggacaagatccccttcaagcgcccctgcacttatggagtccccaagctgaagcggatcctggaggagcgccatagtatccacttcatcattaagaggatgtttgatgagcgaattttcacagggaacaagtttaccaaagacaccacgaagctggagccagccagcccgccagaggacacctctgcagaggtctctagggccaccgtccttgaccttgctgggaatgctcggtcagacaagggcagcatgtctgaagactgtgggccaggaacctccggggagctgggcgggctgaggccgatcaaaattgagccagaggatctggacatcattcaggtcaccgtcccagacccctcgccaacctctgaggaaatgacagactcgatgcctgggcacctgccatcggaggattctggttatgggatggagatgctgacagacaaaggtctgagtgaggacgcgcggccggaggagaggcccgtggaggacagccacggtgacgtgatccggcccctgcggaagcaggtggagctgctcttcaacacacgatacgccaaggccattggcatctcggagcccgtcaaggtgccgtactccaagtttctgatgcacccggaggagctgtttgtggtgggactgcctgaaggcatctccctccgcaggcccaactgcttcgggatcgccaagctccggaagattctggaggccagcaacagcatccagtttgtcatcaagaggcccgagctgctcactgagggagtcaaagagcccatcatggatagtcaaggaactgcctcctcacttggcttctctccccctgccctgcccccagagagggattccggggaccctctggtggacgagagcctgaagagacagggctttcaagaaaattatgacgcgaggctctcacggatcgacatcgccaacacactaagggagcaggtccaggaccttttcaataagaaatacggggaagccttgggcatcaagtacccggtccaggtcccctacaagcggatcaagagtaaccccggctccgtgatcatcgaggggctgcccccaggaatcccgttccgaaagccctgtaccttcggctcccagaacctggagaggattcttgctgtggctgacaagatcaagttcacagtcaccaggcctttccaaggactcatcccaaagcctgatgaagatgacgccaacagactcggggagaaggtgatcctgcgggagcaggtgaaggaactcttcaacgagaaatacggtgaggccctgggcctgaaccggccggtgctggtcccttataaactaatccgggacagcccagacgccgtggaggtcacgggtctgcctgatgacatccccttccggaaccccaacacgtacgacatccaccggctggagaagatcctgaaggcccgagagcatgtccgcatggtcatcattaaccagctccaaccctttgcagaaatctgcaatgatgccaaggtgccagccaaagacagcagcattcccaagcgcaagagaaagcgggtctcggaaggaaattccgtctcctcttcctcctcgtcttcctcttcctcgtcctctaacccggattcagtggcatcggccaaccagatctcactcgtgcaatggccaatgtacatggtggactatgccggcctgaacgtgcagctcccgggacctcttaattactagacctcagtactgaatcaggacctcactcagaaagactaaaggaaatgtaatttatgtacaaaatgtatattcggatatgtatcgatgccttttagtttttccaatgatttttacactatattcctgccaccaaggcctttttaaataagtaaaaaaaaaaaaaaaaaaaaaaa

SEQ ID NO: 424 - protein, 959 aa, Homo sapiens
  ref <308>: DATABASE ACCESSION NUMBER: Refseq / NP_057412
  ref <309>: DATABASE ENTRY DATE: 2002-02-05
MALLGKRCDVPTNGCGPDRWNSAFTRKDEIITSLVSALDSMCSALSKLNAEVACVAVHDESAFVVGTEKGRMFLNARKELQSDFLRFCRGPPWKDPEAEHPKKVQRGEGGGRSLPRSSLEHGSDVYLLRKMVEEVFDVLYSEALGRASVVPLPYERLLREPGLLAVQGLPEGLAFRRPAEYDPKALMAILEHSHRIRFKLKRPLEDGGRDSKALVELNGVSLIPKGSRDCGLHGQAPKVPPQDLPPTATSSSMASFLYSTALPNHAIRELKQEAPSCPLAPSDLGLSRPMPEPKATGAQDFSDCCGQKPTGPGGPLIQNVHASKRILFSIVHDKSEKWDAFIKETEDINTLRECVQILFNSRYAEALGLDHMVPVPYRKIACDPEAVEIVGIPDKIPFKRPCTYGVPKLKRILEERHSIHFIIKRMFDERIFTGNKFTKDTTKLEPASPPEDTSAEVSRATVLDLAGNARSDKGSMSEDCGPGTSGELGGLRPIKIEPEDLDIIQVTVPDPSPTSEEMTDSMPGHLPSEDSGYGMEMLTDKGLSEDARPEERPVEDSHGDVIRPLRKQVELLFNTRYAKAIGISEPVKVPYSKFLMHPEELFVVGLPEGISLRRPNCFGIAKLRKILEASNSIQFVIKRPELLTEGVKEPIMDSQGTASSLGFSPPALPPERDSGDPLVDESLKRQGFQENYDARLSRIDIANTLREQVQDLFNKKYGEALGIKYPVQVPYKRIKSNPGSVIIEGLPPGIPFRKPCTFGSQNLERILAVADKIKFTVTRPFQGLIPKPDEDDANRLGEKVILREQVKELFNEKYGEALGLNRPVLVPYKLIRDSPDAVEVTGLPDDIPFRNPNTYDIHRLEKILKAREHVRMVIINQLQPFAEICNDAKVPAKDSSIPKRKRKRVSEGNSVSSSSSSSSSSSSNPDSVASANQISLVQWPMYMVDYAGLNVQLPGPLNY

SEQ ID NO: 425 - DNA, 422 bp, Rattus norvegicus
  misc_feature (1)..(422): n=a, c, g or t
  ref <308>: DATABASE ACCESSION NUMBER: EMBL / H31747
  ref <309>: DATABASE ENTRY DATE: 2000-03-04
ggaaggaagcaaggaaagaagggagtataccctgtgtgggttttataagcatgccatatagggtaacatgcctctgcaaaaatggtgacctagtgttttgacctcccacgtaagatacggagcccacaactccacaagtgaaaattgtattcacattcacnactcagtgatctagtaactgtcacacatttgactccattccntcaggcgcacagcactgtgcacagtgttttgaacattacggccccttgtaccagaacatcaggatataaattcntcagcacattaatggatttgccaactgtgttaggagntcaagtatatgccatgcccagtaaacnacctgcagggaatagtggnaaaaatggcaggtggcaaggtagnaattacagaaataaaattaacattgtttgggagacacc

SEQ ID NO: 426 - DNA, 424 bp, Rattus norvegicus
  ref <308>: DATABASE ACCESSION NUMBER: EMBL / AA892578
  ref <309>: DATABASE ENTRY DATE: 2000-03-03
catcgggtgttcttcccccggcccccccacaactccagcagcattgactgaaggggaaggaaattatccaatctacatatttttgtttgcatgagtggctggacatggtgtctgtaattctagcactcgggggtgaaggcagtagaatgaggagttcaagaccatccttgtctacatagggagttcaaggccgacttgttagatgaatacagaagactgataaaacaagcccacatcatagcacatgtgaattcccacgtagatgcataagaaggcagatttatggaccccttgtagcatcttttccaaactttaagaaaaatattcccatcccacatgtttcgatggcgacgttgatggcctgccatttgtacccgaaatattatgtaatacatatgcacaattaaaactttccttagcattc

SEQ ID NO: 427 - DNA, 1318 bp, Rattus norvegicus
  ref <308>: DATABASE ACCESSION NUMBER: Refseq / NM_133534
  ref <309>: DATABASE ENTRY DATE: 2003-01-13
gtgggactgggtgagtggctggcacttcctgcagaagtccccgtccccagctgctcaggacctcaccatgcctacctccttcccggaattggatctagagaactttgagtatgatgactctgctgaggcctgttatttgggtgacatcgtggcctttgggaccatcttcctatctattttctactcccttgtcttcacgttcggtctggtggggaatctgttggtggtcctcgccctcaccaacagccggaagtccaagagcatcactgacatctacctcctgaacctggccttgagcgacctgctctttgtggccactttgcccttctggactcactacctcatcagccatgagggcctccacaacgccatgtgcaagctcacgactgctttcttcttcattggcttctttgggggcatattcttcatcaccgtcatcagcatcgaccggtacctcgccatcgtcctggccgccaactccatgaacaaccggacagtgcaacacggcgtcaccatcagtctgggcgtctgggcggcggccatcttagtggcgtcgccccagttcatgttcacaaagagaaaggacaacgaatgtttgggtgattaccccgaggtcctgcaggaaatctggcccgtgctccgcaactcggaggtcaacatcctgggcttcgtcctgcccttgcttatcatgagcttttgctacttccgcatcgtccggacgctgttttcctgcaagaaccggaagaaggccagagccattaggctcatcctcttggtggttgttgtcttcttcctcttctggacgccttacaacatcgtgattttcctggagactctcaaattctacaacttcttccctagttgtggcatgaagagggacctgaggtgggcccttagtgtgacggagacagtggcgtttagccactgctgcctcaacccctttatctacgctttcgctggggaaaagttcagaaggtacctgagacacctgtacaacaagtgcctggccgtcctgtgcggtcgtcctgtccacgccggcttctcaacagagtcccagaggagcaggcaggacagcattctgagcagcttgactcactacacaagcgagggagagggatctctcctgctctgaagggtctccccgaccccgactctactaagaacccagagttcctgcatctgactctgtgtaatgaaaacagattcacacacacacacacacacacacacacacacacacacacacacaccccgctcctcctgcattttatgtgcaagaaatacggaccaggtacctgcaaatcaatccacagtgttt

SEQ ID NO: 428 - protein, 354 aa, Rattus norvegicus
  ref <308>: DATABASE ACCESSION NUMBER: Refseq / NP_598218
  ref <309>: DATABASE ENTRY DATE: 2003-01-13
MPTSFPELDLENFEYDDSAEACYLGDIVAFGTIFLSIFYSLVFTFGLVGNLLVVLALTNSRKSKSITDIYLLNLALSDLLFVATLPFWTHYLISHEGLHNAMCKLTTAFFFIGFFGGIFFITVISIDRYLAIVLAANSMNNRTVQHGVTISLGVWAAAILVASPQFMFTKRKDNECLGDYPEVLQEIWPVLRNSEVNILGFVLPLLIMSFCYFRIVRTLFSCKNRKKARAIRLILLVVVVFFLFWTPYNIVIFLETLKFYNFFPSCGMKRDLRWALSVTETVAFSHCCLNPFIYAFAGEKFRRYLRHLYNKCLAVLCGRPVHAGFSTESQRSRQDSILSSLTHYTSEGEGSLLL

SEQ ID NO: 429 - DNA, 3100 bp, Homo sapiens
  ref <308>: DATABASE ACCESSION NUMBER: Refseq / NM_001337
  ref <309>: DATABASE ENTRY DATE: 2002-11-05
actcgtctctggtaaagtctgagcaggacagggtggctgactggcagatccagaggttcccttggcagtccacgccaggccttcaccatggatcagttccctgaatcagtgacagaaaactttgagtacgatgatttggctgaggcctgttatattggggacatcgtggtctttgggactgtgttcctgtccatattctactccgtcatctttgccattggcctggtgggaaatttgttggtagtgtttgccctcaccaacagcaagaagcccaagagtgtcaccgacatttacctcctgaacctggccttgtctgatctgctgtttgtagccactttgcccttctggactcactatttgataaatgaaaagggcctccacaatgccatgtgcaaattcactaccgccttcttcttcatcggcttttttggaagcatattcttcatcaccgtcatcagcattgataggtacctggccatcgtcctggccgccaactccatgaacaaccggaccgtgcagcatggcgtcaccatcagcctaggcgtctgggcagcagccattttggtggcagcaccccagttcatgttcacaaagcagaaagaaaatgaatgccttggtgactaccccgaggtcctccaggaaatctggcccgtgctccgcaatgtggaaacaaattttcttggcttcctactccccctgctcattatgagttattgctacttcagaatcatccagacgctgttttcctgcaagaaccacaagaaagccaaagccattaaactgatccttctggtggtcatcgtgtttttcctcttctggacaccctacaacgttatgattttcctggagacgcttaagctctatgacttctttcccagttgtgacatgaggaaggatctgaggctggccctcagtgtgactgagacggttgcatttagccattgttgcctgaatcctctcatctatgcatttgctggggagaagttcagaagatacctttaccacctgtatgggaaatgcctggctgtcctgtgtgggcgctcagtccacgttgatttctcctcatctgaatcacaaaggagcaggcatggaagtgttctgagcagcaattttacttaccacacgagtgatggagatgcattgctccttctctgaagggaatcccaaagccttgtgtctacagagaacctggagttcctgaacctgatgctgactagtgaggaaagatttttgttgttatttcttacaggcacaaaatgatggacccaatgcacacaaaacaaccctagagtgttgttgagaattgtgctcaaaatttgaagaatgaacaaattgaactctttgaatgacaaagagtagacatttctcttactgcaaatgtcatcagaactttttggtttgcagatgacaaaaattcaactcagactagtttagttaaatgagggtggtgaatattgttcatattgtggcacaagcaaaagggtgtctgagccctcaaagtgaggggaaaccagggcctgagccaagctagaattccctctctctgactctcaaatcttttagtcattatagatcccccagactttacatgacacagctttatcaccagagagggactgacacccatgtttctctggccccaagggaaaattcccagggaagtgctctgataggccaagtttgtatcaggtgcccatccctggaaggtgctgttatccatggggaagggatatataagatggaagcttccagtccaatctcatggagaagcagaaatacatatttccaagaagttggatgggtgggtactattctgattacacaaaacaaatgccacacatcacccttaccatgtgcctgatccagcctctcccctgattacaccagcctcgtcttcattaagccctcttccatcatgtccccaaacctgcaagggctccccactgcctactgcatcgagtcaaaactcaaatgcttggcttctcatacgtccaccatggggtcctaccaatagattccccattgcctcctccttcccaaaggactccacccatcctatcagcctgtctcttccatatgacctcatgcatctccacctgctcccaggccagtaagggaaatagaaaaaccctgcccccaaataagaagggatggattccaaccccaactccagtagcttgggacaaatcaagcttcagtttcctggtctgtagaagagggataaggtacctttcacatagagatcatcctttccagcatgaggaactagccaccaactcttgcaggtctcaacccttttgtctgcctcttagacttctgctttccacacctgcactgctgtgctgtgcccaagttgtggtgctgacaaagcttggaagagcctgcaggtgccttggccgcgtgcatagcccagacacagaagaggctggttcttacgatggcacccagtgagcactcccaagtctacagagtgatagccttccgtaacccaactctcctggactgccttgaatatcccctcccagtcaccttgtgcaagcccctgcccatctgggaaaataccccatcattcatgctactgccaacctggggagccagggctatgggagcagcttttttttcccccctagaaacgtttggaacaatgtaaaactttaaagctcgaaaacaattgtaataatgctaaagaaaaagtcatccaatctaaccacatcaatattgtcattcctgtattcacccgtccagaccttgttcacactctcacatgtttagagttgcaatcgtaatgtacagatggttttataatctgatttgttttcctcttaacgttagaccacaaatagtgctcgctttctatgtagtttggtaattatcattttagaagactctaccagactgtgtattcattgaagtcagatgtggtaactgttaaattgctgtgtatctgatagctctttggcagtctatatgtttgtataatgaatgagagaataagtcatgttccttcaagatcatgtaccccaatttacttgccattactcaattgataaacatttaacttgtttccaatgtttagcaaatacatattttatagaacttc

SEQ ID NO: 430 - protein, 355 aa, Homo sapiens
  ref <308>: DATABASE ACCESSION NUMBER: Refseq / NP_001328
  ref <309>: DATABASE ENTRY DATE: 2002-11-05
MDQFPESVTENFEYDDLAEACYIGDIVVFGTVFLSIFYSVIFAIGLVGNLLVVFALTNSKKPKSVTDIYLLNLALSDLLFVATLPFWTHYLINEKGLHNAMCKFTTAFFFIGFFGSIFFITVISIDRYLAIVLAANSMNNRTVQHGVTISLGVWAAAILVAAPQFMFTKQKENECLGDYPEVLQEIWPVLRNVETNFLGFLLPLLIMSYCYFRIIQTLFSCKNHKKAKAIKLILLVVIVFFLFWTPYNVMIFLETLKLYDFFPSCDMRKDLRLALSVTETVAFSHCCLNPLIYAFAGEKFRRYLYHLYGKCLAVLCGRSVHVDFSSSESQRSRHGSVLSSNFTYHTSDGDALLLL

SEQ ID NO: 431 - DNA, 876 bp, Rattus norvegicus
  ref <308>: DATABASE ACCESSION NUMBER: Refseq / NM_130741
  ref <309>: DATABASE ENTRY DATE: 2003-01-13
ctcttcctcctccggcacacatcggacctagtagctgctgaaaccatgggcctgggtgtcctgtgtctggcccttgtcctgcttggggtcctgcagaggcaggcccaggactcaactcagaacttgatccctgccccacctctgatcagtgtgcccctgcagccaggcttctggaccgaacggttccagggcaggtggttcgttgtcggcctggcagcgaatgcggtccagaaagaaagacaaagccgctttaccatgtacagcaccatctatgagctacaggaagacaatagctacaacgtcacttccatcctcgtcaggggccagggctgtcgctactggatcagaacattcgttccaagctccaggcctggccagttcaccctggggaatattcacagctaccctcagatacagagctacgatgtgcaagtggccgacactgactacgaccagtttgccatggtatttttccagaagacctctgaaaacaaacagtacttcaaagtcaccctgtacggaagaaccaaggggctgtccgatgaactgaaggagcgattcgtcagctttgccaagtctctgggcctcaaggataacaacatcgttttctctgttcccaccgaccaatgcattgacaactgaacagacggtgagcgtggctgactgggatgtgcagtggcctgatggttcaggtcccacctgtctgtctgccgctccatctttcctgttgccagagaatcacctggctgccccaccagccatgattccaccaagcatctgatccctcttatttgatcagctctccccatccacctgtgttaacgctgccccaccaacgggctccccctttctgctgaataaacacatgtccccaaa

SEQ ID NO: 432 - protein, 198 aa, Rattus norvegicus
  ref <308>: DATABASE ACCESSION NUMBER: Refseq / NP_570097
  ref <309>: DATABASE ENTRY DATE: 2003-01-13
MGLGVLCLALVLLGVLQRQAQDSTQNLIPAPPLISVPLQPGFWTERFQGRWFVVGLAANAVQKERQSRFTMYSTIYELQEDNSYNVTSILVRGQGCRYWIRTFVPSSRPGQFTLGNIHSYPQIQSYDVQVADTDYDQFAMVFFQKTSENKQYFKVTLYGRTKGLSDELKERFVSFAKSLGLKDNNIVFSVPTDQCIDN

SEQ ID NO: 433 - DNA, 385 bp, Rattus norvegicus
  ref <308>: DATABASE ACCESSION NUMBER: EMBL / AI639338
  ref <309>: DATABASE ENTRY DATE: 2000-03-04
gaaatataggtggggtttgtcatccattgtgcgcattccatatacttgggctcagcttgcggatgacacaagcatatgccttgacatgacatcatatattgacagatccagtggttttatacctagaggtctccgagttctttccgaaggctatttcaaagacgctggtcagtgtgtgagaaacaaatgttacacaaggtcagtgacttcttctatgagaccatgacctctggcttctgatgtgtctctgtacgctatcttctggtgtggataatgtgatttaactattgagagctgcttgggggtacttctaagttgctagccttacattttgcgtaatcaggcacttaatcctgattgacgtaaaactaattcttaaagttaa

SEQ ID NO: 434 - DNA, 485 bp, Rattus norvegicus
  ref <308>: DATABASE ACCESSION NUMBER: EMBL / M81183
  ref <309>: DATABASE ENTRY DATE: 2000-03-04
gaattcatttctctactgaaaccttaaagtagtatttggtcattcattgtatgtgtcttatatacccacccacacacagacacaaaggaaatctatcaaattaatcctgatgtattcgaagtggttattcaattcatttatggcagagcaatatcagtcctaatgactcgtgaaagtgttactaactgaatcattatcttacatttactgtttagtaagcatattttgaaaaatgtatggctagagtgtcataataaaatggtatatctttctttagtaattacattaaaattaatcatgtttgattaactggttcctctgatgtagtgtgtcatttcttaacatatagagaactgtagagcatttttttatttaatggcagtgtttgcaactcacaggcacagaaacactcagactaatcatttatcatagagatatagaacttacaggttaaagtattcacaatgtatgtaagagagttatga

SEQ ID NO: 435 - DNA, 431 bp, Rattus norvegicus
  ref <308>: DATABASE ACCESSION NUMBER: EMBL / AI011706
  ref <309>: DATABASE ENTRY DATE: 2000-03-03
aacagctatgacatgattacgaatttaatacgactcactatagggaatttggccctcgaggccaagaattcggcacgaggcaaccaactaaatccaacgcaacatctggcaaaaccttttcagcaaattcttcctggccgtcagtccggcagcctcacctcaccatttcttcttgttgaaacccaaaactaatccccaagaaggagaagcttttcgcgaagccggagcaggtctctttctagagataggagaagagaaaggtctctgtctcgtgagagaaatcacaagccgtctcgatccttctctaggtctcgtagccgatctaggtcaaatgaaaggaaatagaagaccagttggcaaaagtggtgtacaggaaataacttcatttgacaggagtatgtacaggaaattaaagttttgtttgagacttc

SEQ ID NO: 436 - DNA, 1403 bp, Homo sapiens
  ref <308>: DATABASE ACCESSION NUMBER: Refseq / NM_003017
  ref <309>: DATABASE ENTRY DATE: 2002-10-16
ccgggtgagtgagagagttggttggtgttgggccggaggaaagcgggaagactcatcggagcgtgtggatttgagccgccgcattttttaaccctagatctcgaaatgcatcgtgattcctgtccattggactgtaaggtttatgtaggcaatcttggaaacaatggcaacaagacggaattggaacgggcttttggctactatggaccactccgaagtgtgtgggttgctagaaacccacccggctttgcttttgttgaatttgaagatccccgagatgcagctgatgcagtccgagagctagatggaagaacactatgtggctgccgtgtaagagtggaactgtcgaatggtgaaaaaagaagtagaaatcgtggcccacctccctcttggggtcgtcgccctcgagatgattatcgtaggaggagtcctccacctcgtcgcagatctccaagaaggagaagcttctctcgcagccggagcaggtccctttctagagataggagaagagagagatcgctgtctcgggagagaaatcacaagccgtcccgatccttctctaggtctcgtagtcgatctaggtcaaatgaaaggaaatagaagacagtttgcaagagaagtggtgtacaggaaattacttcatttgacaggagtatgtacagaaaattcaagttttgtttgagacttcataagcttggtgcatttttaagatgttttagctgttcaaatctgtttgtctcttgaaacagtgacacaaaggtgtaattctctatggtttgaaatggatcatacgaggcatgtaataccaagaattgttactttacaatgttcccttaagcaaaattgaatttgctttgaacttttagttatgcacagactgataataaacctctaaacctgcccagcggaagtgtgtttttttttaaatttaaatacagaaacaactggcaaaaattgaactaagatttacttttttttccatagctgggatataggctgcagctatagttgaacaagcagtctttaaaaactgctgtgaaacacaggccatcagggaaaacgaaatgctgcactattaaattagaggtttttgaaaaatccaactctcatcctgggcagaggttgcctagttggtatagaatgttaagtttcaagaaagtttacctttgctttaggtcataagttccttatttgattgctgtatatggatacatggctgttcgtgacattctttatgtgcaaatttgtgatttcaaaaatgtcctgccagtttaagggtacattgtagagccgaactttgagttactgtgcaagatttttttttcatgctgtcatttgtaatatgttttgtgagaatccttgggattaaagttttggttacaaattgttaaaaaaaaaaaaaa

SEQ ID NO: 437 - protein, 164 aa, Homo sapiens
  ref <308>: DATABASE ACCESSION NUMBER: Refseq / NP_003008
  ref <309>: DATABASE ENTRY DATE: 2002-10-16
MHRDSCPLDCKVYVGNLGNNGNKTELERAFGYYGPLRSVWVARNPPGFAFVEFEDPRDAADAVRELDGRTLCGCRVRVELSNGEKRSRNRGPPPSWGRRPRDDYRRRSPPPRRRSPRRRSFSRSRSRSLSRDRRRERSLSRERNHKPSRSFSRSRSRSRSNERK

SEQ ID NO: 438 - DNA, 1310 bp, Rattus norvegicus
  ref <308>: DATABASE ACCESSION NUMBER: Refseq / NM_138887
  ref <309>: DATABASE ENTRY DATE: 2003-01-13
gcaggatggagatccgggtgcctgtgcagccttcttggctgcgccgtgcttcagctcctttaccgggtttttccactccgggacgcctctttgaccagcgtttcggcgaagggctgcttgaggcagagctggcttcactgtgccctgctgcgatcgcgccctactatctgcgcgcccccagtgtggcgttacccacagcccaggtgcccacggaccctgggtatttttctgtgctgctggatgtgaagcacttctcgccagaggaaatctctgtcaaggtggttggtgaccatgtggaggtccatgctcggcatgaggagcgcccagatgaacatggattcattgctcgagagttccaccgccgataccgcctgcctcctggcgtggaccctgctgcagtgacctctgcactgtctcctgagggtgttctgtctatccaggccacaccagcgtcggcccaggcctcacttccgtcaccacctgctgccaagtaggggtcccagcattacaggaccgaaccgggaagcctctttaggctcccttttaaaatgccgatctgactccactgcccagccagatgtcccaatcgctgtcaagacagcctttcccaaccacaactagatgtcctcccctgagaccttcccaacccaaaccctacctgagccttagtgacctagacacccttcctaagccctctcccagctttcaggccccacccatgacatctctctagaggcaacacaaacactactgtcaggagccaaggctcccatcagactgaccccactttgggcttctctcacactcaggctgcatttgtgagctgtagaacaccccaccgtgacagcagagtacaatgtagtcagcgctcccctccttccaatcctgtcacctaattccccacagtgatgtagactgcataggctttccacaccagaacgctcaagcctggtccaccagactccagtctctgtaacctaacactcctctgccccagcccactgtctgacttaaaactccaggcaccgaaattcttgaatactattctgacctccaattcttgggactcctattcctgacaaaccaggaaccccaaactcaaattgtatggacactccaccttctccagatgtgctagaccaatgaacaagaacctgtgagctctctgtcctggctccccatctgcagtcagatgtcttagggagcccgctccacatctgccatcctctaaggttgcaccttcactctgaacatttcctgtctccccaggccttcctgccattagttcccaataaatgcacttgagattt

SEQ ID NO: 439 - protein, 162 aa, Rattus norvegicus
  ref <308>: DATABASE ACCESSION NUMBER: Refseq / NP_620242
  ref <309>: DATABASE ENTRY DATE: 2003-01-13
MEIRVPVQPSWLRRASAPLPGFSTPGRLFDQRFGEGLLEAELASLCPAAIAPYYLRAPSVALPTAQVPTDPGYFSVLLDVKHFSPEEISVKVVGDHVEVHARHEERPDEHGFIAREFHRRYRLPPGVDPAAVTSALSPEGVLSIQATPASAQASLPSPPAAK

SEQ ID NO: 440 - DNA, 3617 bp, Rattus norvegicus
  ref <308>: DATABASE ACCESSION NUMBER: Refseq / NM_012598
  ref <309>: DATABASE ENTRY DATE: 2003-01-14
ttctgccccttgtagctgttctgccctcccctttaaaggttgacttgccccgcggcgctccaccgcgctctagtcctctgacgcctccggctcaaccctttgcaacgcggatccccgcccgcctgactgcccgcgcagcgcagttccagcagcaaagcagaagggcgcgccgagatggagagcaaagccctgctcctggtggccctgggagtttggctccagagtttgaccgccttccgcggaggggtggccgcagcagacgggggaagagatttctcagacatcgaaagtaaatttgccctaaggacccctgaagacacagctgaggacacttgtcatctgattcctggattagcagactctgtgtctaactgccacttcaaccacagcagcaaaacctttgtggtgatccatggatggacggtgacaggaatgtatgagagttgggtgcccaaacttgtggctgccctatacaaaagagaacctgactccaatgtcattgtagtagactggttgtatcgggcccagcaacattatccagtgtctgccggctataccaagctggtgggaaatgatgtggccaggttcatcaactggctggaggaagaatttaactaccccctagacaatgtccacctcttagggtacagtcttggagcccatgctgctggcgtggcaggaagtctgaccaacaagaaggtcaatagaattactggcttggatccagctgggcctaactttgagtatgcagaagcccctagtcgcctttctcctgatgatgcggatttcgtagatgtcttacacacatttaccagggggtcgcctggtcgaagtattgggatccagaaaccagtagggcatgttgatatttatcccaatggaggcactttccagccaggatgcaacattggagaagccattcgtgtaattgcagagaaggggcttggagatgtggaccagctggtgaagtgctcgcacgagcgctccatccatctcttcattgactccctgctgaatgaagaaaaccccagcaaggcatacaggtgcaattccaaggaggcctttgagaaagggctctgcctgagttgcagaaagaatcgctgtaacaacgtgggctatgagatcaacaaggtcagagccaagagaagcagtaagatgtacctgaagactcgctctcagatgccctacaaagtattccattaccaagtcaagattcacttttctggaactgagaatgacaagcaaaacaaccaggccttcgagatttctctgtatggcacagtggctgaaagtgagaacattcccttcaccctgccggaggtcgccacaaataaaacctactccttcttgatttacacggaggtggacatcggggaattgctgatgatgaagcttaagtggaagaacgactcctacttccgctggtcagactggtggagcagtcccagctttgtcatcgagaagatccgagtgaaagccggagagactcagaaaaaggtcatcttctgtgccagggagaaagtttctcatctgcagaaaggaaaggacgctgcagtgtttgtgaaatgccatgacaagtctctgaagaagtcgggctgacactggacaaaccaacaagagaagaaagcatctgagttctttgaagaccgaagaaaatgaagtaaattttatttaaaaaaaatacccttgtttgggtgtttgaaagtggattttcctgagtattaatcccagctatatcttgttagttaaatagaagacagtgtcaaatattaaaaggtggctaacacaacgtgaggaacctaatggccgatagcatgtcctccagcatcagaagacagcagagaggagaagcatgccatcttatatcccttaagaaggaatcatttgttcccaaccatacaagactccttcatgtgacccatttggtcatggtctaaaattagtaagggcctcttattttcattagatctctgaggttttaaattgagaccttctcaaagttctcttgaagtctaatatagacaacatttttttgtgctgtgagtcagatccatttctttagcagttgaaacagctggccattgtaactagttcttttaccatcaggatatagcacccctaccaaataaaataaataaataaagtgaccagggacatgtgactttgcaaaagcaatggacgacgtggctcgtggattcctgacccttagtcccaccacaacgaagtacaagtcagtagaggtacaaaacctagactgagtaattcttagtagacttcaagttttatggcttaattcctctgtcttttaaaaacgtgtcacatattataacattattctctagacagatgttgaaatgagcttgtgattcaggtgacatatgaattgagctgagagaaaataatgccctggctgattttatttctctgttttgctttcttgagaaaaggaatacttgtcccactccgtatctgagcctgaccaagaactaaactatgtacttcaggcttaccttgaactctcaaccatcctgccttggcttcctgagtgctgggagcttgataaccataattttattatcagatttttcttagtcattttcaccaatagaacacattcaatgcccaatcgttagcatttcgtttgagactcatcttgaccgtacctctgtcacacgtctaacacatcacattaatttctagtttagaagtgatcaagttcaaattctgcactgcgcaaagtacaagttttagagcaggaccattttttttttaccacgtaaaagtcgaaattactaggaaatgtgtatatcgatgcttgtacactgttgcgtgcaaagtgaggagccttctattgtgatagccatagacagtaccaggctcgttgccgctcttttgttttactataaaaaaataatgaagaattatttatgaacaagatctcatatgttcagattgcttttactattcatcaatataaaatgttaaaaaaaaaaaataaaacaagttctatctcagaggctgttgctgggaacagaaactgtgaaatgtgtgggtatctgaacacctacacacaagcaaagccccacaagagtctttgtcattcaatgtcattcagaaaggaaagagtcaagagatataccataatatgtcagagaagtagttccagatatgctggaatgctagcccttgctaggagaaagttggttgtgcctatgtaatataggacaaaagtgactggtttcattaggctcagtgtcattctaacaataaaatgatgtaccatatgtcaccagcatccccattattgctaattcatggcagtatatacgtacatatctcaatgatgctttgactttaaattttatttattagctgtaaataatgtgtgggtgtgtaaggaagcttgtaaacactggaaacgctgttgtggctatctggggtgtagatttgtggtgctaactctgtgtccacctccatcagtgattgtctcactgagccaactcactctgatgaacagcacaatggaatagcttttgaaggaagaaaataaactcacctgtgtgaagaaatgggatctgctttcaataaaatcgagaacgttttatccggaatccgcg

SEQ ID NO: 441 - protein, 474 aa, Rattus norvegicus
  ref <308>: DATABASE ACCESSION NUMBER: Refseq / NP_036730
  ref <309>: DATABASE ENTRY DATE: 2003-01-14
MESKALLLVALGVWLQSLTAFRGGVAAADGGRDFSDIESKFALRTPEDTAEDTCHLIPGLADSVSNCHFNHSSKTFVVIHGWTVTGMYESWVPKLVAALYKREPDSNVIVVDWLYRAQQHYPVSAGYTKLVGNDVARFINWLEEEFNYPLDNVHLLGYSLGAHAAGVAGSLTNKKVNRITGLDPAGPNFEYAEAPSRLSPDDADFVDVLHTFTRGSPGRSIGIQKPVGHVDIYPNGGTFQPGCNIGEAIRVIAEKGLGDVDQLVKCSHERSIHLFIDSLLNEENPSKAYRCNSKEAFEKGLCLSCRKNRCNNVGYEINKVRAKRSSKMYLKTRSQMPYKVFHYQVKIHFSGTENDKQNNQAFEISLYGTVAESENIPFTLPEVATNKTYSFLIYTEVDIGELLMMKLKWKNDSYFRWSDWWSSPSFVIEKIRVKAGETQKKVIFCAREKVSHLQKGKDAAVFVKCHDKSLKKSG

SEQ ID NO: 442 - DNA, 512 bp, Rattus norvegicus
  ref <308>: DATABASE ACCESSION NUMBER: EMBL / AI639155
  ref <309>: DATABASE ENTRY DATE: 2000-03-04
aaaattacaatacataagacactttctctttatatgttaaacttttcttagtattttgtatttatattttatcactttgtgattttaaaccataattcagttaaatatagttgtaacaagtgagaagtagattggcctttatattatactaccagggaaaattgaaattttctcataaacactttgctgccagaattcagtatataccgacggtatatacaaaatatcctacattctgttttcagactaataaatcttaatatagtcaagtgtttgtcttcaggatctgtactgtaaacaaaatattgacaatgactatgttttaaggagtgggtatttttaaacatgtgacttctgttgtaatgtaagaatcaaaggtgtacataaaaatagatttgtcaacgtggaacttaaagttgaaaatccaagaaattagaaacactgatttttttttttaaatgaggggaaacatgggtaaacacaaatgaatcaataaaaaagtgttaagacaa

SEQ ID NO: 443 - DNA, 480 bp, Rattus norvegicus
  ref <308>: DATABASE ACCESSION NUMBER: EMBL / AI639308
  ref <309>: DATABASE ENTRY DATE: 2000-03-04
gaaacccagaagccctgtttcctgcacaaaccaattcaaagttcaatggtatttcctataaatttgatttgggattttttttttaaactttgtaaaccccaactaggaaacgtggcacttgtgcattttatgggtgggtttagtttctcttgattctgttggttaaaagggcaataaaaaaatctggtattctcggtcacttggttaccttaaataaatgattaccagtgactcggatgacaagtgacaaggcagaatttttcaacccgttatgaagctccttatgcctaaggcaaaatcttgaataaaatattgaattctaatttcctactaggtagcagactgacagctgcacattcggcaagctttggggtgggtttttttttttttttggattttatttttcattgcagatttatttggcaatgtacagtaaattttgtaaacttgcatcaagtttatgaataaagaaccctttaa

SEQ ID NO: 444 - DNA, 4371 bp, Homo sapiens
  ref <308>: DATABASE ACCESSION NUMBER: Refseq / NM_006165
  ref <309>: DATABASE ENTRY DATE: 2002-09-30
gaattccgggctgtttagctgtaattagggtgcaaggataaggtgtaagaactggctggaggttgaatgttttcctggaggagtgttagcatcaactagatccctggaatttctgcctttctgtctcaagatgcatgtctttgtccagagtacctgtggagaagaaacaatggattccttagaccatatgctgacagatcctctggaacttggtccgtgtggagatggccatggcacgcgcatcatggaggattgcctcctgggaggcaccagagttagtctgcccgaggaccttctggaggatcctgagatcttctttgatgttgtcagcctctcaacatggcaggaagtgttaagtgattctcaacgtgaacacctccagcagtttctgccccagtttcctgaagacagtgctgagcagcagaatgaactcatcttagccttgttcagtggggagaacttccgctttggaaaccctctgcacattgcccagaagcttttccgagacggacactttaaccccgaggtggtcaagtaccggcagttatgcttcaagtcacagtacaagcgctacctcaactcccagcagcagtatttccatcggctgctgaagcaaattcttgcttcccggagtgatctgctggagatggcccggcggagtggccccgcccttcccttccggcagaaacgcccttcaccatcccgcacacctgaggagcgggagtggcggacccagcagcgctacttgaaggtcttaagggaagtgaaagaggagtgtggtgacacagccctgtcatctgatgaagaggccacgttggatttacaagaacaattttcttttgaagatctcagctcatggcttccgagctctccagcacgttctcctagtcctgcggtgcccctgcgggtggtgcccacactttcaaccacggatatgaaaaccgcagataaagtagaactgggggacagtgacctgaagataatgttaaagaagcaccacgagaagcggaaacatcagccagatcacccggaccttttgacaggggacctgactctcaatgacatcatgactcgagtaaatgctggcaggaagggctctctggcagccttatatgacttggctgtccttaaaaaaaaggttaaggaaaaagaggaaaagaagaagaagaaaataaaaacgatcaaatcagaggcagaggacctggccgagccgctaagcagtactgaaggggtcgcacctctctcacaggccccctctccgctggcaattcctgctatcaaggaagagccccttgaagacctcaagccttgccttggaatcaatgaaatatcttccagcttcttctctcttctattagagatcttgctgctggagagtcaggctagccttcctatgctagaggagcgagttttggattggcagtcatcgccagccagctccctcaacagctggttctctgcggcccccaactgggctgagttggtactaccagccctgcagtatcttgctggagaaagtcgagctgttccttccagtttctctccatttgttgaattcaaagagaaaacccagcagtggaagttgcttggccaatcccaagataatgaaaaggaattagctgctctcttccagctatggctagagaccaaagatcaggccttctgtaagcaagaaaatgaagacagctcagatgccacaacacctgtccctcgggtaagaactgactatgtggtgcgtcccagcacgggggaggagaaacgggtttttcaggagcaggagcgttacaggtatagccaaccccataaggcgttcacctttcgcatgcacggctttgagtctgtggtggggccagtgaagggcgtgtttgacaaggagacctcgctcaacaaggctcgggagcactccctgctgcgctccgaccggcctgcctacgtcaccattctgtctcttgttcgggacgctgcggctcgactgcctaatggagaaggcacacgggcagagatctgtgaactgcttaaggactcccagtttcttgcaccagatgtcaccagcactcaggtaaatacagtagtgagtggtgcactggatcggctacattacgaaaaagatccctgtgtgaaatacgacattggacgaaagctgtggatctacctgcatcgtgaccggagtgaagaagagtttgagcggattcaccaagcacaagcagctgcagctaaagccagaaaagctcttcagcaaaaacccaagcccccatccaaggtgaagtccagtagcaaggagagctccataaaggtccttagcagtggcccttctgagcagagccagatgagcctcagtgactccagtatgccacccaccccagtcacacctgtaacccccaccacaccagcattgcccgccattcccatctcccctccacctgtatcggcagtgaacaaaagcggcccttccacagtctcagaaccagctaagtctagctcgggtgttcttctggtgtcttcaccaacaatgccacatctgggaacaatgctttccccagcttccagccagactgcacccagttctcaggctgccgcccgggtcgtgagccactctggctctgctggactgtctcaggtgcgagtggtggcccagcctagccttcctgctgttccccagcagtcgggagggccggcacagacattgccacagatgccagcaggaccgcagatccgggttccagccactgccacacagaccaaagtagtgccccagacagtaatggccactgtgcccgtcaaagcgcagactacggcagccactgtgcagcggcctggacccgggcagacagggctcacggtgacaagtctccctgccacagccagccctgtgagtaagccagccacgagttctcctgggacctctgctcccagtgcctccacggctgccgtcattcaaaatgtcacaggacagaacatcatcaagcaggtggcaatcactgggcagcttggtgtgaagccccaaacaggcaacagcattccactcacagccactaacttccgcatccagggtaaggatgtattgcgtctgccgccctcttccatcaccacagatgccaagggccagacggttctgcgaatcactccggacatgatggccacattggccaagtcccaggttaccacagtcaaattgacccaggacctcttcgggacaggaggcaacactacaggcaaaggcatctctgccaccttacacgtcacttccaatccagtacatgcagctgatagccctgccaaggccagttcagccagtgccccttcatccactccaacaggtaccactgtggtcaaagtgactcctgacctcaagccaacagaagcctcaagttcggcttttcgcttgatgccagctcttggcgtgagtgtggctgaccagaagggaaaaagcacagtggcctcttcagaagcaaaaccagctgccacgatccgcatcgtgcagggactgggagtgatgcctcccaaagcaggccagaccatcaccgttgcaacccacgccaagcaaggggcctcggtggccagtgggtctggaactgtccatacttcagcggtgtccttacccagtatgaatgctgctgtgtccaagactgtagctgtggcttctggggctgcaagcacccccatcagcatcagcacaggagcccccaccgtgcggcaggtccctgtcagcaccacggttgtgtccacgtcccaggctgggaagttgcctacacggatcacagttcccctctctgtgatcagccagccaatgaagggcaagagcgtggtcacagcccccatcatcaaaggcaaccttggagccaacctcagtgggttgggccgcaacatcatcctcacaactatgccagcaggcactaagctcattgctggcaataagcctgttagtttcctcactgctcagcagttgcagcagcttcagcagcaaggtcaggccacacaggtgcgcatccagactgtccctgcatcccatctccaacagggaacagcttctggctcctccaaagcagtctccactgttgttgtgactacagctccgtctcctaaacaggcacctgagcaacaatgattatgagagaggatggcttccgtgaaagaccatgcctggtctgctctggctgagaagggaccagggaggttgcatcattgttttaagcttgcctgttcaaggcagccaggcgaggggtgatggcaacggtggcctggattcgtggcctggattctgctgccacgtgccatagtggagcaccctgagaaagttcactccagggttccaaggtctgctctctaccaatctaggagaatattctgttgaaattgcagaaccggaattcc

SEQ ID NO: 445 - protein, 1324 aa, Homo sapiens
  ref <308>: DATABASE ACCESSION NUMBER: Refseq / NP_006156
  ref <309>: DATABASE ENTRY DATE: 2002-09-30
MHVFVQSTCGEETMDSLDHMLTDPLELGPCGDGHGTRIMEDCLLGGTRVSLPEDLLEDPEIFFDVVSLSTWQEVLSDSQREHLQQFLPQFPEDSAEQQNELILALFSGENFRFGNPLHIAQKLFRDGHFNPEVVKYRQLCFKSQYKRYLNSQQQYFHRLLKQILASRSDLLEMARRSGPALPFRQKRPSPSRTPEEREWRTQQRYLKVLREVKEECGDTALSSDEEATLDLQEQFSFEDLSSWLPSSPARSPSPAVPLRVVPTLSTTDMKTADKVELGDSDLKIMLKKHHEKRKHQPDHPDLLTGDLTLNDIMTRVNAGRKGSLAALYDLAVLKKKVKEKEEKKKKKIKTIKSEAEDLAEPLSSTEGVAPLSQAPSPLAIPAIKEEPLEDLKPCLGINEISSSFFSLLLEILLLESQASLPMLEERVLDWQSSPASSLNSWFSAAPNWAELVLPALQYLAGESRAVPSSFSPFVEFKEKTQQWKLLGQSQDNEKELAALFQLWLETKDQAFCKQENEDSSDATTPVPRVRTDYVVRPSTGEEKRVFQEQERYRYSQPHKAFTFRMHGFESVVGPVKGVFDKETSLNKAREHSLLRSDRPAYVTILSLVRDAAARLPNGEGTRAEICELLKDSQFLAPDVTSTQVNTVVSGALDRLHYEKDPCVKYDIGRKLWIYLHRDRSEEEFERIHQAQAAAAKARKALQQKPKPPSKVKSSSKESSIKVLSSGPSEQSQMSLSDSSMPPTPVTPVTPTTPALPAIPISPPPVSAVNKSGPSTVSEPAKSSSGVLLVSSPTMPHLGTMLSPASSQTAPSSQAAARVVSHSGSAGLSQVRVVAQPSLPAVPQQSGGPAQTLPQMPAGPQIRVPATATQTKVVPQTVMATVPVKAQTTAATVQRPGPGQTGLTVTSLPATASPVSKPATSSPGTSAPSASTAAVIQNVTGQNIIKQVAITGQLGVKPQTGNSIPLTATNFRIQGKDVLRLPPSSITTDAKGQTVLRITPDMMATLAKSQVTTVKLTQDLFGTGGNTTGKGISATLHVTSNPVHAADSPAKASSASAPSSTPTGTTVVKVTPDLKPTEASSSAFRLMPALGVSVADQKGKSTVASSEAKPAATIRIVQGLGVMPPKAGQTITVATHAKQGASVASGSGTVHTSAVSLPSMNAAVSKTVAVASGAASTPISISTGAPTVRQVPVSTTVVSTSQAGKLPTRITVPLSVISQPMKGKSVVTAPIIKGNLGANLSGLGRNIILTTMPAGTKLIAGNKPVSFLTAQQLQQLQQQGQATQVRIQTVPASHLQQGTASGSSKAVSTVVVTTAPSPKQAPEQQ

SEQ ID NO: 446 - DNA, 481 bp, Rattus norvegicus
  misc_feature (1)..(481): n=a, c, g or t
  ref <308>: DATABASE ACCESSION NUMBER: EMBL / AI639372
  ref <309>: DATABASE ENTRY DATE: 2000-03-04
attcagagtggtcttcctggctagacggtaccaagataaacatctctgcttttctcttctcttctcacgccttttcttggtgtggcgtntgacaagatttcagttcaaagcctcactatggattgattttgttgctgttgttgttgtcgttcgtgtggtgtgtgtgtgtgtgtgtgtgtgtgtgtgtgtgtgtgtgtgtgtgtgtgtgtgctgggccaattttagatacctgagtgcacttttttttagttagtcctaacttttaaagaaagaaagccaagagatatatctggtgtaaatgtcaagacatggattctgtttgctgtcctgtcccctcccctactccccagacccttgaccccacttgagtacactgcacaaattaaacgctagggagtttgaataaaggcagtttttctaactcgtcactcatttgttgtaactcaataaagcaaagactaaacgtttttataaccttcaa

SEQ ID NO: 447 - DNA, 353 bp, Rattus norvegicus
  ref <308>: DATABASE ACCESSION NUMBER: EMBL / AF023087
  ref <309>: DATABASE ENTRY DATE: 1999-06-15
tagagcgcgatgaggaaaagggctgagctgagctttggttctccagaatgtaagaagaaaaatttaaaacaaaaatctgaactctcaaaagtctatttttttaactgaaaatgtagatttatccatgttcgggagttggaatgctgtggttacctactgagtaggcggtgactttgtatgctatgaacatgaagttcattattttgtggttttattttacttcgtacttgtgtttgcttaaacaaagtgacttgtttggcttataaacacattgaatgcgctttactgcccatgggatatgtggtgtgtatccttcagaaaaattaaaaggaaaataaagaaactaactggtt

SEQ ID NO: 448 - DNA, 5459 bp, Rattus norvegicus
  misc_feature (1)..(5459): n=a, c, g or t
  ref <308>: DATABASE ACCESSION NUMBER: Refseq / NM_031802
  ref <309>: DATABASE ENTRY DATE: 2003-01-13
ggccgttctgagcgagcagaagccggagccgagccggggcccgtgccggcgccattgcgcgggngccgcgggcaaakctcggcgccgggcggcgggccgggccaggccatgcgggccgagtgagctggcgcccgcagcccgcggcgcggcatggcttccccgccgagctccgggcagccccggccgccgccgccgccgccgccgcccgcgcgcctgctgctgcccctgctgctgtcgctgctgctgtggttggcgcccggggcctggggctggacgcggggcgccccccggccgccgcccagcagcccgccgctctccatcatgggcctcatgccgctcaccaaggaggtggccaagggcagcatcgggcgcggcgtgctccccgccgtggagctagccatcgagcagatccgcaacgagtcactcctgcgcccctacttcctggacctgcgactctatgacaccgagtgtgacaatgcaaagggactgaaagccttctatgacgcaataaagtatgggccgaaccatttgatggtgtttggaggcgtctgtccgtctgtcacatctattatcgcggagtccctccaaggctggaatctggtgcagctttccttcgccgccaccacgcctgttcttgcggataagaagaagtacccgtatttcttccggacggtgccgtcagacaacgcggtgaaccccgccatcctgaagctcctgaagcacttccgctggcggcgtgtgggcacactcacgcaggacgngcagcgcttctccgaggtgaggaatgacctgactggggttctgtatggggaagatattgagatctcagacacagagagtttctccaatgatccctgcaccagcgtcaaaaagctcaaggggaatgacgtgcggatcatccttggccagtttgaccagaatatggcagcaaaagtcttctgttgtgccttcgaggagagcatgtttggcagcaagtaccagtggatcatcccgggatggtacgagcctgcgtggtgggagcaggtgcatgtggaggccaattcctcacgctgcctgcgcagaagcctcctggctgccatggaaggttacatcggagtggactttgagcccctgagctccaaacaaatcaagaccatctcagggaagactccacagcagtttgaaagagagtacaacagcaaacgttcaggcgtggggcccagcaagttccatgggtacgcctacgatgggatctgggtcatcgccaagaccctacagagggccatggagacactgcatgccagtagcaggcaccagcggatccaggacttcaactacacagaccacacgctgggcaaaatcatcctcaatgccatgaacgagaccaacttcttcggggtcacgggtcaagttgtgttccggaacggggagagaatgggaaccattaaatttactcaatttcaagacagcagagaggtgaaggtcggcgaatacaacgcggtggctgacacactggagatcatcaatgacaccataaggttccaggggtccgagccacccaaggacaagaccatcattctggagcagcttcggaagatctcgcttccactgtatagcatcctgtccgctctcaccatcctcggcatgatcatggccagcgccttcctcttcttcaacatcaagaaccggaaccaaaagctgattaagatgtcaagcccctacatgaacaacctcatcatcctgggaggaatgctgtcctatgcatccatcttcctctttggcctcgacgggtccttcgtctcagaaaagacctttgaaacactctgcacggtccggacctggattctcaccgtgggctacacaactgcctttggggccatgtttgcaaagacctggagggtccatgccatcttcaaaaatgtgaagatgaagaagaagatcatcaaagaccagaagctgcttgtgattgtggggggcatgctgctcatcgacctgtgcatcctgatctgttggcaggctgtggaccccctgcggaggacagtggagaggtacagcatggagccggacccagcaggccgggacatctccatccgcccattgctggaacactgcgaaaacacccacatgaccatctggcttggcattgtctacgcctacaaggggctcctcatgctattcggttgtttcttggcatgggaaacccgcaatgtgagcatccctgccctcaacgacagcaagtacatcggcatgagtgtgtacaatgtggggatcatgtgcatcatcggggctgctgtctccttcctgacgcgtgaccagcccaacgtgcagttctgcatcgtggccctggtcatcatcttctgcagcaccatcactctctgcctggtgtttgtgccaaagctcatcactctgaggacaaaccctgacgcagccactcagaacaggcggttccagttcacacagaaccagaagaaagaagattcgaagacctccacttcagtcaccagcgtgaaccaggcgagcacgtcacgcctggagggactgcagtcagaaaaccaccgccttcgaatgaagatcacagagctggacaaagacttggaagaagtcaccatgcagctacaagacacaccagagaagaccacatacatcaaacagaatcactaccaagagctcaacgacatcctcagcttgggcaacttcacagagagcacagatggaggaaaggccattctaaaaaatcacctcgatcaaaacccccagctccagtggaacacgacagagccctcaagaacatgcaaagaccccatagaagacatcaactccccggagcacatccagcgccggctgtcgctccagctccccatccttcaccacgcctacctcccatccatcggaggcgtggatgccagctgcgtcagcccctgtgtcagccctaccgccagccctcgccacagacacgtaccaccctccttccgagtcatggtctcgggcctgtaggggtgggaggcctggggccggggcctccccgggacagcaccatgctgggccaaggcgcctgccacaggcacactgacggcggcgagaagctgggcaccatgctgcctctccagactgctggaatggcgctcaggcagagcgggactcggcaccgacctcgagccttatctgtgaaggtcttactctcacagaggagaggaatgacaatgacttctccttcttggcgtctgcaaacaaagaggagttgggatgtctgaaacttgcaanaacaaatcaaactctagacaaaggagagaggcctcggactcctgctgtcctcgccaagtggccagagcaagggctctgcagaaatggccctcggcactctgcacacacgtcatcggtggtgcccgcccccacacaccagcccttctccactctgggggagaaggtgagcagggccaccaggtccccagcagctggcccagtccacttcagacttcctggaacaagggagtcagcaggaagggtagccgggctctgccctggggctgggggaatcagagcaagcagctgcgcatgctcccaggggacatccatcagaagagagatgtttgttactctctgataaatgccacacattaacacaataacacccgttccggggactgtggggattcagggcaccgcactgcagacatgctctgcaggatgcaacagacagtctgtcatgcacctaccgtgtcggccatgttcttgtgttcaaatttagggttcccggtaataaggggaaccatctgagctaatcatggaatgtctgctcccagaaaacacgataaagaaagattgtgcactttaacctctcccatgggggcccaagggctgctgggattccccctctcccaacacactgactttgtttttgaccaaagtgaatcaggggcattctgctaaaagtcatctctgtgttcctgagctagagctgctggcccagggccccctggcttccagaaggtagccctccagtgcccctccagccctaacccgtgagtgcccacctagggtgtcacctgaggcggtcantcagcaggctggttcccatccatcacgacatactttccttgtaattgaaccccaaagagcactggcctgggagtcagacctggatttgagtcctcagtcccttcagactctctccgtgaccttgggcaagtcaccagtgtctctctgagcctcggtttcccctctgtaacagactggggttgaaataacacccatcctgcctacctcacagggtcactctgaggatggacacttgatctcattcatccaggagagctttgcactgggaagcagctctgacctgtgaggtattagtacgaccatgaccttcagccctcccaccagctggggagggtgcggtgcggcccagagaaacttcctgcaaggccctctacctagggacaggaacagcccagtcagaggcaggctcaggactcttctgacattccttaataggttcattctttgctaaaggcctgaatggcaccntccaggggcgtctgcacaaacgagtggtttgctcactccctaaagaatcctaaaggcagcttcaacaggcaggcaataatctcttcccagaccactgcagtcaggaacacactgctgtcaaccaccaggctgtgacgaaagggcccacgggaatcaccatcgccaacatttcaaaacaccctagttcacgtagcatagctcttcctccccatccctcaaagagaggttacagaggttctgtagcttttaaggggggaaaaatgtcaacacatcacaggtcaagttgatgtccttctctgtttaggcaccaaaactccgtgttgtcactcactgtgtgtgttaaccagtatttccttgctttttcgacttcaccaaaaccaaatttcatttaaaagaccgnattagtttttttcaaagggaaagagataattaactgtacataatgtatacagacaaaacaaaacctgtagaaatattactccagcatagcaggaaaaaaaaaaaaacaaaaaacaaaaaacaaaagtattggattgtcggaggtgagcgtgcgtctgtaatcccttgtgactccgaactgtgctccgtcttctaggttaacccacaagatacatctctgtctactgatcctgtaggttcacccatttttttttaatttctctgcaattaacaagccccacaaagtgattctggctatctactggttctgttcttttatatgcagcaaacacacggtccatttcctagaggcttccgcccaagggcatcttccagtgacgctagtgcgcacacacacacacacacacacacacacacacacacacacacacacacgactgctttcaattagaccggaactggcagaatcaaatgtaaatgaggagtttctctcgccccactgcatggtatcgatttttaataaattgttgcaaatttgtttttatgaataacagggg

SEQ ID NO: 449 - protein, 940 aa, Rattus norvegicus
  misc_feature (1)..(940): Xaa=Unknown amino acid
  ref <308>: DATABASE ACCESSION NUMBER: Refseq / NP_113990
  ref <309>: DATABASE ENTRY DATE: 2003-01-13
MASPPSSGQPRPPPPPPPPARLLLPLLLSLLLWLAPGAWGWTRGAPRPPPSSPPLSIMGLMPLTKEVAKGSIGRGVLPAVELAIEQIRNESLLRPYFLDLRLYDTECDNAKGLKAFYDAIKYGPNHLMVFGGVCPSVTSIIAESLQGWNLVQLSFAATTPVLADKKKYPYFFRTVPSDNAVNPAILKLLKHFRWRRVGTLTQDXQRFSEVRNDLTGVLYGEDIEISDTESFSNDPCTSVKKLKGNDVRIILGQFDQNMAAKVFCCAFEESMFGSKYQWIIPGWYEPAWWEQVHVEANSSRCLRRSLLAAMEGYIGVDFEPLSSKQIKTISGKTPQQFEREYNSKRSGVGPSKFHGYAYDGIWVIAKTLQRAMETLHASSRHQRIQDFNYTDHTLGKIILNAMNETNFFGVTGQVVFRNGERMGTIKFTQFQDSREVKVGEYNAVADTLEIINDTIRFQGSEPPKDKTIILEQLRKISLPLYSILSALTILGMIMASAFLFFNIKNRNQKLIKMSSPYMNNLIILGGMLSYASIFLFGLDGSFVSEKTFETLCTVRTWILTVGYTTAFGAMFAKTWRVHAIFKNVKMKKKIIKDQKLLVIVGGMLLIDLCILICWQAVDPLRRTVERYSMEPDPAGRDISIRPLLEHCENTHMTIWLGIVYAYKGLLMLFGCFLAWETRNVSIPALNDSKYIGMSVYNVGIMCIIGAAVSFLTRDQPNVQFCIVALVIIFCSTITLCLVFVPKLITLRTNPDAATQNRRFQFTQNQKKEDSKTSTSVTSVNQASTSRLEGLQSENHRLRMKITELDKDLEEVTMQLQDTPEKTTYIKQNHYQELNDILSLGNFTESTDGGKAILKNHLDQNPQLQWNTTEPSRTCKDPIEDINSPEHIQRRLSLQLPILHHAYLPSIGGVDASCVSPCVSPTASPRHRHVPPSFRVMVSGL

SEQ ID NO: 450 - DNA, 3155 bp, Homo sapiens
  ref <308>: DATABASE ACCESSION NUMBER: Refseq / NM_005458
  ref <309>: DATABASE ENTRY DATE: 2002-11-12
atggcttccccgcggagctccgggcagcccgggccgccgccgccgccgccaccgccgcccgcgcgcctgctactgctactgctgctgccgctgctgctgcctctggcgcccggggcctggggctgggcgcggggcgccccccggccgccgcccagcagcccgccgctctccatcatgggcctcatgccgctcaccaaggaggtggccaagggcagcatcgggcgcggtgtgctccccgccgtggaactggccatcgagcagatccgcaacgagtcactcctgcgcccctacttcctcgacctgcggctctatgacacggagtgcgacaacgcaaaagggttgaaagccttctacgatgcaataaaatacgggccgaaccacttgatggtgtttggaggcgtctgtccatccgtcacatccatcattgcagagtccctccaaggctggaatctggtgcagctttcttttgctgcaaccacgcctgttctagccgataagaaaaaatacccttatttctttcggaccgtcccatcagacaatgcggtgaatccagccattctgaagttgctcaagcactaccagtggaagcgcgtgggcacgctgacgcaagacgttcagaggttctctgaggtgcggaatgacctgactggagttctgtatggcgaggacattgagatttcagacaccgagagcttctccaacgatccctgtaccagtgtcaaaaagctgaaggggaatgatgtgcggatcatccttggccagtttgaccagaatatggcagcaaaagtgttctgttgtgcatacgaggagaacatgtatggtagtaaatatcagtggatcattccgggctggtacgagccttcttggtgggagcaggtgcacacggaagccaactcatcccgctgcctccggaagaatctgcttgctgccatggagggctacattggcgtggatttcgagcccctgagctccaagcagatcaagaccatctcaggaaagactccacagcagtatgagagagagtacaacaacaagcggtcaggcgtggggcccagcaagttccacgggtacgcctacgatggcatctgggtcatcgccaagacactgcagagggccatggagacactgcatgccagcagccggcaccagcggatccaggacttcaactacacggaccacacgctgggcaggatcatcctcaatgccatgaacgagaccaacttcttcggggtcacgggtcaagttgtattccggaatggggagagaatggggaccattaaatttactcaatttcaagacagcagggaggtgaaggtgggagagtacaacgctgtggccgacacactggagatcatcaatgacaccatcaggttccaaggatccgaaccaccaaaagacaagaccatcatcctggagcagctgcggaagatctccctacctctctacagcatcctctctgccctcaccatcctcgggatgatcatggccagtgcttttctcttcttcaacatcaagaaccggaatcagaagctcataaagatgtcgagtccatacatgaacaaccttatcatccttggagggatgctctcctatgcttccatatttctctttggccttgatggatcctttgtctctgaaaagacctttgaaacactttgcaccgtcaggacctggattctcaccgtgggctacacgaccgcttttggggccatgtttgcaaagacctggagagtccacgccatcttcaaaaatgtgaaaatgaagaagaagatcatcaaggaccagaaactgcttgtgatcgtggggggcatgctgctgatcgacctgtgtatcctgatctgctggcaggctgtggaccccctgcgaaggacagtggagaagttcagcatggagccggacccagcaggacgggatatctccatccgccctctcctggagcactgtgagaacacccatatgaccatctggcttggcatcgtctatgcctacaagggacttctcatgttgttcggttgtttcttagcttgggagacccgcaacgtcagcatccccgcactcaacgacagcaagtacatcgggatgagtgtctacaacgtggggatcatgtgcatcatcggggccgctgtctccttcctgacccgggaccagcccaatgtgcagttctgcatcgtggctctggtcatcatcttctgcagcaccatcaccctctgcctggtattcgtgccgaagctcatcaccctgagaacaaacccagatgcagcaacgcagaacaggcgattccagttcactcagaatcagaagaaagaagattctaaaacgtccacctcggtcaccagtgtgaaccaagccagcacatcccgcctggagggcctacagtcagaaaaccatcgcctgcgaatgaagatcacagagctggataaagacttggaagaggtcaccatgcagctgcaggacacaccagaaaagaccacctacattaaacagaaccactaccaagagctcaatgacatcctcaacctgggaaacttcactgagagcacagatggaggaaaggccattttaaaaaatcacctcgatcaaaatccccagctacagtggaacacagcagagccctctcgaacatgcaaagatcctatagaagatataaactctccagaacacatccagcgtcggctgtccctccagctccccatcctccaccacgcctacctcccatccatcggaggcgtggacgccagctgtgtcagcccctgcgtcagccccaccgccagcccccgccacagacatgtgccaccctccttccgagtcatggtctcgggcctgtaagggtgggaggcctgggcccggggcctcccccgtgacagaaccacactgggcagaggggtctgctgcagaaacactgtcggctctggctgcggagaagctgggcaccatggctggcctctcaggaccactcggatggcactcaggtggacaggacggggcagggggagacttggcacctgacctcgagccttatttgtgaagtccttatttcttcacaaagaagaggaacggaaatgggacgtcttccttaacatctgcaaacaaggaggcgctgggatatcaaacttgcaaaaaaaaaaaaaaaacaaaacaaaaaaaaaaaaaaaaaa

SEQ ID NO: 451 - protein, 941 aa, Homo sapiens
  ref <308>: DATABASE ACCESSION NUMBER: Refseq / NP_005449
  ref <309>: DATABASE ENTRY DATE: 2002-11-12
MASPRSSGQPGPPPPPPPPPARLLLLLLLPLLLPLAPGAWGWARGAPRPPPSSPPLSIMGLMPLTKEVAKGSIGRGVLPAVELAIEQIRNESLLRPYFLDLRLYDTECDNAKGLKAFYDAIKYGPNHLMVFGGVCPSVTSIIAESLQGWNLVQLSFAATTPVLADKKKYPYFFRTVPSDNAVNPAILKLLKHYQWKRVGTLTQDVQRFSEVRNDLTGVLYGEDIEISDTESFSNDPCTSVKKLKGNDVRIILGQFDQNMAAKVFCCAYEENMYGSKYQWIIPGWYEPSWWEQVHTEANSSRCLRKNLLAAMEGYIGVDFEPLSSKQIKTISGKTPQQYEREYNNKRSGVGPSKFHGYAYDGIWVIAKTLQRAMETLHASSRHQRIQDFNYTDHTLGRIILNAMNETNFFGVTGQVVFRNGERMGTIKFTQFQDSREVKVGEYNAVADTLEIINDTIRFQGSEPPKDKTIILEQLRKISLPLYSILSALTILGMIMASAFLFFNIKNRNQKLIKMSSPYMNNLIILGGMLSYASIFLFGLDGSFVSEKTFETLCTVRTWILTVGYTTAFGAMFAKTWRVHAIFKNVKMKKKIIKDQKLLVIVGGMLLIDLCILICWQAVDPLRRTVEKFSMEPDPAGRDISIRPLLEHCENTHMTIWLGIVYAYKGLLMLFGCFLAWETRNVSIPALNDSKYIGMSVYNVGIMCIIGAAVSFLTRDQPNVQFCIVALVIIFCSTITLCLVFVPKLITLRTNPDAATQNRRFQFTQNQKKEDSKTSTSVTSVNQASTSRLEGLQSENHRLRMKITELDKDLEEVTMQLQDTPEKTTYIKQNHYQELNDILNLGNFTESTDGGKAILKNHLDQNPQLQWNTAEPSRTCKDPIEDINSPEHIQRRLSLQLPILHHAYLPSIGGVDASCVSPCVSPTASPRHRHVPPSFRVMVSGL

SEQ ID NO: 452 - DNA, 3803 bp, Rattus norvegicus
  ref <308>: DATABASE ACCESSION NUMBER: EMBL / AF074608
  ref <309>: DATABASE ENTRY DATE: 2000-09-09
acagcccaaggttcaggcaaagtcttagtcgccaggctgtgaggtaagggcggggcaggggattccccatctccccagtttcacttcagcttttaacctgtgtcaggtccttctgctcgggtactgatgacgctctggaaattctcattcccattgggtgccgtaaaccctgtgaatcaatcagcgtcgccccaggcactgcacgtaaagtcgaagcagcccgacggatttagccaggtccgggatctcagatgggggcaaaggcacttcaggcgctgctcctgctggtggcggtcgccctggccccgacccagaccagcgcaggtgagtgcggggtcgggagggaaacggcctctgcgtggaagagcgggtgaggggaatcggggaagccgggtccccgcgtcgcataccagaccctcgccctttctcaacccgcgtccagagccccgcgccctgctccccgcccggcccgcacacccgcccgggatcccgggaggaggtcggggtctcaccgcgcgccgcccccaggctcacactcgctgcggtatttcgaaaccgccgtgtcccggcccggcctcggggagccacggttcatctctgtcggctacgtggacgacacggagttcgtgcgctacgacagtgacgcggagaatccgagatacgagccgcgggcgcggtggattgagtgggagaagccggactattgggagacgcagacacggagagccaagggaaacgagcagatttaccgagggagcctgacgaccctgctccactactacaaccagagcgaggacggtgagtgaccccgggtcggaggtcacgaccctccgggtccccacactgccagggacttccgggtccgaagtccgaggttcttagcagaaccgacccaggcccgtttccctttcagtttggaggagtccgcgggtgggcggggctggggcggggccgggtctgaccgcggggtcccgcaggctctcacaccatccagtggatgtatggctgtgacgtggggtcggacgggagcctcctccgcgggtattggcagcacgcctatgatggccgcgattacctcgccctgaatgaagacctgaaaacgtgggaggcctcggacagagcggcgcagaaaacccggaacaagtgggagcggaaaggtgttgcagagagaagcagggcctacctgaagggcacatgtgtggagtccgtccgcagatacctggagctcagaaaggagacgctcgtgcgctcaggtgcggggactgcgggcttctcctcctctgccctcgggctggggctcagtcctggggaagaagaaaccctcagctgggtgatgcccctgtctcagaggggagacagtgtctcctgatccctcatcacagtgactggactgcctctcccagggcccagccttctccctggagagttctgagtccctctcaggagggaaggagagaatttccccacttaacagcaggggctccctgctgtcagccatggcctctcccaggccaggttctctgcccacacccactctctgaggacactgactcctgtcctgctgagtgtgtcagcccttacacctcaggaccagaagtctcctttacctcagaggagacatggactccactgcactaggctggttcccccagtttctagaatttccatagaacacattctcacagatccctccctgaatgtgggttttgcatcccttcaatacctcatttctctctattcctacagtggagaatggtcccatgagcccttatggggtaccctggaggaatataaatcatgggatttctttttctattttctcttttttaatatttctttcttttttctttcccttttttttgaaggcatacttttgcttctagtcagtctttactgcaaacacatattaaatcaattattttccattccctcttctgttctatgaccacccacctcatgctatagaacatcacataaggacggccatgttgacccactggctcatgtggattccctcttagcttgtgagtccctcaggaaagtgtgcagttctctactgaggggaccagctctccctgcagctctctagtgagatgacagttgaagtgtcagacacacacagttcagtgtcatccttgatttaactgtgtcttgtgtagatttcagtttgtcttgttaactgtgtgatttcttaaatcttccacacagatcccccaaaggtgcgtgtgacccttcaccccagacctgaaggtgatgtcaccctgaggtgctgggccctgggcttctaccctgctgacatcaccctgacctggcagttgaatggggaggacctgacccaggacatggaacttgtggagaccaggcctgcaggggatggaaccttccagaagtgggcatctgtggtggtgcctcttgggaaggagcagagttacacatgccttgtggagcatgaggggctgcctgagccgcttacccagagatggggtaaggagggagccttctgtagaccctgagctggtcaagtctgagagctggggtcatgaccccactttcatttcctgaacctgtccttgcagagcctcctccatcaactgattccaacatgggaatcattgctgttctggctgtcgttggagctgtggctgtcattgtacttgtggccctcattggagttgttgtgaggaggaggaggaaaaacataggtaggaatgggcagggactgagtgtctcctcagcccactttagaagagtgctgttctcattaatggggcttgcagccacaccctgcattgcgactgtctccaactttgtccattctggaaacttcctcctgtgaagaccttccttgaactctcacagctttccttctcacaggtggaatatgaggagattacgcccctgctctaggttagtgtgggggcaggattatccctgagggtattggagtgaagctggagatgtggggagctcttggaatccatagtagctcctccagagaaatcttctggggtctagttttactgtgatgtacacatacacatatacatatacatatatacatatacagaaacacatacatatatacgtatgttttgttttaccctaggcagggacagctgccagagctctgatgtctctcccagattgtaaaggtgacactggggtctgactggggagtggcaatgtggacatgattgggtttcagggactcccagaatcccctgtgagtggagggttgttgggctgttgtcttcacagtgatggtttgtgactctccttctctagcatgaagacagctgcctggagtggactgagtgacagatgatgtgttcaggtctctcttgtgacatccagagccctcagttctctttagacaccagtgtctgatgttccctgtgattctatggcttcagtgtgaagaactgtggagcccagcctgccctgcacttcaggaccctgtccctgcactgccattccttcccttcctaggccaaccttagtggtccagcctgggggtggggggtggggacatctacatcctgtccctccttgctgccctgagtgtcagcccctcacttccacactgagaataagaatctgagtgtgaacttgattgttcacatccttgactcaagtgtggatggctttttcaattactggatggaatacttagaggtttttcagttttggggttttgttttgaaaaaaaataaatggcagatggagaagcttccagaatctgtgtcactaagctgtgtgtatctggtgggacaggatgaggatgtgggaggtgagtgtgaaca

SEQ ID NO: 453 - DNA, 1266 bp, Rattus norvegicus
  ref <308>: DATABASE ACCESSION NUMBER: Refseq / NM_033235
  ref <309>: DATABASE ENTRY DATE: 2003-02-25
ctttgctggtgcagagatcggccttgcagtttgcaataatgtctgagccaatcagagtcctcgtgacaggagcagccggtcagattgcatattcgctgctgtacagcattggaaatggatctgtctttgggaaagaccagcccatcattcttgtgctgttggacatcacccccatgatgggtgttctggacggtgtcctgatggagctgcaagactgtgcccttccccttctgcaggatgtcattgcaacagacaaagaagaggttgccttcaaagacctggacgtggctgtccttgtgggctccatgccaagaagggagggcatggagaggaaggacctactgaaagccaacgtgaagatcttcaaatcccagggcgcagccttggagaagtacgccaagaaatcagttaaggtcattgttgtggggaacccagccaatacaaactgcctgacggcctccaagtcagcaccatcgatccccaaggagaacttcagttgcctgactcgattggaccacaaccgagcaaaatctcaaattgctcttaaactcggtgtaaccgctgatgatgtaaaaaatgtcattatctggggaaatcattcatcaacccagtatccagatgtcaatcatgccaaggtgaaattgcaaggaaaagaagttggtgtgtatgaagccctcaaagacgacagctggctcaagggagagttcatcacgactgtgcagcagcgtggtgctgctgtcatcaaggctcggaagctgtccagtgccatgtctgctgcgaaggccatctcggaccacatcagagacatctggtttggaaccccggagggcgagttcgtgtcgatgggcgtaatctctgatggcaactcctatggtgtccctgatgacctgctctactcgttccctgtcgtgatcaagaataagacctggaagtttgttgaaggcctccccattaacgacttctcccgtgagaagatggacctgacagcaaaggagctgaccgaggaaaaggaaacggcttttgagtttctctcctccgcatgactacacagtcgtgttgacgtcagcagacatcccaaggctgaggaatcaaaatgtcgtctttgagcctagtaccaaacagtaataatggtacattcagattgtgaacagcaaaatattttaaatattatgtgctttgtgattcgtgaaagtctatcacgttgttagtgctgcgatctaaataaaagtatattcaagtgaaaaaaaaaaaaaaaaaaaaaaaaaa

SEQ ID NO: 454 - protein, 334 aa, Rattus norvegicus
  ref <308>: DATABASE ACCESSION NUMBER: Refseq / NP_150238
  ref <309>: DATABASE ENTRY DATE: 2003-02-25
MSEPIRVLVTGAAGQIAYSLLYSIGNGSVFGKDQPIILVLLDITPMMGVLDGVLMELQDCALPLLQDVIATDKEEVAFKDLDVAVLVGSMPRREGMERKDLLKANVKIFKSQGAALEKYAKKSVKVIVVGNPANTNCLTASKSAPSIPKENFSCLTRLDHNRAKSQIALKLGVTADDVKNVIIWGNHSSTQYPDVNHAKVKLQGKEVGVYEALKDDSWLKGEFITTVQQRGAAVIKARKLSSAMSAAKAISDHIRDIWFGTPEGEFVSMGVISDGNSYGVPDDLLYSFPVVIKNKTWKFVEGLPINDFSREKMDLTAKELTEEKETAFEFLSSA

SEQ ID NO: 455 - DNA, 1268 bp, Homo sapiens
  ref <308>: DATABASE ACCESSION NUMBER: Refseq / NM_005917
  ref <309>: DATABASE ENTRY DATE: 2003-01-15
ctgactctctgaggctcattttgcagttgttgaaattgtccccgcagttttcaatcatgtctgaaccaatcagagtccttgtgactggagcagctggtcaaattgcatattcactgctgtacagtattggaaatggatctgtctttggtaaagatcagcctataattcttgtgctgttggatatcacccccatgatgggtgtcctggacggtgtcctaatggaactgcaagactgtgcccttcccctcctgaaagatgtcatcgcaacagataaagaagacgttgccttcaaagacctggatgtggccattcttgtgggctccatgccaagaagggaaggcatggagagaaaagatttactgaaagcaaatgtgaaaatcttcaaatcccagggtgcagccttagataaatacgccaagaagtcagttaaggttattgttgtgggtaatccagccaataccaactgcctgactgcttccaagtcagctccatccatccccaaggagaacttcagttgcttgactcgtttggatcacaaccgagctaaagctcaaattgctcttaaacttggtgtgactgctaatgatgtaaagaatgtcattatctggggaaaccattcctcgactcagtatccagatgtcaaccatgccaaggtgaaattgcaaggaaaggaagttggtgtttatgaagctctgaaagatgacagctggctcaagggagaatttgtcacgactgtgcagcagcgtggcgctgctgtcatcaaggctcgaaaactatccagtgccatgtctgctgcaaaagccatctgtgaccacgtcagggacatctggtttggaaccccagagggagagtttgtgtccatgggtgttatctctgatggcaactcctatggtgttcctgatgatctgctctactcattccctgttgtaatcaagaataagacctggaagtttgttgaaggtctccctattaatgatttctcacgtgagaagatggatcttactgcaaaggaactgacagaagaaaaagaaagtgcttttgaatttctttcctctgcctgactagacaatgatgttactaaatgcttcaaagctgaagaatctaaatgtcgtctttgactcaagtaccaaataataataatgctatacttaaattacttgtgaaaaacaacacattttaaagattacgtgcttcttggtacaggtttgtgaatgacagtttatcgtcatgctgttagtgtgcattctaaataaatatatattcaaatg

SEQ ID NO: 456 - protein, 334 aa, Homo sapiens
  ref <308>: DATABASE ACCESSION NUMBER: Refseq / NP_005908
  ref <309>: DATABASE ENTRY DATE: 2003-01-15
MSEPIRVLVTGAAGQIAYSLLYSIGNGSVFGKDQPIILVLLDITPMMGVLDGVLMELQDCALPLLKDVIATDKEDVAFKDLDVAILVGSMPRREGMERKDLLKANVKIFKSQGAALDKYAKKSVKVIVVGNPANTNCLTASKSAPSIPKENFSCLTRLDHNRAKAQIALKLGVTANDVKNVIIWGNHSSTQYPDVNHAKVKLQGKEVGVYEALKDDSWLKGEFVTTVQQRGAAVIKARKLSSAMSAAKAICDHVRDIWFGTPEGEFVSMGVISDGNSYGVPDDLLYSFPVVIKNKTWKFVEGLPINDFSREKMDLTAKELTEEKESAFEFLSSA

SEQ ID NO: 457 - DNA, 1489 bp, Rattus norvegicus
  ref <308>: DATABASE ACCESSION NUMBER: Refseq / NM_031563
  ref <309>: DATABASE ENTRY DATE: 2003-01-13
gaattccgagagccccaccgccgccgccggcctagtcaccatcacacccgggaggagccgcagccgtcgccgccggccccagtcaccatcaccgcaaccatgagcagcgaggccgagacccagcagccgcccgccgcccccgccgccgccctcagcgccgccgacaccaagcccggctccacgggcagcggcgcgggtagtggcggcccgggcggcctcacatcggcggcgcccgccggcggggacaagaaggtcatcgcaacgaaggttttgggaacagtaaaatggttcaatgtaaggaacggatacggtttcatcaacaggaatgacaccaaggaagacgtatttgtacaccagacggccataaagaagaataaccccaggaagtaccttcgcagtgtaggagatggagagactgtggagtttgatgttgttgaaggagaaaagggtgcggaggcagctaatgttacaggccctggtggagttccagttcaaggcagtaaatacgcagcagaccgtaaccattataggcgctatccacgtcgtaggggtcctccacgcaattaccagcaaaattaccagaatagtgagagtggggaaaagaatgaaggatcggaaagcgctcctgaaggccaggcccaacaacgccggccctatcgcaggcgaaggttcccaccttactacatgcggagaccctatgcgcgtcgaccacagtattccaacccccctgtgcaaggagaagtgatggagggtgctgacaaccagggtgcaggagagcaaggtagaccagtgagacagaatatgtatcggggttacagaccacgattccgcaggggccctcctcgccaaagacagcctagagaggatggcaatgaagaggacaaagaaaatcaaggagatgagacccaaggtcagcagccacctcaacgtcggtatcgccgcaacttcaattaccgacgcagacgcccagagaaccctaaaccacaagatggcaaagagacaaaagcagccgattcaccagctgagaattcgtccgctcccgaggctgagcagggcggggctgagtaaatgccggcttaccatctctaccatcatccggtttggtcatccaacaagaagaaatgaatatgaaattccagcaataagaaatgaacaaagattggagctgaagaccttaagtgcttgctttttgcccgttgaccagatccactagaactgtctgcattatctatgcagcatggggtttttattatttttacctaaagatgtctctttttggtaatgacaaacgtgttttttaagaaaaaaaaaaaaaaggcctggtttttctcaatacacctttaacggtttttaaattgtttcatatctggtcaagttgagatttttaagaacgttcgatttttaatttgtaataaagtttacaacttgattttttcaaaaaagtcaacaaactgcaagcacctgttaataaaggtcttaaatggaattc

SEQ ID NO: 458 - protein, 322 aa, Rattus norvegicus
  ref <308>: DATABASE ACCESSION NUMBER: Refseq / NP_113751
  ref <309>: DATABASE ENTRY DATE: 2003-01-13
MSSEAETQQPPAAPAAALSAADTKPGSTGSGAGSGGPGGLTSAAPAGGDKKVIATKVLGTVKWFNVRNGYGFINRNDTKEDVFVHQTAIKKNNPRKYLRSVGDGETVEFDVVEGEKGAEAANVTGPGGVPVQGSKYAADRNHYRRYPRRRGPPRNYQQNYQNSESGEKNEGSESAPEGQAQQRRPYRRRRFPPYYMRRPYARRPQYSNPPVQGEVMEGADNQGAGEQGRPVRQNMYRGYRPRFRRGPPRQRQPREDGNEEDKENQGDETQGQQPPQRRYRRNFNYRRRRPENPKPQDGKETKAADSPAENSSAPEAEQGGAE

SEQ ID NO: 459 - DNA, 3437 bp, Rattus norvegicus
  ref <308>: DATABASE ACCESSION NUMBER: EMBL / D38450
  ref <309>: DATABASE ENTRY DATE: 1999-09-29
cgcacgaccgtgttcaaatctgtcaccaacaggttcattaaaaacctggcctgctccgggatttgtgccagcgtggtctgcgtgcccttcgacatcatcctgagcaccagccctcactgctgctggtggatctacacgatgctcttctgcaaggtgcttaaattcctacacaaggtgttctgctcggtgactgtcctcagctttcctgccattgccctggacaggtactattcagtcctctaccctctggagagaaaaatctctgacgccaagtctcgggaactagtgatgtacatctgggcccatgcagtggtggccagcgtccctgtgtttgctgtgaccaatgtagctgacatctatgctacatccacctgcacggaagtctggagcaactccttgggccacctggtgtatgtcctgatctacaacgtcaccacggtcattgtgcctgtggctgtggtattcctctttcttatcctgatccggagggccctgagtgccagtcagaagaagaaagtcatcatcgctgcactgaggaccccacagaacaccatctctatcccctatgcatcccagcgggaggcagagctacatgccaccctgctctccatggtgacagttttcatcctctgcagcgtaccctatgccaccctggttgtctaccagactgtgctcaatgtacctaacacttctgtgttcttgcttctcactgctatttggctgcccaaagtctcactgttggccaaccctgtgctcttcctaactgtgaacagatcagtacgcaaatgcttggtggggaccctggtgcagttgcaccaccggtacagtcgccgcaatgtggttagtacagggagtggggtggttgagcctagccttgagcccagcatgcgctctggtagccagctcttggagatgttccacattggacagcaacagatctttaagccctcggaggatgaggaagagagtgaggccaagtatcttggctcaactgatttccaggccaaggaggtactcacctcctccccagagggcgaggagtcacagcttgcaccctctgtgccgcctccaggcacagtagactctgtatctcgggtgtccccagtagcccccgtggaacctggcatattccctgataagtattccctgcagtttggctttgggcctttcgagttgccccctcagtggctctctgagactcgaaatagcaagaagaggctgcttcccccactgggcaataccccagaagagctgatccagacaaaggtgcccagagtgagcagggtggagcggaagatgagcagaaacaataaagtgagcatttttccaaaggtagactcctagcgaggactatgagtgcctgagagtgtaagggagcttgtatattcctgttctcccttccctctggctgccactgtggggcgataactcctttacatggcaaatgcttctgaatgaaagggaagtctacagaaaacccaatgtcctctttattgagggagtatatatctatcttagtgatctgtgtccttcatcacattcagtgtaagctgggcagaatggaacaggtctgagggctctctgacacattttctgggagattcctcctttttttgtgtgcagcaaagaactcaaatggagcaggcactccaaggaggcccaggataattctgggcttcaatggccacagagaagaagctaatttgtttttaaaatgtttgttttgttttgttttgttttgtttttgagactggatttctctatgtagccccaccctacagattgggctggccttgaactcagagagccacctgtctctgccttctgagtgctgggcttaaaggtctgtgcccacatgcccacttaagaagcctatttgggtagctaaataagaataacaaataggaaaatatctgagaagacagagccatggtgtcgaatggtttttgctagatttcacaatcacccaactcctggttgctaatacccctcgtctggatttctgggtcataaaggggggatgactggatttatcttaggatagacagggcagtgtctgagggagcctttttgtccttgattatctctccaccctgttggtatcaccaaggcctccaacaaatgtacctgcttccaccagtcagccatgctgcctggaaaccactgccaaccattcactgtgtgtccattttatcagcaacaagaagggaagatttgtggtggcgaagacaggctgagaaatgcccaccatgaataaccttttttctctctcacgtgattaagagcaaaagactagactcagctataggggggtataggcacaaagtaaaacgtcctaactggcaaatgtttggaattaaaaggtgcttaagaaatgtaggtggcatgcactgggtcgtttggcaccattaaggtaaaaatccttgattagcacaagcgactctgccctaagacttattagtttgacatacaggacacgcccacccgccagtctcattttcagtgtgttctgattctggatcccacagaaggtgagcagagcaggagaaataatgattgcaaatgctaaagcaattcccaccctgatttagcactccatcctctacttccaatgaagttcaggtatgagccatggtggatgggagaatgtgctctctcagcagctcagtgccctggctctcatgtgtgagccactctgggactgatgtaccagacctaattcaaacccaactctcccctcatacatcaagttgggagctctgctcttcttagggtgttttgttcttgtttgtggtccttggtggagccagtcgggcaccttgaatggataggtattcctacgagcaaacttctacatctcaaaggcagtggtcctagcagcacgtttagccatgctggcccatcgcccctaagaggaagctcagcccgtgtatagggagactccttttcttttcttctattgtgttatgtcttgtgaaccccaacatctcctccttggagagggggcgccttcctttctgtgcactgcctcacagacttgttttctcacttcagagacagggtactgtgcccctcttgtggctctgtggccctctgggccctgtgtacctgccatctgtagctcttcgtcctgatgctgtgttaatgctgtggccctccaagctcatctttcaaagccttcttaattgttacagcttttactaaggggaaaaataatccctcagagaatcctatgtaccagagaagaacctgtgaaatgtacgtgtgttgctgtcgtcctgacctgtatgtgtgacttaataaattctcaacagcggagtttggttcaccaaattctcatgtatgttggaaagagaaggctgacgtctagcagctgtcgccgagtgtatttctatactctttgaagaataacattttaataaaaattataaagctgt

SEQ ID NO: 460 - DNA, 330 bp, Homo sapiens
  ref <308>: DATABASE ACCESSION NUMBER: EMBL / BF434415
  ref <309>: DATABASE ENTRY DATE: 2000-12-02
ggaaaaatgctcactttattgtttctgctcatcttccgttccaccctgttcactctgggcacctttgtctggatcagctcttctggggtattgcccagtgggggaagcagcctcttcttgctatttcgggtctcagagagccactgagggggtaactcaaaaggcccaaagccaaactgcagggaatacttatcaggaaatatcccagattccatgggagctactggggacacccgaggttcagagtccactgtgcctggaggtggcacagacggtgcaagctgtggtggctcctgctcgccctctgggcagctcgtgccgaattcctgc

SEQ ID NO: 461 - DNA, 1212 bp, Rattus norvegicus
  ref <308>: DATABASE ACCESSION NUMBER: Refseq / NM_022864
  ref <309>: DATABASE ENTRY DATE: 2002-11-05
aattccgggcgctgctgttgatcgttcaccttggaaggcagaggactccaaccacacttgaatgtgaaatctgaccccggagtgtctcctgaggaaccaagccatcatcatggagttcgtgatgaaacaagccctgggaggggccaccaaggatatggggaagatgcttgggggtgatgaggagaaggaccccgatgccgccaagaaggaggaggagcggcaggaggcactgcggcaggcagaggaggagcgcaaagcaaagtatgccaagatggaggcagaacgtgaggtcatgcggcagggcatacgagataagtatggcatcaagaagaaggaggagcgtgaggctgaggctcaggcagccatggaggccaactcagaaggcagcctgactcgacccaagaaggctatcccaccaggctgtggggacgagcccgaggaggaagatgagagcatcctggacactgtcatcaagtacctgcctgggccactgcaggacatgttcaagaagtaatgatactgggtcagcaccaggagccctgcccactgtacagacccccgcggagtctccccccaacaagggatgttgggagcagatgcagcctcacccccaccccgcaaaaataagccatagtcctagatctatcctgcccatgtccccctcgcgcctcgggagcctctggccacccctccccgtactgccatcactgaccccaccaggcaagggtgtgcccctcaggcccccgtgctgtgcatccttgcctttcggtggttggaccccctccctaccaatcttaagttcaccattcctacagagcctgcccaaggtcaggccccgagggccagccctgaccacccctggatgggtggccaccagtcagggcctaaactcaggagcacagccatagtggggtgggacttgggaaatgagcagtgggtgcttgggggccccagcccttccctgagtccattgcccctgtttctggacttgttggacctgctggaccatttgctctgtcttcctgtctgtgagctaccaccctagtcttccccagcagcccttgcatactttgtccagctgtctctttctctgttgctctgcaaggtttggcttaagaattccacagccagaggaaacacagcaatagagctggagtgggtgggctcgacacacttggagtcccttgacgtggtctgtaatgcacccggaat

SEQ ID NO: 462 - protein, 134 aa, Rattus norvegicus
  ref <308>: DATABASE ACCESSION NUMBER: Refseq / NP_074055
  ref <309>: DATABASE ENTRY DATE: 2002-11-05
MEFVMKQALGGATKDMGKMLGGDEEKDPDAAKKEEERQEALRQAEEERKAKYAKMEAEREVMRQGIRDKYGIKKKEEREAEAQAAMEANSEGSLTRPKKAIPPGCGDEPEEEDESILDTVIKYLPGPLQDMFKK

SEQ ID NO: 463 - DNA, 2209 bp, Homo sapiens
  ref <308>: DATABASE ACCESSION NUMBER: Refseq / NM_006651
  ref <309>: DATABASE ENTRY DATE: 2001-12-14
ggcacgagggtgacgcgccctcctcgcggtgcccttcagccgccgccgcagctcaccgggcgccacatggacccagccggcccgagcgcgccccgccgctgaccgcccgcgccccgggaaggaagaacactcgctcccggccatacttgcgtgtgagttctgacccctggaggagccactgtggaagcagagcaatcgccatggagtttgtgatgaagcaggctctaggaggggccaccaaggacatggggaagatgctggggggtgacgaggagaaggacccagacgccgccaagaaggaggaggagcggcaggaggcgctgcgccaggcggaggaggagcgcaaggccaagtacgccaagatggaggcggagcgcgaggccgtgcgccagggcatccgagacaagtacggcatcaagaagaaggaggagcgcgaggccgaggcccaggccgccatggaggccaactccgaggggagcttgacgcggcccaagaaggccatcccgccgggctgcggggacgaggtggaggaggaggacgagagcatcctggacaccgtcatcaagtacctgcccgggccgctgcaggacatgctcaagaagtagccccgcgcgggacagcggccccgcggagcccccgcccctccccctacagatcctccgcggaggcccctgagggacgagcagagcgcagcccccacgccgatataagccatagccccaggcccgccctgcccgcgcccgccgcctccctcacccggcaaggggcgcgcgcccccaggacccccccagtccgccccgtgctcctctgcccgcgggtggctggagccccatcgcctgggacgcccctttctcttgctgtttaccgcccacccagcagcgcccgaggccagggccgccgaagggcagccccgcgaccacccctgtgcgcgcgttcgcggcggtgggcgcctgtcgggcccgcactcaggagcacagccatagcagacgggggggtgcgggcggggcgagggcggcggggcctgggtccccctcctgcacgcggactccggggttcggatcgctccgccgtgagtatttgcgtccgcacgcggccgctctccgccccccggcctggccccctcgcgcccctgtccatccgtctctgtccgcgtcctttcctctcctctctggaaggttttgcttcttacgaacgccacggccgtgttcacttctaaactaaaggaaacaaagcaataggtttgggggacgcccagcccccacccccgtcaccccgctcttcccaagtcctcgccccccgcccggcctcctagcctctccgcccacgcggctgctgcttctccctggggaggacccctgccctcggccattgaacactgcaccctccacaggagccgcagaggcccgaggcaccggacgctggagaccctgcgcccctgcccagcacctcctccgtgggcagctcctcgggtggggcctgcggggttccctgcgcgcagccggcgcgtgtgtggcctaatccacctggtggccctgcggggcggcatccgagcccctgtttctcctccattcatgtttaatttgcatcacaatttgttgaatctcaggtaaatgaggtctttgcatttaatgagttttatcttgacaggcgccgcctcgcccccgggccctttcgtccacatcaaaaatgcatcaagtctccacgtgtttcgggccagggcgtggcttggcattgaccttcatgaccttacatagctttagagaagccataacgttagactgcaatactaacgaccgacgcccctccgggcagagaccaccgcgcccctctgcgccccagcgacgcggcccgcggggacgtcgctgtccgtcctgctcgccctgtgccctctcactgacttctcccgggtcgtgtcttttaaaaactcctgttttcacaccttacaaagccagctctgagcagacagggcgtcctctcgtagaacctgcgcaccccgttcccagcgcatggcgccccgggccgcgagcttagcttagaccgtggtgtcctctgtccgtctgtcctgcgcctgcgcctcctcctgcatgtcggggcccctgcgtgtgttctctccggatggaatcacagccaataaacaccagtgatttcaaaaaaaaaaaaaaaaaaaaaaaaaaaaaaaaaaaaaaaaaaaaaaaaaaaaaaaaaaaaa

SEQ ID NO: 464 - protein, 134 aa, Homo sapiens
  ref <308>: DATABASE ACCESSION NUMBER: Refseq / NP_006642
  ref <309>: DATABASE ENTRY DATE: 2001-12-14
MEFVMKQALGGATKDMGKMLGGDEEKDPDAAKKEEERQEALRQAEEERKAKYAKMEAEREAVRQGIRDKYGIKKKEEREAEAQAAMEANSEGSLTRPKKAIPPGCGDEVEEEDESILDTVIKYLPGPLQDMLKK

SEQ ID NO: 465 - DNA, 1818 bp, Rattus norvegicus
  ref <308>: DATABASE ACCESSION NUMBER: Refseq / NM_012913
  ref <309>: DATABASE ENTRY DATE: 2003-01-14
ctcctaacggagagttgttcccggccgtgcggtcctccgtcgccgtcgctgggctgcgccgccgctgtcgccaggacgcgccgccgagcccctcgtcgcctctagccccgcggcctccgttcacctcaacttccactcgcccatcatgacgaagactgagaagaaatccttccaccagagcctggccgagtggaagctgttcatctacaacccgaccagcggagagtttctggggcgcacctccaagagctggggtctcatcttgctcttctacctagttttttatgggttcttggctgcactcttcacattcaccatgtgggtcatgctccagactctgaatgacgaggttccgaagtaccgagaccagattcctagtccaggacttatggttttccccaaaccaccgactgccttggattatacatacagcatgtctgacccacatacttataaaaagtttgttgaagacctgaagaatttcctaaagccatattctgtggaagaacagaagaatctcacagattgccctggtggagcactttttcatcaggagggtccagactatagtgcgtgtcagttcccagtttccttgcttcaagaatgtagtggtgtgaatgattctaattttggctactccaaaggacaaccttgtgttcttgtgaagatgaacagaataatcgagttagtcccagatggagctccatatattacatgtataacaaaggaagaaaacatagcaaatatagtaacttatcctgatgatggacttatagacttaaagtattttccatattatgggaaaaaacggcacgttggatatcgacagcccctagttgccgtccaggtcatatttggggccgatgctaccaagaaagaagtaacaattgagtgccaaattgatggaaccaggaacctaaaaaacaagaatgaacgtgacaagttcttgggacgagtttcatttaaagtcatagcacatgcctaggagtaggctgtctgcacagagtaaatgttgtgttgtctccattctgtatcagctggacctgccattctaggatatgaggccacctgggaggaggaagtggtatgggacacacttgggtgacatcataacatgcttccagatcatagtgttcagtgtcctctgaagtaactgcctgctgcctctgctgcccttgaacccatgtacggtcgccagacagggaccagtgagctcccaatcccaaacatgcagagtgggggtctcgtcgtcttctgtgtgtaattgccaaatgtctaaagcttcatgtgctgtgctgtgtaaatattttatggatttaacactggtaactgtcatattttgatgccaagaaagttttagggaaaaaatggtaccttgccaacatcaagtgactttagctgaagaaatgtgtgagaagttctgtatgtgatgaaggagaaagggaaataaagtggatctgaaagtactgaccctggttctgcgtacgtgtgagtgagtgcctgtcgtatgctctagtggtttttacatgctgaactagactatagctgactgtactgagaggacagactttctgttgtaatacatatttaaaatactatcggggtgactgagtgtggaatcaagcttccacactcaggtgtcgtagacacatggaagaaacagtgttttaattaggtgaatgagtaccgatgtttttgctttgttttgttttttgaatgaaatgaaattcccaagacataaattgtatagtttttcaaaatgtcttaagtgcttttatttagtagactatggaccctaataaaaaaaatgtgaaatac

SEQ ID NO: 466 - protein, 279 aa, Rattus norvegicus
  ref <308>: DATABASE ACCESSION NUMBER: Refseq / NP_037045
  ref <309>: DATABASE ENTRY DATE: 2003-01-14
MTKTEKKSFHQSLAEWKLFIYNPTSGEFLGRTSKSWGLILLFYLVFYGFLAALFTFTMWVMLQTLNDEVPKYRDQIPSPGLMVFPKPPTALDYTYSMSDPHTYKKFVEDLKNFLKPYSVEEQKNLTDCPGGALFHQEGPDYSACQFPVSLLQECSGVNDSNFGYSKGQPCVLVKMNRIIELVPDGAPYITCITKEENIANIVTYPDDGLIDLKYFPYYGKKRHVGYRQPLVAVQVIFGADATKKEVTIECQIDGTRNLKNKNERDKFLGRVSFKVIAHA

SEQ ID NO: 467 - DNA, 1679 bp, Homo sapiens
  ref <308>: DATABASE ACCESSION NUMBER: Refseq / NM_001679
  ref <309>: DATABASE ENTRY DATE: 2000-10-31
atgacgaagaacgagaagaagtccctcaaccagagcctggccgagtggaagctcttcatctacaacccgaccaccggagaattcctggggcgcaccgccaagagctggggtttgatcttgctcttctacctagttttttatgggttcctggctgcactcttctcattcacgatgtgggttatgcttcagactctcaacgatgaggttccaaaataccgtgaccagattcctagcccaggactcatggtttttccaaaaccagtgaccgcattggaatatacattcagtaggtctgatccaacttcgtatgcagggtacattgaagaccttaagaagtttctaaaaccatatactttagaagaacagaagaacctcacagtctgtcctgatggagcactttttgaacagaagggtccagtttatgttgcatgtcagtttcctatttcattacttcaagcatgcagtggtatgaatgatcctgattttggctattctcaaggaaacccttgtattcttgtgaaaatgaacagaataattggattaaagcctgaaggagtgccaaggatagattgtgtttcaaagaatgaagatataccaaatgtagcagtttatcctcataatggaatgatagacttaaaatatttcccatattatgggaaaaaactgcatgttgggtatctacagccattggttgctgttcaggtcagctttgctcctaacaacactgggaaagaagtaacagttgagtgcaagattgatggatcagccaacctaaaaagtcaggatgatcgtgacaagtttttgggacgagttatgttcaaaatcacagcacgtgcatagtatgagtaggatatctccacagagtaaatgttgtgttgtctgtcttcattttgtaacagctggaccttccattctagaattatgagaccaccttggagaaaggtgtgtggtacatgacattgggttacatcataacgtgcttccagatcatagtgttcagtgtcctctgaagtaactgcctgttgcctctgctgccctttgaaccagtgtacagtcgccagatagggaccggtgaacacctgattccaaacatgtaggatgggggtcttgtcctctttttatgtggtttaattgccaagtgtctaaagcttaatatgccgtgctatgtaaatattttatggatataacaactgtcatattttgatgtcaacagagttttagggataaaatggtacccggccaacatcaagtgactttatagctgcaagaaatgtggtatgtggagaagttctgtatgtgaggaaggaaaaaaagaaaataaaagtgtgtttgaaaaatattatcttgggttctttgtaaaatttattttttacatgctgaattagcctcgatctttttgattaagagcacaaacttttttttgtaaaacatgtaaaaaaaaaaactgggattaatttttagtgttggaactgcctcttattttaggctgtagataaaatagcatttttaggttagccagtgtgactatgcacctaattttttatgagattaaattcataagacttaatttgtacaatagtttgtgaaatatcttgttactgcttttatttagcagactgtggactgtaataaagtatataaattgtgaaatataaaaacttggaacttattcaaagctt

SEQ ID NO: 468 - protein, 279 aa, Homo sapiens
  ref <308>: DATABASE ACCESSION NUMBER: Refseq / NP_001670
  ref <309>: DATABASE ENTRY DATE: 2000-10-31
MTKNEKKSLNQSLAEWKLFIYNPTTGEFLGRTAKSWGLILLFYLVFYGFLAALFSFTMWVMLQTLNDEVPKYRDQIPSPGLMVFPKPVTALEYTFSRSDPTSYAGYIEDLKKFLKPYTLEEQKNLTVCPDGALFEQKGPVYVACQFPISLLQACSGMNDPDFGYSQGNPCILVKMNRIIGLKPEGVPRIDCVSKNEDIPNVAVYPHNGMIDLKYFPYYGKKLHVGYLQPLVAVQVSFAPNNTGKEVTVECKIDGSANLKSQDDRDKFLGRVMFKITARA

SEQ ID NO: 469 - DNA, 3551 bp, Rattus norvegicus; identical to SEQ ID NO: 336
  ref <308>: DATABASE ACCESSION NUMBER: Refseq / NM_019362
  ref <309>: DATABASE ENTRY DATE: 2003-01-13

SEQ ID NO: 470 - protein, 553 aa, Rattus norvegicus [sequence omitted]

SEQ ID NO: 471 - DNA, 3293 bp, Homo sapiens; identical to SEQ ID NO: 338
  ref <308>: DATABASE ACCESSION NUMBER: Refseq / NM_013233
  ref <309>: DATABASE ENTRY DATE: 2002-12-23

SEQ ID NO: 472 - protein, 547 aa, Homo sapiens; identical to SEQ ID NO: 339
  ref <308>: DATABASE ACCESSION NUMBER: Refseq / NP_037365
  ref <309>: DATABASE ENTRY DATE: 2002-12-23

SEQ ID NO: 473 - DNA, 1055 bp, Rattus norvegicus
  ref <308>: DATABASE ACCESSION NUMBER: Refseq / NM_017014
  ref <309>: DATABASE ENTRY DATE: 2003-01-13
gctgaagcaaattgagaagaccacagcgccagaaccatgcctatgatactgggatactggaacgtccgcgggctgacacacccgatccgcctgctcctggaatacacagactcaagctatgaggagaagagatacgccatgggcgacgctcccgactatgacagaagccagtggctgaatgagaagttcaaactgggcctggacttccccaatctgccctacttaattgatggatcgcgcaagattacccagagcaatgccataatgcgctaccttgcccgcaagcaccacctgtgtggagagacagaggaggagcggattcgtgcagacattgtggagaaccaggtcatggacaaccgcatgcagctcatcatgctttgttacaaccccgactttgagaagcagaagccagagttcttgaagaccatccctgagaagatgaagctctactctgagttcctgggcaagcgaccatggtttgcaggggacaaggtcacctatgtggatttccttgcttatgacattcttgaccagtaccacatttttgagcccaagtgcctggacgccttcccaaacctgaaggacttcctggcccgctttgagggcctgaagaagatctctgcctacatgaagagcagccgctacctctcaacacctatattttcgaagttggcccaatggagtaacaagtaggcccttgctacactggcactcacagggaggacctgtccacattggatcctgcaggcaccctggccttctgcactgtggttctctctccttcctgctcccttctccagctttgtcagccccatctcctcaacctcaccccagtcatgcccacatagtcttcattctccccactttctttcatagtggtccccttctttattgacaccttaacacaacctcacagtccttttctgtgatttgaggtctgccctgaactcagtctccctagacttaccccaaatgtaacactgtctcagtgccagcctgttcctggtgggggagctgccccaggcctgtctcatctttaataaagcctgaaacac

SEQ ID NO: 474 - protein, 218 aa, Rattus norvegicus
  ref <308>: DATABASE ACCESSION NUMBER: Refseq / NP_058710
  ref <309>: DATABASE ENTRY DATE: 2003-01-13
MPMILGYWNVRGLTHPIRLLLEYTDSSYEEKRYAMGDAPDYDRSQWLNEKFKLGLDFPNLPYLIDGSRKITQSNAIMRYLARKHHLCGETEEERIRADIVENQVMDNRMQLIMLCYNPDFEKQKPEFLKTIPEKMKLYSEFLGKRPWFAGDKVTYVDFLAYDILDQYHIFEPKCLDAFPNLKDFLARFEGLKKISAYMKSSRYLSTPIFSKLAQWSNK

SEQ ID NO: 475 - DNA, 1937 bp, Rattus norvegicus
  ref <308>: DATABASE ACCESSION NUMBER: Refseq / NM_012571
  ref <309>: DATABASE ENTRY DATE: 2003-01-14
ccgacgtcccctcagattccatcgcgatggcccctccatcattctttgcccaggttccacaggccccgccggttctggtctttaagctcattgcggacttccgggatgatcccgatccccgcaaggttaacctcggcgtgggagcgtaccgcacagatgactctcagccctgggttttgccagtagtgacgaaggtcgaacagaagattgctaacgaccacagtctcaaccacgagtacttgcccatcctgggcctggcggagttccggagctgtgcttctcagctagtacttggggacaacagcccagctctcagggagaatggggttgggggtgtgcagtctttgggagcgaccggtgcacttcgaattggagctgacttcttagcgcgatggtacaatggcacagacaacaagaacacgcccgtctacgtatcatcgccgacctgggagaaccataatggcgtgttttctgccgctggttttaaagacattcggtcctatcgctactgggatgcagagaagagaggacttgatctccagggtttcctgaatgatctggagaatgctcctgagttctccatctttgtcctccacgcctgtgcacacaacccaacggggaccgacccaactgaagaggagtggaagcagatcgccgccgtcatgaagcgccgttttctgttccccttctttgactcagcctatcagggctttgcatctggagacctagagaaagatgcctgggctattcgctattttgtgtctgaaggcttcgagctcttctgtccccagtccttctccaagaacttcgggctctacaatgagagagtggggaatctgaccgtggtcggaaaagagcatgacagcgtcctgcgggtcctttcccagatggagaagattgtacgaatcacctggtccaatccccctgcccagggagctcggatcgtggccaccaccctctccaaccctgagctctttaaggagtggaaaggaaacgtgaagacaatggctgaccggattctgaccatgagatccgaactcagggcgcgactagaagctctcaagactcccgggacttggtctcacatcactgagcagattggaatgttcagctttactgggttgaaccccaagcaggtcgagtatttggtcaacgagaagcacatctatctgatgccgagcggtcggatcaacatgtgcggcttgaccaccaagaacctagattatgtggctacctccatcaatgaagctgtcaccaaattccagtgaagaaacaccgagtagttcataccccaaagcagttcctgtcacagctttcctgcctgcgcaaacctagccgtacatgttgtttattagagatgaccaccatggggaggcagccgctgtttagctggccccacaagagaagacatttcttgaaatgaacctgggtcgggtggggggatgactggggttagggccttttggaaaccagagcagattaaagttatttaagaataaaaaaaccctttgatatgagatgtaatcatcttgccttcctctgtagtattctgcaggagtgttgcccacgaagccgtgggcttctgcacgttgcttgagtctgtacagagtcctgtccccaaaatcaagttgtctgaggagccggctgtgactgtggatgttggcattaaaactcaccatttccatcgtctctgtctctcggccccctgatctttccgcatggttgtgaccctggtcttggaacattagttttttaaggccactgtggccagtatttatatcatgacacacaagtggatttacatatttaactgagatgaaagttccgctaaacggtatttgctcttgtgatacgtggcacattgtgacattttcttagtctcttctgtcgtgttctgtttcatttaaaaaaataaaaatgctgatcaagacaaacgg

SEQ ID NO: 476 - protein, 413 aa, Rattus norvegicus
  ref <308>: DATABASE ACCESSION NUMBER: Refseq / NP_036703
  ref <309>: DATABASE ENTRY DATE: 2003-01-14
MAPPSFFAQVPQAPPVLVFKLIADFRDDPDPRKVNLGVGAYRTDDSQPWVLPVVTKVEQKIANDHSLNHEYLPILGLAEFRSCASQLVLGDNSPALRENGVGGVQSLGATGALRIGADFLARWYNGTDNKNTPVYVSSPTWENHNGVFSAAGFKDIRSYRYWDAEKRGLDLQGFLNDLENAPEFSIFVLHACAHNPTGTDPTEEEWKQIAAVMKRRFLFPFFDSAYQGFASGDLEKDAWAIRYFVSEGFELFCPQSFSKNFGLYNERVGNLTVVGKEHDSVLRVLSQMEKIVRITWSNPPAQGARIVATTLSNPELFKEWKGNVKTMADRILTMRSELRARLEALKTPGTWSHITEQIGMFSFTGLNPKQVEYLVNEKHIYLMPSGRINMCGLTTKNLDYVATSINEAVTKFQ

SEQ ID NO: 477 - DNA, 2781 bp, Rattus norvegicus
  ref <308>: DATABASE ACCESSION NUMBER: Refseq / NM_019257
  ref <309>: DATABASE ENTRY DATE: 2003-01-14
cgtggatttcacacaggatagcaattacctgttgactggaggacaggacaaactgctgcgcatatacgacttgaacaaacctgaagcagaacgaggagttgagttcgtgtgtgtagggaggcagacagctccgacgcagactacggacctctccaggtctcagccgtcaaagaccctgtccggtaggaaacactagccggggatcatgagtggctgtcgagtgttcattgggagactaaatcccgcagcgagggagaaagatgtggaaagattcttcaagggttacggacggatcagagatattgatttgaaaagaggttttggttttgtggaatttgaggacccaagggatgcagatgacgctgtttatgaacttgatgggaaggaactttgcagtgaaagggttactatggaacatgctcgggctcggtctcgaggtggaagaggtagaggacgatactccgaccgttttagcagtcgcagacctcgaaatgatagacgaaatgctccacctgtaagaacagaaaatcgacttatagttgagaatttatcctcaagagtcagctggcaggtttgttgaaatacagttttgatattttaatgtggcatttaagaatgttaatgggtagttaatgttttattaatatatcttaaattattgctttatcttaaattaatggatttaattcaattataattttaaactttagttaaatgtaactgggggatgtttcagattttaatattagtgatcaaatgtaaatgttttgaggttattttttcatgttttttaaaatcaattttaaccaaatattaaaccctttatttgccagcctatctgtgtcgttggccttatgacgaggagtgcctgtgggttatcctaatcgttgtcttggtcactcttggttgggcctggttgactttgccagtcagctcctacagtgatcagttggccacctctagagatctgtgtttgccggtctagacgtaatcggtgcacttacttgaagtgccgggttgcagcgattccagaacgttgataacgtgatctgatccctaagttgagagctgtcttcctgtaacgcttccgaataagaggtcctggtcgaaagagttgaaagatacgaaattagttggtcgttggaatcctgatcgcagtaaagtggtccttggtaactgcacacgagtaaaacatgtctgcatcgccagtagtctgctaatagggagggctgtgcgattaaaggcttccatcgattgggtagtatccttcaagtgggtggcgaagagccagtcgggcctatgtcatgaaggtttctccgaccgcttaatggtttgctgcttgactgagcctagggaaatgttaataaaggtaaagtaaatttttttaatgacatatggggcacaaaataactggtgtctttgtaaatgttgttttacttttttttttgtttttgttttttttaaatataagactagtctttaaaagatgtactgttcctttttgtttttttgttgtttgttttgtttttttgtttgtttttccccctttttgtactgagctcagttagactaatactataatgttaaaaactggaatttcctctagcattttgcttaaaagcaatatgctatttgcttatttcgtgccctggcatactttttgaattccgatagaatacaagtgtggtatatgccatgtttgtactatctaacaacttctcttccagtagtcttgtttataccatgtggttgtttgtgtgtcacttttccctttctctccttaacataattgtcttgtgttaaggatctcaaaaagatttcatgagacaagctggggaagtaacctttgcggatgcacatcgacctaaactaaatgaaggggtagttgagtttgcctcttatggtgacttaaagaatgctattgagaaactttctggaaaggaaattaatgggagaaaaatcaaattaattgaaggcagcaaaagacacaggtcaagaagcaggtcacgatctcggaccaggagttcctctaggtcccgtagccgatcccgttcacgcaggagcaagtcttacagccgatcaaggagcaggagccggagccggagcaagtcccgttctggtagtaggtctcccgtgcctgagaagagccagaaacgtggttcttcgagtagatctaaatctccagcatctgtggatcgccagaggtcccgatcccggtccaggtccagatcagttgacatggcaattaattaaactgtaaataacttgcctgggggcctttttttaaacaaaacaaaacaaattcccaaaccatacttgctaaaaattctggtaagtatgtgctttttctgtggggtgggatttggatggggttgggctggatttctttgtagatgtggaccaccaaggggttggtgaaaactaattgtattaaatgtcttttgataagccttctgctcacacttttgtgactgtctgaagtatatagttgtgtatatgatagagctcttttataactaaacgatttaattttttgtactgaaaaaatttgaatattttagttcatgttcagatatgttaacataagattagtttaatttgctcaattaaactaatgaatagctttggacactttaaaagagctctaaatttgcttgtatataaaagcttagtttgagttttccttgttagggtcaagggtgtcttcttgcccattaacagctgtagatagacttaaagcagctgtttgttactgataataaaatactaagtattataaaa

SEQ ID NO: 478 - protein, 124 aa, Rattus norvegicus
  ref <308>: DATABASE ACCESSION NUMBER: Refseq / NP_062130
  ref <309>: DATABASE ENTRY DATE: 2003-01-14
MSGCRVFIGRLNPAAREKDVERFFKGYGRIRDIDLKRGFGFVEFEDPRDADDAVYELDGKELCSERVTMEHARARSRGGRGRGRYSDRFSSRRPRNDRRNAPPVRTENRLIVENLSSRVSWQVC

SEQ ID NO: 479 - DNA, 2301 bp, Rattus norvegicus
  ref <308>: DATABASE ACCESSION NUMBER: EMBL / L16532
  ref <309>: DATABASE ENTRY DATE: 2000-03-04
ccccgtgtccctcgcgcaggcgggcggccccggagacatagtgcccgcaaaggcggtgacggcggtgcgcccactcatcatgagcacaagctttgcccgaaaaagccacacattcctgcccaagatcttcttcagaaaaatgtcatcctcaggagctaaggacaagccagagctgcagttccctttccttcaagatgaggacacggtggctacgctgcacgagtgcaagacgctgttcatcctgcgtggcctgccgggcagcggcaagtccactctggctcggctcatcgtggagaagtaccacaacggcaccaagatggtgtctgctgatgcttacaagatcattcctggctctcgggcagacttctccgaggagtacaagcgtctggacgaggacctggctggctactgccgccgggacatcagggttcttgtgctcgatgacaccaaccatgagcgggaacggctggaccagctttttgaaatggcagaccagtaccagtaccaggtggtgctggtggagcccaagacggcgtggcgactagactgtgcccagctcaaggagaagaaccaatggcagctgtcgctcgatgacctgaagaagctgaagcccgggctggagaaggacttcctgccactttactttggctggttcctgaccaaaaagagttccgagaccctccgaaaagccggccaggtctttctggaggagctgggaaatcacaaggctttcaagaaagagcttcgacacttcatttctggggatgaacccaaggagaagcttgacctggtcagctactttggcaagagacctccaggcgtgctgcactgtacaaccaaattctgtgactacgggaaggccaccggggcagaagaatatgcccaacaggatgtggtgaggagatcttacggcaaggccttcaaactgtccatctctgccctctttgtgacacccaagacagctggggcccaggtggtgcttaatgagcaggagctgcagttgtggccaagtgacctggacaagccctcatcctccgagagcctgcccccagggagccgagctcacgtcaccctaggctgtgcagccgacgtgcagccagtgcagacaggccttgacctcttagagattttacagcaggtgaaggggggcagccaaggtgaggaggtgggtgagctcccccggggcaagctctattccttgggcaaagggcgttggatgctgagcttggcgaagaagatggaagtcaaggccatcttcacggggtactatgggaagggcaaacctgtacccgtacacggcagccggaaggggggtgccatgcagatctgcaccatcatctgagggttcacgccactgtgccaccgctgtggacacagcaacatgccttccacttgatttttaagattttttttttttactcaaagctaatctacctataactttttagaagtctgtaaaataaccatcagttccttcacccaccctcttccccttaacactcagctcaacacaggcaggtgggcagaggaagacaccattcaggaacctggaccagaggtggtaattaaagggctgggtcattggcctggagcggccacctagatgcacccaggaccttgttaaccctcccttagccgctgcccatgcagagctgggcacacacacctcagagccaccacacatcatgcaagggacaaatgctactgccacaggaaaacagtggtagctttgagaggggacagacccctgggtgccaatcttaatcactgtagccccaaggaaggcttgggctacttactgggctgtaaaaggggcttacctctcaccgttggtcattcccaactccctctctccttcactggcactaggttaatggtgtgaccactaggggagaaaatggcattaccggaagccacatctctggttccggtctggctatctagccttaacagctgtctctgctaaggtcagagagatgctttaagaaactccagctttgctttctgcccagcccatcttgcctccgtggtgcctctgggcctcctctaaaggatggtggtgggtaccaagagccaacggagggggccctgagccagcaagagtaagccccatctgctctggggaagtctgaacacgcgcgtgtgctgtggttcctggagtacctcactctgctcagtaacaggaccttgctaattgggttgtcacccaagcatctgggatttatgttcctaccctcaccctgtgttgcccacctcagcaacaactaagactgatactgaaataaatcgtgttaatcccaa

SEQ ID NO: 480 - protein, 421 aa, Rattus norvegicus
  misc_feature (1)..(421): Xaa=Unknown amino acid
MSTSFARKSHTFLPKIFFRKMSSSGAKDKPELQFPFLQDEDTVATLHECKTLFILRGLPGSGKSTLARLIVEKYHNGTKMVSADAYKIIPGSRADFSEEYKRLDEDLAGYCRRDIRVLVLDDTNHERERLDQLFEMADQYQYQVVLVEPKTAWRLDCAQLKEKNQWQLSLDDLKKLKPGLEKDFLPLYFGWFLTKKSSETLRKAGQVFLEELGNHKAFKKELRHFISGDEPKEKLDLVSYFGKRPPGVLHCTTKFCDYGKATGAEEYAQQDVVRRSYGKAFKLSISALFVTPKTAGAQVVLNEQELQLWPSDLDKPSSSESLPPGSRAHVTLGCAADVQPVQTGLDLLEILQQVKGGSQGEEVGELPRGKLYSLGKGRWMLSLAKKMEVKAIFTGYYGKGKPVPVHGSRKGGAMQICTIIX

SEQ ID NO: 481 - DNA, 8351 bp, Rattus norvegicus
  ref <308>: DATABASE ACCESSION NUMBER: EMBL / M11794
  ref <309>: DATABASE ENTRY DATE: 2000-03-04
gaattccatcagaatttgcctttctggtggcttctctttccctgcccttgtggtgtttttccttcagtgagtgacaaatttcacaaccctggctgggactcccgaggtgctaagattacaggcctgggtcacaccacccaaacctgactttctttttcattgttgcttgtatttttctgtttgtaaccaaagctggacgactggaactcactgtgtagactaggctggccttgaactcatagaactctacttgcctctgcctcctgagtgctctgattaacggcactgaccaatacatccaacctacctactttcattttctaaatctaagtcctaacaggaagtgggaactgggcaggaataacagtacggtgggttaactccatgagtttaccggactttgcgagcctcgactgccaacgacatcctggcttgaggctggaagtcacagcccaacaggggcaaagattgctctgtgaccagtctggaaagggagcactggagcacagaaatcaatccggttcaagttcatacccagggcaaccacggaaagtgccaggaaaggaaagaacaggatgttttccacacattccatgggcagccatggggatccaggagaaagtgatgcttggctgagccaagaagcagtgccccagtttacagtaagggctgagaggacagcctgtcctgagcttccggtaacacatttcctgccttctcaaatgacagacattccatctacgactttgagtctgatttcagcagtcttatgcaagaggggaaacaccatatgcctccagggaaagaaaatttggctgccgtctccaccctttccctcagcatccaccgtgggtgggggtggggagggttagtggggctttccatccctgtctttcagaacactacgatctggccctttctgcttggccaacacctgcgcagagtcctagttcatatcctcccagaatggcctgctctccacctccagcagagacccccatcattttttcctgttcactctctgccccccaccccccaccaagaataagtatccttagcacaaggcttgtgtctttatggtctctagtctctgacaactggctggagtctcagtggattcgaaccctccattcatcttgggctaatgactatgtgattgcgcctccgtttccacttttctactgtgaaaataatgaacaccccaagctatgttgtaaggaaaaatgagagccctaacagtgcccccagcacgtgacacgcagggggtacgtgacacgcagggggtacgtaaccaaggccggtaaagtctgggctagggctggtttttgttacctgttcacactgtcagctaggttttcctgtatgcggggtctccaagccccgctttcacctaagttagcactcaagacgtgctgtggggactgtgtccccgtggacgctgcagggggttcgatgtcccgcaactcctctgcacccggccacttgggcccagggcacgtgagcaggtttcctggaaccggtccccaccggatcgcagaccctttgcgctcagccctttgctctcagtccctgcgccaggagaaagggggtgtgactcagcgcgggggcgtgtgcaggctctgtacccacgtgcaaaaggagggatgcttgcagacttcgggtcgtgcgcaggctcccgggcgtgtgcgggccatttcccttgagccagaagaagggcgtgtgcaggcagtggggaggagggcaggtggcgccccgccacccgggcggagcttttgcgcgcgacccaatactctgggctataaaggtcgcgctccgcgtgcttctctccatcacgctcctagaactctacagcgatctctcgttgatctccaactgccgcctccattcgccatggaccccaactgctcctgtgccacaggtaaggggggctgctgacgggcctctgtaaccggagcttctgggagagcaggacggacttttgggcccctactctggtaactacttttagggtactactggctgctgccttccgaacgaattctggaacactcccgccccttttaaactagtccttgagataatggctcgcccaagctggctggcttgcacccgagttctttggagaactgtgttcagttatgcccgggtccgctcaccgcgctccctgccttcttcctctagatggatcctgctcctgcgctggctcctgcaaatgcaaacaatgcaaatgcacctcctgcaagaaaagtgagttggatttattttctctaccctttcccttcgcgcccctgcggtccctagcccgccgcaccttcccagagcgtccaggctgcctctaactcggtttctcgctcacgctcaacttttttcccccaggctgctgttcctgctgccccgtgggctgtgcgaagtgctcccagggctgcatctgcaaagaggcttcggacaagtgcagctgctgcgcctgaagtgggggcgtcctcacaatggtgtaaataaaacaacgtaaggaacctagcctttttttgtacaaccctgaccggttctccacacttttttctataaagcatgtaactgacaataaaataaaaaaacttgacttgattaacccagctttgtctgtgttcattggaaataaggggctggcagaggcgttgaaatgggattggtgcaccttgatttgggataagtggattgatgacccctctggactttgatagtctcgaacatggtgggcagaaacatgtactggtcacaaatgtgggcatgtgtatattggggattaaacccaaagcttcctgcttataaaccagggtgctctaatgagccacactcctacccctagatgcataatgattctggtttaattttggattattaggcttaaagcagtatgaagtacctgttcataagctttggtaaataaaataaaagttggagtgagtctcatacgactcctctttgtagtcccaatatttgggagcctgaggcagaaggatcggtgcaactccgaagccaacttggtctcaaattctgttaacctttgattttgagaccatcttactgtgtaacctaaaatggtccttgaacttgcagtcctgcctcagacttctaggtactgggattacaggctcagcttaaaatcagggctggagagatggctcagcggttaagagcacccgactgctcttccagaggtcatgagttcaattcccagcaaccacatggtgctcacaccatctgtaatgagatcttacgcgttctggcgtaatgcaagcagaaaagacatcagtaacgtgaacaaaaccatgaaaagtactgtaaacactataaatatccaagggtgtgccttgcagtttggagactaaatggcacatgtccaacctagagctcccatgaggaactgcccatctctggtatacagggacacggacaggattttttttttcctcttccagagagccctgtgataggacttggctgtcagtctggaagttcttctcaaggtcaggcagaaatctacctacccctcactccataccaacccctggcaatttaagcaaagtaactagaaatttggaaggaattgactagcatcttcccaggagctaggcatccaggttgagtctgcaatttggagggcggggtggagtttcctactctataggaaggaggtgaatacatgcaattaaaaccagccgttaatgccccctggctatttgttgaggtaatgcgatttggtcttcaatcaaagggaaagtttcttggctagaagtaaggaccaagcttgccgtaggctttctctgtgaagagtaaatttacaagacagcctctgtttcttgctgtcaggaagtcctagttcacagcccactttctctcttattggtcatgtagcctgggcaagtcactgaacccctcaaatgctgatatcctgccctcctagatgctgataaccacctgtccccaaagaacacacgggcaaccaagcacagatctgatttttaaggaatttgttttgtaagtgcagtttgggaatctggcctcatttgtctcttgtgtgcccttgctgacaccattcattcagccctggccttgatttaggtgacaccgaactcgggctgtaccctcagagatttccctctttgtctacaaacaaacaaacaaagcaaatatcctaattaagactcttgtgtgtcaagtagggcatctaggaatgagtgctgggaccactcttagtcccagaatgccttgaaaccaagtgaatgacaattatacatttagcttctcaattaaaatggaagacattgggccgggaattggctcacagtggagagcctaccaggcttttgtgaagctctgaggttcatccctagaaccattaaaaaaaggtccgtgggcctgggaatgtagctccctggtacagtgcttacctaacatgcacggacccctgggtttgctccacagcatggagtaagcagtctgatggcacacacctgtaattctaacacgcaggaggcagaggcaaggaggatcaaacgttcaaggaccacggcaagtttgaggtgtgggccacatgtaaagccgtctccaaaaagacatcacacacaaaacacaacagtattgtgatacacacgtatacctgtatcctagcaacctgggaaactgaagcaggagactgtcttgagttcaaggccagactgggctgttcggtgatcgacaggccattctgagttacagagtgaggcccttggaaaaggagaggaaggagaggaggagagactgggcctggcaacatgcatctatcatcttagctactcaggagactgaggcagggggaggatttccagctcaaagtctagctacagagcacgtctaaagccagcctggacagcttagtgagaccctgtttcaaaataaaaagaatctaaaagactggaggtaaagctccagtgtagaatgcttgcctggtaaccaggaagccttgggttcaatccttactgtaaaaaaaggaaaaaaaatcatattatgcaagaggtctaaaggcccaagaatctgttacagatctcagttttggtaatagacaataaaatataacaagttggtaaaaacaagcaagagtaccaactacaaacatacttcatgtggttcagcagaagcatctcagtatgcatccagaaaacagcagacagacagaattgggcatccttgggctagggcacacctcagcctgacttctacccgagaagccagcagtcttagccagtgcagaaccactggtgtctctgacttgggatctctgcttaggatgcgcccttgagtgcttagaatttgtctctagtcaggctgaatcctctctctttccaaacccagtccttagctatttaaaaccagtaaactcatgagatttggagtcatccaacgttatccaggcaaggattctgtttttttcttaatttttatatttaattgcttattaatttttgaaataggatctcatttgtgtggccctggctggccttgaactcaagaagaccatctgcctctgacttctaatagctgagattaaagaggtagcctcaggcaagaacttaactatagaccaagactcagttccacgtgaagttttttggatcttcccacacagagggtataactgtgtcatctccaagatgaggtatcccgaggaaggagaaatggcctgggtcattgtcaccaaaccagtgggtaataggttaatggaaagacacatgtgtctaaaccaccaaggaggaggaggaagagggcaaagaggggaaagaaggaggagggggaggagtgtcatagcccaggactaggtgccttctttgcctacacacggacctacgtacagaaggacagcatcagagaacttgggacccgtacaggaacattggtgtcaagctgtactgcttcacagcccgttttactactgactggttgtatggcccacccggcaggtcattgaatcctctgtccttgtgtgtaaatagaatttgcatctctatataggtattaggtgagagatcggtttgactcctggttctggcataatcatcatatcgcacagtggctggtggaggtcctataacagttaagcaaaacctgcccaaggtctcatagctctgagtacgcgtgaaccaatggcatagctgatctcttgccctagtctcaagggctgacagaatctaacgttactctaaagtcagaaacattgaaaatataaacagctgcccgtattggttttggtttttgttttttgttttttttttttgtttatttgttttgttttgttttatctaatgcagtccctggatatcacctaaaatgatccctctgcctcggtttttttttttttttttttttttttttttttttttggttctttttttcggagctggggaccgaacccagggccttgcgcttcctaggtaagcgctctaccactgagctaaatcctctgcctcggtttttaaaaccggcctggagtagagccgatggctaaaggtttgtgacccccagcccggaacgtgcctacatatgcccgctcatgagtggggaatatgttgcgatgagtgtccgttggctctgttgctgtgtccagaaggaaggggctcaaccaaagaccatgatgggacagagacagacaataaggacccggaaagttcgtaatcaaggctagtctttataaaactgtctccttcgcctctgctagcttcgattcagagagacgtgggcggagccggtcgctgcccaggaactccaggaaaggagaagctgaggatagcgcgctacgattgtgtttacagagacagttgggcttcctgaggtgtgttctcgtaatgcactggatcagtgatggcctgtaatatcccggaaagcactacagaaacatgatgttccacacgtcacacgggtcctcctacccgggccctcctactcgggcctgtggcaccaaagggggcggtcccgttgtgcacaccggcgcccgagggagctctgcactccgcccgaagagtgcgctcggctctgccaaggacgctgcgctcgtgactgagcgcgggctggagcaaccgccaactgagtgcaaaccctttgcgcccggacccgtccaacgactataaagagagcagactgtccgctaagcctcatcccgacttcagcagcctgactgccttcttgtcgcttacaccgttgctccagattcaccagatctcggaatggaccccaactgctcctgctccaccggtaagacgcccggtccttggtctttagaatacccagttgtaggggtttggcgggaataggcacctttagttgacaattcgtcctagttctttctagaacccgctcttggaatcgccttcacctgttcttggagtattattattgtccgaacggctccttgtcggggtttggggtaggatttagacgcgcaaataaatgtcccgatcacccacgtagtgggacatctgagttgagacccagttgttactaaccttattgtgaattgcctgatctacaagagaggtgagagaccgttgtgtcttgagatcaaagacccaagccttaccctaccctgtgaggagagaagaggggctaggctccctggagttctgaatagcactttgaattgagcagggcacatggtgttggccactgctgtaatcctgcctcttactgaccgctgtcttccttctcctccacaggcggctcctgcacctgctccagctcctgcggctgcaagaactgcaaatgcacctcctgcaagaagagtgagttgggaccctcgggtggtggtgggggaactcctacagagctggctctgagaaacgtctgaggccattcggtttggggcaagaagcaggtcttctgccagacctgtgcgaccggaggactaggaagcctactctgacatcttcctctatctttctttccaggctgctgctcctgctgccccgtgggctgctccaaatgtgcccagggctgtgtctgcaaaggtgcctcggacaagtgcacgtgctgtgcctgaagtgacgaacagtgctgctgccctcaggtgtaaataatttccggaccaactcagagtcttgccgtacacctccacccagtttactaaaccccgttttctaccgagcatgtgaataataaaagcctgtttattctaactctggttttcttggtgtcgtttagaaataagaaactggggcgacacgggttaacttgatagtctggggatctggttttggactcgcccgtgccttttaactcccgcctctggctcccaaagaggggtaataatgtctttgggtaaagccaagttatcccataagctt

SEQ ID NO: 482 - DNA, 2169 bp, Rattus norvegicus
  ref <308>: DATABASE ACCESSION NUMBER: EMBL / M13011
  ref <309>: DATABASE ENTRY DATE: 2000-03-04
ggatccggaattcggccactggcttgcttgcctactcagtgctggagagagcccttgggttaggcatctattagcagtctcaagtggctagggctggctaagtgtgattctcattggcaggtggggcaggagctcctggtttggcaacccctgtagaagcgatgacagaatacaagcttgtggtggtgggcgctggaggcgtgggaaagagtgccctgaccatccagctgatccagaaccattttgtggacgagtatgatcccactatagaggtgagctctgactacctgccagaggtgggctctggcagtggtcatgggttagagtcccaaacaactaggtcttgaagttggtatgggcctgattcctacctgatcctgatccatcagggtatgagaggtgcaagggtaggcggattctctgtctaagaagaggtaggacccttaagctgtgttcttttgcaggactcctaccggaaacaggtagtcattgatggggagacgtgtttactggacatcttagacacagcaggtcaagaagagtatagtgccatgcgggaccagtacatgcgcacaggggagggcttcctctgtgtatttgccatcaacaacaccaagtcctttgaagacatccatcagtacaggtgaccacctatggctagcccgtggcccatggcatatgtgaggaaggttctgtgtgcacactgaggctttatgtctttttttgaatgtcatggacacgtcaggcctgcagtctgctagctggctcatatacaaccccatccccctccagggagcagatcaagcgggtgaaagattcagatgatgtgccaatggtgctggtgggcaacaagtgtgacctggctgctcgcactgttgagtctcggcaggcccaggaccttgctcgcagctatggcatcccctacattgaaacatcagccaagacccggcaggtgtgagcttgttcccctctccacaagctagtcagggattcaccataccccaccccagccggagcgagctcatcgccctctccctcaacacagggcagccgctctggctctggctccagctctggaccctctgggacccccccgggacccatgtgacccatgtgacccagcggccctcatgctgtaagtcttccgcaggccgcaggctggagggaggcaagggccagggtctgggcttatgccaaagttctgggttgacacatagctccagggcaggatggggtccatggagagagctgccctgagcaggccggagcggtgacccaggggcctagttcttcttgtctccagtgtcctatggagatttgctattttaagcccttaagtgttgttaggttgttaaccttgagacatactgggggtctgggagagtctgagctaagtggctctgatttttcagtggtatttaggagtgaacctacttaaagagagtggcctgtactttttagatggccagagcccagctccctattattttggttttgcagctgaggaagggagcctccagcatggggtgttacctgatccagtcagggagtttcttacccagagagcagagcacccctttcctcctcagagtcctctctgatccagtccctctgtccccagggtgtggaggatgccttctacacactagtacgtgagattcggcagcataaactgcggaaactgaacccgcctgatgagagtggccttggctgcatgagctgcaagtgtgtgctgtcctgacactaggtgaggcagggaccagcaagacatctggggcagtggcctcagctagccagatgaacttcatatccactttgatgtccctgctcccccaattctgccaatccccctgcctgcaggcatcagtcatgtcctttgtgcccgtcccgcaggctcaaggacgaggaggtgccggatgcagggaggaggaggtgctgtcggaaggaaggaaagaggagggaaggaaggaaacgatgctggagccagttcaaggatggtggacagatgtgccaagccttcgcatggacaatttgaacagactgtcatgaactatcccgttgccacgccacccaagtcctccgccccctctcagctcccttgggcgcctatgagggcacatgttgaatcacagtaaattatttgatggacttgacttgtctctgggctgg

SEQ ID NO: 483 - DNA, 2383 bp, Rattus norvegicus
  ref <308>: DATABASE ACCESSION NUMBER: EMBL / M14050
  ref <309>: DATABASE ENTRY DATE: 2000-03-04
ctctgtgagacacctgaccgaccgctgagcgactgactggtccacagcgccggcaagatgaagttcactgtggtggcggcggcgctgctgctgctgtgtgcggtgcgggcggaggaggaggacaagaaggaggatgtaggcacggtggttggcatcgacttggggaccacctattcctgcgtcggtgtattcaagaacggccgcgtggagatcatagccaacgatcagggcaaccgcatcacaccgtcgtatgtggccttcactcctgaaggggagcgtctgattggcgatgcggccaagaaccaactcacgtccaacccggagaacaccgtcttcgacgccaagcgcctcatcggacgcacttggaatgacccttccgtgcagcaggacatcaagttcttgccattcaaggtggttgaaaagaaaactaaaccatatattcaagttgatatcggaggtgggcaaaccaagacatttgccccagaagaaatttctgctatggttctcactaaaatgaaggaaactgccgaggcgtatttgggaaagaaggtcacccatgcagttgtgactgtaccagcttacttcaatgatgcacagcggcaagcaaccaaggatgctggcactattgctggactgaatgtcatgaggatcatcaatgagccaacagcagctgctattgcatatggcctggataagagagagggagagaagaacatcctcgtgtttgacctgggtggtggaaccttcgatgtgtctcttctcaccattgacaatggtgtctttgaagtggtggccactaatggagacactcatctgggtggggaagactttgatcagcgggtcatggagcacttcatcaagctgtacaaaaagaagactgggaaagatgtcagaaaggacaacagagctgtgcagaaactccggcgtgaggtagaaaaggccaagagagccctgtcttctcagcatcaagcgaggattgaaattgagtccttcttcgaaggagaagacttctcagagacccttactcgggccaaatttgaagagctgaacatggacctgttccgctctaccatgaaacctgtccagaaagtgttggaagactctgatctgaagaaatctgatattgatgagattgttctggttggcggatctactcgaattccaaagattcagcagttggtgaaagagttcttcaatggcaaggagccgtcccgtggcatcaacccagatgaggctgtagcatatggtgccgctgtccaggctggtgtcctctctggtgatcaagatacaggtgacctggttctgcttgatgtgtgtcctcttacacttggtattgaaactgtgggaggtgtcatgacaaaactgattccgaggaacactgtggtgcccaccaagaagtctcagatcttctccacagcttctgataatcagcccaccgtaacaatcaaggtctacgaaggtgaacgacccctgacaaaagacaatcaccttctgggtacatttgatctgactggaatccctcctgctccccgtggggtaccccagattgaagtcacctttgagatagatgtgaatggtattcttcgagtgacagctgaagacaaagggacaggaaacaaaaacaaaatcaccatcaccaatgaccaaaaccgcctgacccctgaagaaattgaaaggatggtcaatgacgccgagaagtttgctgaggaagacaaaaagctcaaagagcgcattgacacgaggaatgaattggaaagctatgcttactctcttaagaaccagatcggagataaagagaagctgggaggtaagctgtctcctgaagataaagagaccatggagaaagctgtagaggaaaagatcgaatggctggaaagccaccaggatgcagacattgaagactttaaagctaaaaagaaggaactagaagaaattgttcagccaattatcagcaaactctatggaagtggaggccctcccccaactggtgaagaggatacatcagaaaaagatgagttgtaggtgcactgatctgctagagctgtaatattgtaaatactggactcaggaactttcgttgggagaaaattgagagaacttaagtctcgaatgtaattggaatcttcacctcagagtggagttgaaaatgctatagcccaagtggctgtttactgcttttcattagcagttgctcacgtgtcttggggtcagggagaggaggaattggctattttaaaattggggaaaagctgggtcagggtgtgtgttcaccttggatatgttctatttaacggttgggtcatgcacatctggtgtaggaacttttttctaccataagtgacaccaataaatgtttgttatttacactggtctagtttttgtg

SEQ ID NO: 484 - protein, 655 aa, Rattus norvegicus
  misc_feature (1)..(655): Xaa=Unknown amino acid
MKFTVVAAALLLLCAVRAEEEDKKEDVGTVVGIDLGTTYSCVGVFKNGRVEIIANDQGNRITPSYVAFTPEGERLIGDAAKNQLTSNPENTVFDAKRLIGRTWNDPSVQQDIKFLPFKVVEKKTKPYIQVDIGGGQTKTFAPEEISAMVLTKMKETAEAYLGKKVTHAVVTVPAYFNDAQRQATKDAGTIAGLNVMRIINEPTAAAIAYGLDKREGEKNILVFDLGGGTFDVSLLTIDNGVFEVVATNGDTHLGGEDFDQRVMEHFIKLYKKKTGKDVRKDNRAVQKLRREVEKAKRALSSQHQARIEIESFFEGEDFSETLTRAKFEELNMDLFRSTMKPVQKVLEDSDLKKSDIDEIVLVGGSTRIPKIQQLVKEFFNGKEPSRGINPDEAVAYGAAVQAGVLSGDQDTGDLVLLDVCPLTLGIETVGGVMTKLIPRNTVVPTKKSQIFSTASDNQPTVTIKVYEGERPLTKDNHLLGTFDLTGIPPAPRGVPQIEVTFEIDVNGILRVTAEDKGTGNKNKITITNDQNRLTPEEIERMVNDAEKFAEEDKKLKERIDTRNELESYAYSLKNQIGDKEKLGGKLSPEDKETMEKAVEEKIEWLESHQDADIEDFKAKKKELEEIVQPIISKLYGSGGPPPTGEEDTSEKDELX

SEQ ID NO: 485 - DNA, 1035 bp, Rattus norvegicus
  ref <308>: DATABASE ACCESSION NUMBER: Refseq / NM_012666
  ref <309>: DATABASE ENTRY DATE: 2003-01-13
tcgaccagctccactccagcaccgcggcggaggagagcgaggacgcccaggcaagtgcgcacctgcggagcatcaccgggtccgaccgcaaaatccaacatgaaaatcctcgtggcggtggcggtcttttttctcgtttccactcaactgtttgcagaggaaatcggtgccaacgatgatctaaattattggtccgactggtccgacagtgaccaaatcaaggaggcaatgcccgagccctttgagcatcttcttcagagaatcgcccgaagacccaagcctcagcagttctttggattaatgggcaaacgggatgctgattcctcaattgaaaaacaagtggccctgttaaaggctctttatgggcatggtcagatctctcacaaaaggcataaaacagattcctttgttggactaatgggcaaaagagctttaaattctgtggcttatgaaagaagcgcaatgcagaactacgaaagaaggcgtaaataaaccctgtaacgcactatctattcatctccatctgtgtccgcgagcagtgagcggtaaaataaaaatgtgcgctatgaggaatgattatttatttaatatcaaatgttgttatgagtgaaaaactcaaaaaagtgtttattttttcatattgtgccaataagcattgtaattctaatgtggtgacctcctcagacagaagtagaaattagttgtaacttcagcaaagcacagtgttgatggagttgtacaagtttgccagcgatgcaagtctccaaagacagaaaggctgctgtgaggcagtgcaggcggctgctgctggaggcagagaaactcctgtgtgtcttgcgcttcccttggttgcttttatcctaatgatgtactgagagtttggtatctgactctatttgtatcctagcagcatgtttcctgtgttgtgactatatagagatgtttttaaaagtttcaatgtacttctctggtcttcagtcattgtatgatgtgttgtgatagctaccattttaaataaaagaatgtatcttcagg

SEQ ID NO: 486 - protein, 130 aa, Rattus norvegicus
  ref <308>: DATABASE ACCESSION NUMBER: Refseq / NP_036798
  ref <309>: DATABASE ENTRY DATE: 2003-01-13
MKILVAVAVFFLVSTQLFAEEIGANDDLNYWSDWSDSDQIKEAMPEPFEHLLQRIARRPKPQQFFGLMGKRDADSSIEKQVALLKALYGHGQISHKRHKTDSFVGLMGKRALNSVAYERSAMQNYERRRK

SEQ ID NO: 487 - DNA, 3876 bp, Rattus norvegicus
  ref <308>: DATABASE ACCESSION NUMBER: Refseq / NM_031604
  ref <309>: DATABASE ENTRY DATE: 2003-01-13
ctcagattggagtgaacaaccatcgccaccatgggggagcttttccgaagcgaggagatgaccctggcccagctctttctccagtccgaagctgcttattgttgtgtcagtgaattagaagaacttggaaaggttcagttccgggatttaaatccagatgtgaatgttttccagaggaaatttgtgaatgaagttagaagatgtgaagaaatggatcgaaaactccggtttgttgagaaagagataagaaaagctaacatcccaattatggacactggagagaacccggaggtgccctttcccagggacatgatcgacttggaggccaatttcgagaagatcgaaaacgaactgaaggaaatcaacactaaccaggaagctctaaagcgaaacttcctggaactgactgaattaaaatttatactgcgcaaaactcagcagtttttcgatgagatggcggatccagacctgttggaagagtcctcatcactcttggagccaaacgagatgggaagaggcgcgcctttacgacttggcttcgtagctggtgtgattaaccgggaacggatcccgacctttgagcgcatgctttggcgagtgtgccgagggaatgtgttcctgagacaggctgaaatcgaaaacccgctggaggatcccgtgactggcgactacgtgcacaagtccgtgttcatcatttttttccaaggtgaccagctgaaaaacagggtcaagaaaatctgtgaagggttccgagcctccctctatccctgtcctgagactccacaggagagaaaagaaatggcttccggagtcaataccaggatcgacgatctccaaatggttctgaatcagacagaggaccaccgccagagggttctgcaggcggctgctaagaacatccgggtgtggttcatcaaggtgcggaagatgaaagctatctaccataccctgaacctctgcaacatcgatgtgacgcagaagtgcctgatcgcggaagtctggtgccccgtcactgacctggactccatccagtttgcactgcgaaggggcacggagcacagcggttccactgtcccctccattctgaacaggatgcagacaaaccagacaccccctacgtataacaaaaccaacaagttcacgcacggcttccagaacatagtggatgcttatgggatcggcacttaccgagaaattaacccagctccgtacaccgtcatcaccttcccctttctgtttgctgtgatgtttggagattttgggcacggcattttgatgactctgtttgctgtgtggatggtgttgagggagagccggatcctctcccagaagaacgagaatgagatgtttagcatggtgttcagcggccgatacattatccttctgatgggactgttctccatctacactggactcatctacaatgactgcttttccaagtctctgaatatctttgggtcatcatggagcgtacggccaatgttcaccatagggaactggacggaggagacgctcctggggagttctgtcctccagctgaacccagctatccctggagtctttggtggcccttacccatttggcattgatccgatttggaacatcgcaaccaacaagctgaccttcctcaactccttcaagatgaagatgtcagttattcttgggatcatccacatgctgttcggggtcagcctgagccttttcaaccacatctatttcaagaagcccctgaacatctactttggctttattcccgagataatcttcatgtcctcgctgtttggctacctggtcatcctcatcttttacaagtggacagcctacgatgcccactcgtctagaaatgccccgagcctcctgatccatttcataaacatgttcctcttctcctacccagagtctggtaacgcaatgctgtactctggacagaaaggaattcagtgtttcctcatagtggtggcaatgctctgtgtcccctggatgctgctgtttaagccgttgatccttcgccatcagtacctgaggaagaagcatttgggaactctcaactttggtgggatcagggtgggcaacggaccgacagaggaggatgctgaaattattcagcatgaccagctctccacccattcagaggacgcagaagagcctaccgaggacgaagtgtttgactttggcgacaccatggtccaccaggccatccacaccattgagtactgcttgggctgcatctccaacactgcgtcctacctgcggctctgggccctcagcctggcccatgcacagctctctgaagtactctggaccatggtgatccacatcggcctgcatgtccggagtctggcagggggactggggctgtttttcatcttcgctgcctttgccaccctgaccgtggccatcctgctgatcatggaaggcctctcagccttcctccacgcactgcgattacactgggtggaattccagaacaaattctacactgggactggtttcaagttcctccccttctcctttgagcacattcgggaagggaagtttgatgagtgagtctcaggcagggcgcatgctcagagcagctctcctgcctgcctctacagtgactgtgtctcttgcctgctggttgtgatccctggatactcgggcgtttgtgtcaccctacaacccctgtccccgctgtgactcatttaggttgtgctggccttccctgggtctctttctcccaagccttgggtgttacgtacagactttcgactgagagctggatggctgtgcctgatacccacccatccccatggcaccacttggcctcctggcctccagacagatagccctattccatcccctaatggtgagccaacctgcacagacacataggggcacggagccctcaggatgcaaggggtccctcatcagtccaggagttcttggtcacgccttggaggaagatggcaatgggttctctcctagaaggggatattgcttatggaacatacccgactccgctggcagggacagtcaggaagatgctgctgtcaccctttgtccagcctctccagtgagtattcaggaaactcagttggccctacctgggccatctcaaaggttccaggataacccccaccctcctagcccccaccctcctaaacactctcctcccccagccctgttggcacagcatagctagcatccgtagaatgggagggtcgcactgacttgcagcaccgggcttccggaccttagattcccttctctgtcagtgcgtgaatgggccttgccaacactacaccccaaggcagaagttaaaattggcacactcccggcatatccctgagcccttctgcaccctgatcatgatgtcctgaggctgtggtcagtaaggttggttctgccggcaggcctgccttgatctgcccacttattactccctctccaatccccatgctgaccccaggtttcaggagtggcgtcctggacagggaaggtcagtgtcatttacaatttgctaatcagaggcgactgttgggctaccagagcagatgtgggagcgctgctaagcccttgccgcctacctcatgtactgtggatctcagacccttctaatcatgtgctgactcccgaaattcactcactgccttccctgtggaggtaatactaaatcagcaaggcccctcccctcccccaccctggcgctcttgagccgctcccacggtgaattgttcagagcccctctgtccttttgtgcccagtttacatgatgatctctgctgtttacagagaggcccacagcagaggtctctgtggggaccctgcccaaggccttctgttcagacattcttatccggaataaagtgtgtttgactctgacaaaaaaaaaaa

SEQ ID NO: 488 - protein, 838 aa, Rattus norvegicus
  ref <308>: DATABASE ACCESSION NUMBER: Refseq / NP_113792
  ref <309>: DATABASE ENTRY DATE: 2003-01-13
MGELFRSEEMTLAQLFLQSEAAYCCVSELEELGKVQFRDLNPDVNVFQRKFVNEVRRCEEMDRKLRFVEKEIRKANIPIMDTGENPEVPFPRDMIDLEANFEKIENELKEINTNQEALKRNFLELTELKFILRKTQQFFDEMADPDLLEESSSLLEPNEMGRGAPLRLGFVAGVINRERIPTFERMLWRVCRGNVFLRQAEIENPLEDPVTGDYVHKSVFIIFFQGDQLKNRVKKICEGFRASLYPCPETPQERKEMASGVNTRIDDLQMVLNQTEDHRQRVLQAAAKNIRVWFIKVRKMKAIYHTLNLCNIDVTQKCLIAEVWCPVTDLDSIQFALRRGTEHSGSTVPSILNRMQTNQTPPTYNKTNKFTHGFQNIVDAYGIGTYREINPAPYTVITFPFLFAVMFGDFGHGILMTLFAVWMVLRESRILSQKNENEMFSMVFSGRYIILLMGLFSIYTGLIYNDCFSKSLNIFGSSWSVRPMFTIGNWTEETLLGSSVLQLNPAIPGVFGGPYPFGIDPIWNIATNKLTFLNSFKMKMSVILGIIHMLFGVSLSLFNHIYFKKPLNIYFGFIPEIIFMSSLFGYLVILIFYKWTAYDAHSSRNAPSLLIHFINMFLFSYPESGNAMLYSGQKGIQCFLIVVAMLCVPWMLLFKPLILRHQYLRKKHLGTLNFGGIRVGNGPTEEDAEIIQHDQLSTHSEDAEEPTEDEVFDFGDTMVHQAIHTIEYCLGCISNTASYLRLWALSLAHAQLSEVLWTMVIHIGLHVRSLAGGLGLFFIFAAFATLTVAILLIMEGLSAFLHALRLHWVEFQNKFYTGTGFKFLPFSFEHIREGKFDE

SEQ ID NO: 489 - DNA, 4139 bp, Homo sapiens
  ref <308>: DATABASE ACCESSION NUMBER: Refseq / NM_005177
  ref <309>: DATABASE ENTRY DATE: 2002-05-28
ggcggcgcaggggcggggctttacggacgcaagcacgtcgaagcgctgctcctggagccgcggagggtgcgggtttggctgcggtggtttctgtggcggttgctgtggcggagtttggaggttggagagaaatccaggtactcactagactggtaccttctgccaccatgggggagcttttccggagtgaagaaatgacactggcccagctttttctacagtcagaggctgcttattgttgtgtcagtgaattaggagaacttggaaaggttcagtttcgtgacttaaatccagatgtgaatgttttccaacggaaatttgtgaatgaagttagaagatgtgaagaaatggatcgaaagcttcgatttgttgagaaagagataagaaaagctaacattccgattatggacaccggtgaaaacccagaggttcccttcccccgggacatgattgacttagaggccaattttgagaagattgaaaatgaactgaaggaaatcaacacaaaccaggaagctctgaagagaaacttcctggaactgaccgaattaaaatttatacttcgcaaaactcagcaattttttgatgagatggcggatccagacttgttggaagagtcctcatccctcttggagccaagtgagatgggaagaggcactcctttaagacttggcttcgtggctggtgtcattaaccgggagcgcatccctacttttgagcgcatgctttggcgggtatgccggggaaatgtgttcctgcgacaggctgaaatcgagaaccccctggaggatcctgtgactggcgactacgtgcacaagtctgtgtttatcattttcttccaaggcgatcagctgaaaaacagagtcaagaaaatctgtgaagggttccgagcctcactctatccctgtcctgagacaccacaggagaggaaggaaatggcttctggagtgaataccaggattgatgatctccaaatggttctgaatcaaacggaggatcaccgccagagggttctgcaggcagctgctaagaacatccgtgtctggttcatcaaagtgcggaagatgaaggccatctatcacaccctgaacctgtgcaacatagatgtgactcagaaatgcttgattgcagaggtctggtgccctgtcaccgaccttgactccatccagtttgcactcagaaggggcacggaacacagtggttccactgtaccttccattttgaacaggatgcagacaaaccagactcccccaacctataacaaaaccaacaagtttacctatggctttcagaacatagtagatgcttatggaattggaacttaccgagagataaatccagctccgtatactattatcacgttcccttttctatttgctgtgatgtttggagacttcggtcatggcattttaatgaccctttttgctgtgtggatggtactgagggagagccggatcctttcccagaagaatgagaatgagatgtttagcactgtgttcagtggtcgatacattattttattgatgggtgtgttctccatgtacactggcctcatctacaatgattgcttttccaagtctcttaatatctttgggtcatcctggagtgtacggccgatgtttacttataattggactgaagagacgcttcgggggaaccctgttctacagctgaacccagccctccctggagtgtttggtggaccatacccttttggcattgatccaatttggaacattgctaccaataaactgacgttcttgaactcctttaagatgaagatgtctgttatccttggtatcatccatatgctgtttggagtcagcctgagtctgttcaaccatatctatttcaagaagcccctgaatatctactttggatttattcctgaaataatcttcatgacctctttgtttggctatttggttatccttattttttacaagtggacggcctatgatgctcatacctctgagaatgcaccaagccttctgatccatttcataaacatgttcctcttttcctacccagagtctggttattcaatgttgtattctggacagaaaggaattcagtgtttcctggtagtggttgcactactgtgtgtaccttggatgctgctgtttaaaccattggtccttcgccgtcagtatttgaggagaaagcatttgggaactctcaactttggtgggatcagggtgggcaacggaccgacagaggaggatgctgagattattcagcatgaccagctctccacccactcagaggacgcagacgagtttgactttggggacaccatggtccaccaggccatccacaccatcgagtactgcctgggctgcatctccaacactgcctcctacttgcggctctgggccctcagcctcgctcatgcgcagctgtctgaggtgctttggaccatggtgatccacatcggcctgagcgtgaagagcttggcgggaggtttggtgctgttcttcttcttcactgcctttgccaccctgaccgtggccatcctcctgatcatggagggcctctcggcctttctccacgcactgcgcttacactgggttgagttccagaataaattctacagcgggaccggtttcaagttcttacccttctccttcgagcatattcgggaagggaagtttgaagagtgagtccctgtgagggccgtgtgccccatgctaccctccccgcctccctccacagtgatcagctgtgcctctctgcctgttggttgtgatctgtgggcaccagctcattcgtgtcaccctgtctgtgagtcatttagatagaatagtcctccttgggtctcccaccacccctagctttgtgtgtagtgtagtgattttctggctgtcactcatactcactgggcaccagccttgccctcttagcctccatccatccagacagcccttcccacctcctggtggtgagccagtctgcattcccacgccatcccaaagccctttcatcttccccgtgcattgtagatggaaggagcacccatgccattcacccatctagactttgagttccctgcatctgccaccgtagtttctagcaggagtagtggggggagtaatacagattcttccctagaaggggacactggtaacatgtcccactcttggattagcaggggtgggtccaggaagatgatatttgcgtcttttgcccacccccctggcattcagctggacccaactaggccatcatgagtggcttctccctgtcatccccaggggtcataggatatctacaccgcctttctgaccccaccctgcactcccatcctttcctctctccccgttcatgccctgcactacatagcacagccgggatgcttggaacagaggccttggctgctccgcagtgcacagggcttccctctctcggggttggcttcttcccaggccttgcatgggccctgcccacaagcacaccctcaggccgagggtgcagactgatgctcttccctgatggagaccctgagatcttccccacccccaatcatgatgtcttcagtgtgggactggggtcctcttggttctgcctgcagcctgcctggctccgcccctagtgccccctcctcaccacactggccccaggtctcaggaggggtgtcctgggcagggaaggtcagtgtcactgatggtttgctgtttggaagccattggcagggctgccgtgcatgtggctgtgagggctgcacagtcctgccaaggggcttcctccttgtcaccccgaaccttgtaatcgtgtgctggcgtggcagccctggctaagttaatccccaccgctttcagtggtagaaagaattccctgagtgggccaggctggtgccctcctcctaccctggcttttctgagtgagctgcctggagccctcatcccctctcccaggctgggctggccctgggcggggccactgtgtgctggcccactgtgacctgacccgaccttgtgcagcccccctgccctggtgtcctgggttttcgtgatgatctttgctctgtttccagtggggtttgaagcagagttcagggaaccctgcccaaggtcctcctgttcagacattcctatgttgaataaagtatgtttgacttccccggaaaaaaaaaaaaaaaa

SEQ ID NO: 490 - protein, 831 aa, Homo sapiens
  ref <308>: DATABASE ACCESSION NUMBER: Refseq / NP_005168
  ref <309>: DATABASE ENTRY DATE: 2002-05-28
MGELFRSEEMTLAQLFLQSEAAYCCVSELGELGKVQFRDLNPDVNVFQRKFVNEVRRCEEMDRKLRFVEKEIRKANIPIMDTGENPEVPFPRDMIDLEANFEKIENELKEINTNQEALKRNFLELTELKFILRKTQQFFDEMADPDLLEESSSLLEPSEMGRGTPLRLGFVAGVINRERIPTFERMLWRVCRGNVFLRQAEIENPLEDPVTGDYVHKSVFIIFFQGDQLKNRVKKICEGFRASLYPCPETPQERKEMASGVNTRIDDLQMVLNQTEDHRQRVLQAAAKNIRVWFIKVRKMKAIYHTLNLCNIDVTQKCLIAEVWCPVTDLDSIQFALRRGTEHSGSTVPSILNRMQTNQTPPTYNKTNKFTYGFQNIVDAYGIGTYREINPAPYTIITFPFLFAVMFGDFGHGILMTLFAVWMVLRESRILSQKNENEMFSTVFSGRYIILLMGVFSMYTGLIYNDCFSKSLNIFGSSWSVRPMFTYNWTEETLRGNPVLQLNPALPGVFGGPYPFGIDPIWNIATNKLTFLNSFKMKMSVILGIIHMLFGVSLSLFNHIYFKKPLNIYFGFIPEIIFMTSLFGYLVILIFYKWTAYDAHTSENAPSLLIHFINMFLFSYPESGYSMLYSGQKGIQCFLVVVALLCVPWMLLFKPLVLRRQYLRRKHLGTLNFGGIRVGNGPTEEDAEIIQHDQLSTHSEDADEFDFGDTMVHQAIHTIEYCLGCISNTASYLRLWALSLAHAQLSEVLWTMVIHIGLSVKSLAGGLVLFFFFTAFATLTVAILLIMEGLSAFLHALRLHWVEFQNKFYSGTGFKFLPFSFEHIREGKFEE

SEQ ID NO: 491 - DNA, 1867 bp, Rattus norvegicus
  ref <308>: DATABASE ACCESSION NUMBER: EMBL / M94918
  ref <309>: DATABASE ENTRY DATE: 2000-03-04
agctttgcttctcagtggaaaagtaattttaacaagcaatttagtagttgattgagcaaatgcattgcaaaaaagaatgcttttgggacagcgttttcttcagagggagtacccagagctggcactcctgagccagtggcccagcatccagggagagatatgcttgtcatcaccgaagcctgatgctgtagagccacaccctggtattggccaatctgctcacacaggacagcgagagcaggagccaggcagagcataaaaggtggggcgggatcagtcgctcctcacatttgcttctgacatagttgtgttgactcacaaactcagaaacagacaccatggtgcacctgactgatgctgagaaggctgctgttaatggcctgtggggaaaggtgaaccctgatgatgttggtggcgaggccctgggcaggttggtatccaggttacaaggcaagtagaagtttggtgcttggagacagaggtctgctttccagcaggcactaacttttattgtatcctggctatgtttccctttgtaggctgctggttgtctacccttggacccagaggtactttgatagctttggggacctgtcctctgcctctgctatcatgggtaaccctaaggtgaaggcccatggcaagaaggtgataaacgccttcaatgatggcctgaaacacttggacaacctcaagggcacctttgctcatctgagtgaactccactgtgacaagctgcatgtggatcctgagaacttcagggtgagtctgatgggctcctcgctgggtgtccttcctgtggctttcctgctcaaattcctatcagaaggaaagaggaagccactctagggagcagttttgatgatgatgtgtggatgtgccctgtggagtgttgacaggagtccagttattttatcctctattcacaatcacttctccctctcactctattattctatgttgtcatttcctctttctttggtaaacttttaattttcagttgcagttttttctttttaaaaaaattaattaactgacttatttactttccatcccgatctcagcttcccctcctcctctcttcccagtccttctctctgctttctattaccctacctctttcttttctcctcagtccattttctcttttttcaatcaactttttgttttcttttaaatatttcttagtaactttctctgaggacaaggaagatatgtgagtccctgtttcttcccacagctctaaagagtagtagcagtaattggctttcatgccagagtggaagagaagaatatattttacaataaattctgtctgacatagaagaattctcattataatttttcagtactttaagttggaaacgaaaacaccatttgaaatgagcctgaagtgtctggtatttttgctctgcaattatgttgatggttcttccctcttcccacagctcctgggcaatatgattgtgattgtgttgggccaccacctgggcaaggaattcaccccctgtgcacaggctgccttccagaaggtggtggctggagtggccagtgccctggctcacaagtaccactaaacctcttttcctgctcttgtctttgtgcaatggtcaattgttcccaagagagcatctgtcagttgttgtcaaaatgacaaagacctttgaaaatctgtcctactaataaaaggcatttactttcactgcaatggtgtgttaaattaattgtatctcatagaagggttcatgcttaggtttcaaggtacaaagcagtgagggttcagttctgaccttggggaaataaatgatttgtgcttcatgatatatgctgggacagtaagctataaggcacagctcctaatgctccc

SEQ ID NO: 492 - DNA, 2040 bp, Rattus norvegicus
  ref <308>: DATABASE ACCESSION NUMBER: EMBL / M94919
  ref <309>: DATABASE ENTRY DATE: 2000-03-04
aaaattcataaatacaatagttaaggatgttttagagacagagtttgctgcaagggtaagaacacacactactcagagtgaggacctggaactcttatacctaagcctgtaccatagccaccctgagtaggtatggctatcatctctgaagcctcaccctgcagaggcacaccctcacattggtaatctgctcacacaggacagagtgatcagggggcagaatttggcatataaaacagaacagaaccagttgcttcttatatttgcttctgatactgttgtgttgactcgcaacctcaggaacagacaccatggtgcacctaactgatgctgagaaggctactgttaatggcctgtggggaaaggtgaaccctgttgaaattggcgctgagtcccttgccaggttggtatccaggttacaaggtagctcctaagtagaagtttggtgcttggagacagagatctgctttccagcaggtactaacttttattgtctcctggctatgtttccctttgtagtctgctgattgtctacccttggacccagaggtacttttctaaatttggggacctgtcctctgtctctgctatcatgggtaacccccaggtgaaggcccatggcgaaaaggtgataaacgccttcgatgatggcctgaaacacttggacaacctcaagggcacctttgccagcctcagtgaactccactgtgacaagctgcatgtggatcctgagaacttcagggtgagtctgatgggctccccctgggtgtccttcctatgctttcctgctcaccttcctatcagaaggaaagaggaagccactctagggagcattttttgatgaaggtgtgtgggtgtgccctgtggagtgttgacaggagtccagttattttatcctctactcacaatcacttctcccgctcactctgttctatgttatcatttcgtctttcttgagtaaacttttaatttttagttgcagtttttttcttttttaaaaaaattaattaactgacttatttactttccatcccgatctcagcttcccctcctcctctcttacctcctctttctattaccctacctctttcttttctcctcattccatttttgtcttttttaatctactttttgttttcttttaagtatttcctagtaacttgctctgaggacaaggaagacatgtgagtccctgtttcttcccacagctctaaagaatagtagcagctattggctttcatggcagggtggaagggctgcattattttacatataaattctgtttgacatagcagaattcttgttataatttttcagtactttaagttggaaacaaaaacgccatttgaaatgagcctgaagtgtctggtatttttgctctgcaattatgttgatggttcttccctcttcccacagctcctgggcaatatgattgtgattatgatgggccaccacctgggcaaggaattcaccccgagtgcacaggctgccttccagaaggtggtggctggagtggccagtgccctggctcacaagtaccactaaacctcttttcctgctcttgtctttgtgcaatggtcaattgttcccaagagagcttctgtcagttgttgtcaaaatgacaaagacctttgaaaatctgtcctactaattaaaggcatttactttcactgcaatgaaatatagtgttaaatgtgttaaattaattgtgtctcacagaagggttcatgctaaggtttcaagatacaaagcagtgagggttcagttctgaccttggggaaataaatgatttgtgcttcatgatatatgctgggacagtaagctataaggcacagctcctaatcctcccctctgaacacctaagagaaaattcaagacatggtttcatttacacactagattttggttacattttatgttaattacttgttttctctagttttcctcataaatgtgtcctgtcttttctcttacctacccagcacctcacagatttgtagtcaataattattctttcctaaaattaccactattctctaa

SEQ ID NO: 493 - DNA, 689 bp, Rattus norvegicus
  ref <308>: DATABASE ACCESSION NUMBER: Refseq / NM_022511
  ref <309>: DATABASE ENTRY DATE: 2003-01-13
atggccgggtggaacgcctacatcgacagccttatggcggacgggacctgtcaggacgcggccatcgtaggctacaaggactcgccctccgtctgggccgctgtccccgggaagaccttcgttagcattacgccagctgaggttggtgtcctggtaggcaaagaccggtcaagttttttcgtgaatgggctgacacttgggggccagaaatgttctgtgatccgggactcactgctgcaagacggggaatttacaatggatcttcgtaccaagagcaccgggggagcccccaccttcaatgtcactgtcaccatgactgccaagacgctagtcctgctgatgggcaaagaaagtgtccacggtggtttgatcaacaagaaatgttatgaaatggcctctcacctgcggcgttcccagtactgacctcatctgtcccttcccccaccggtccctttggcttttgcacccccttctttccatacacacacacaccattattttttgggccattaccccatttcccttattggtgccaaaaccacatgggctgggggctggggctggatggacagacacctccccctacccataccccctcctgtgtgtgtttggggaaaaaatgtttttggggtttaattttgttttaatttttggtttgtttttttttttttttctgaataaaaaaagat

SEQ ID NO: 494 - protein, 140 aa, Rattus norvegicus
  ref <308>: DATABASE ACCESSION NUMBER: Refseq / NP_071956
  ref <309>: DATABASE ENTRY DATE: 2003-01-13
MAGWNAYIDSLMADGTCQDAAIVGYKDSPSVWAAVPGKTFVSITPAEVGVLVGKDRSSFFVNGLTLGGQKCSVIRDSLLQDGEFTMDLRTKSTGGAPTFNVTVTMTAKTLVLLMGKESVHGGLINKKCYEMASHLRRSQY

SEQ ID NO: 495 - DNA, 847 bp, Homo sapiens
  ref <308>: DATABASE ACCESSION NUMBER: Refseq / NM_005022
  ref <309>: DATABASE ENTRY DATE: 2001-11-06
acagcgagcggagccgcggtccggacggcagcgcgtgccccgagctctccgcctccccccgcccgccagccgaggcagctcgagcccagtccgcggccccagcagcagcgccgagagcagccccagtagcagcgccatggccgggtggaacgcctacatcgacaacctcatggcggacgggacctgtcaggacgcggccatcgtgggctacaaggactcgccctccgtctgggccgccgtccccgggaaaacgttcgtcaacatcacgccagctgaggtgggtgtcctggttggcaaagaccggtcaagtttttacgtgaatgggctgacacttgggggccagaaatgttcggtgatccgggactcactgctgcaggatggggaatttagcatggatcttcgtaccaagagcaccggtggggcccccaccttcaatgtcactgtcaccaagactgacaagacgctagtcctgctgatgggcaaagaaggtgtccacggtggtttgatcaacaagaaatgttatgaaatggcctcccaccttcggcgttcccagtactgacctcgtctgtcccttccccttcaccgctccccacagctttgcacccctttcctccccatacacacacaaaccattttattttttgggccattaccccataccccttattgctgccaaaaccacatgggctgggggccagggctggatggacagacacctccccctacccatatccctcccgtgtgtggttggaaaacttttgttttttggggttttttttttctgaataaaaaagattctactaacaaaaaaaaaaaaaaaaaaaaaaaaaaaaaaaaaaaaaaaaaa

SEQ ID NO: 496 - protein, 140 aa, Homo sapiens
  ref <308>: DATABASE ACCESSION NUMBER: Refseq / NP_005013
  ref <309>: DATABASE ENTRY DATE: 2001-11-06
MAGWNAYIDNLMADGTCQDAAIVGYKDSPSVWAAVPGKTFVNITPAEVGVLVGKDRSSFYVNGLTLGGQKCSVIRDSLLQDGEFSMDLRTKSTGGAPTFNVTVTKTDKTLVLLMGKEGVHGGLINKKCYEMASHLRRSQY

SEQ ID NO: 497 - DNA, 145 bp, Rattus norvegicus
  ref <308>: DATABASE ACCESSION NUMBER: EMBL / AA819776
  ref <309>: DATABASE ENTRY DATE: 2000-03-03
tttttttttttttttttctcttccttttcttcagcctgatcaacattgacttccttgtcacgttccttctccacacatagagtcatggggtagccaataaactgggaatgtttcttcacaatttcttttattctcggttcctcca

SEQ ID NO: 498 - DNA, 537 bp, Rattus norvegicus
  ref <308>: DATABASE ACCESSION NUMBER: EMBL / AA859885
  ref <309>: DATABASE ENTRY DATE: 2000-03-03
aagttctgctgcttctgtgtaactagggcagctgttgtctgaaccaccacagattcctgtgacccttgaaccattcatgaaaagctaagtaacctggtttgggaagacttgggttgaggtttgcatggggccaacaagcaggataacatctacttcagttcctagtgtcctctagaaacctttaggccaagactgcaggctccctgggcttgctctgtggtttggtttggttttgttaacatcagtatctctcaagatctaggacccagggaggtctttgcatatgccagggctctggatgctactgtcagtcttgggaagcaggctcgtccaccggcagcgaagtccatgtgagcactctgaatgccttggtgacgccaatgacctaaacagttaaacttcagaaaacagtttcaacagatttctgctgcccgtgtggttatgaagatgcgtttgtatttactgtgcttccatatttcatttaactggtttttgttatttctgatttttgttactattaataaataaaggtaaaac

SEQ ID NO: 499 - DNA, 388 bp, Rattus norvegicus
  ref <308>: DATABASE ACCESSION NUMBER: EMBL / AA891670
  ref <309>: DATABASE ENTRY DATE: 2000-03-03
gccactgggctcaggtcactttggtgaagacaaacttggtgcaggaggtacaccagaatttttcagcctggtgttcccaagtgattcgcctgtatgaaggacagcgtcatttggagctggagtggacggtgggaccaatcccagtgaaagatgactggggaaaggaagtcatcagccgctttaacacccctatccagggtttccaggctcaagtggatgacagatactggtcccatctcctaccctgctccttcccggttggaccctacctcaatcacactgcagcctatgcaaatccgtaccttcctggcctcggttcaatggcagagactcatctaggcctgccaggaggaggggcaggcctccccttctcttgctggaaccactc

SEQ ID NO: 500 - DNA, 1442 bp, Rattus norvegicus
  ref <308>: DATABASE ACCESSION NUMBER: Refseq / NM_012495
  ref <309>: DATABASE ENTRY DATE: 2003-01-13
gtcccccccaccccagctgaataggctgcgttctcttggaacgcgccgcagaacgaggttctgtgaccctagccgcgttccctccttagttcctttcgcctacccacccgcgtacccgacagacccaccccgtcctgtgccaggaaagcgctgccaccggcaccatgccccacccatacccagcactgaccccggagcagaagaaggagctggctgacatcgctcaccgaattgtagctccgggcaagggcatcctggctgcagacgagtccactggaagcattgccaagcgcctgcagtccattggcaccgagaacaccgaggagaacaggcgcttctaccgccaactgctgctgactgccgatgaccgtgtgaatccctgcattggaggggtgatccttttccacgagacactgtaccagaaggcagatgatggccgtcccttcccccaagttatcaagtccaagggtggtgttgtgggcattaaggtagataagggtgtagtgcccctggctggaaccaatggcgagaccactactcaagggctggacgggctgtctgagcgctgtgcccagtataagaaggatggagccgactttgccaagtggcgctgtgtgctaaagattggggagcatactccctcgtccctcgccatcatggaaaatgccaatgttctggcccgttacgctagcatctgccagcagaatggcattgtacccattgtggagcctgaaattctccctgatggggaccatgacttgaagcgctgccagtatgtaactgagaaggtactggcagctgtctacaaggctctgagtgaccaccatgtctatctggaaggcacactgctgaagcccaacatggtcacccctggccatgcttgcacccagaaattttccaatgaggaaattgccatggcaaccgtcacagcacttcgtcgaacagtgccccctgccgtccctggggtcactttcctgtctggagggcagagtgaggaagaggcatccatcaacctcaatgctatcaacaagtgtcccctgctgaagccatgggccttgactttctcctatggccgagccctgcaggcctctgctctaaaggcttggggtgggaagaaggagaacctgaaggcagcccaggaggagtacatcaagcgagccctggccaacagcctcgcttgtcaaggaaagtacactccaagtggccagtctggagccgcagccagtgaatctctcttcatctctaaccatgcctactaaccagagctgatctaaggctgctccatcgacactccaggcccctgcctacccacttgctattgaagaggggccttcaggctctttcccatcactcttgctgccctcgtgtgtgcagtgttgtctgtgaatgctaaatctgccatcccttccagcccactgccaataaacagctatttaaggggg

SEQ ID NO: 501 - protein, 364 aa, Rattus norvegicus
  ref <308>: DATABASE ACCESSION NUMBER: Refseq / NP_036627
  ref <309>: DATABASE ENTRY DATE: 2003-01-13
MPHPYPALTPEQKKELADIAHRIVAPGKGILAADESTGSIAKRLQSIGTENTEENRRFYRQLLLTADDRVNPCIGGVILFHETLYQKADDGRPFPQVIKSKGGVVGIKVDKGVVPLAGTNGETTTQGLDGLSERCAQYKKDGADFAKWRCVLKIGEHTPSSLAIMENANVLARYASICQQNGIVPIVEPEILPDGDHDLKRCQYVTEKVLAAVYKALSDHHVYLEGTLLKPNMVTPGHACTQKFSNEEIAMATVTALRRTVPPAVPGVTFLSGGQSEEEASINLNAINKCPLLKPWALTFSYGRALQASALKAWGGKKENLKAAQEEYIKRALANSLACQGKYTPSGQSGAAASESLFISNHAY

SEQ ID NO: 502 - DNA, 387 bp, Homo sapiens
  misc_feature (1)..(387): n=a, c, g or t
  ref <308>: DATABASE ACCESSION NUMBER: EMBL / AI791721
  ref <309>: DATABASE ENTRY DATE: 2000-03-04
gggccttgactttctcctatggccgagccctgcaggcctctgctctaaaggcttggggtgggaagaaggagaacctgaaggcagcccaggaggagtacatcaagcgagccctggccaacagcctcgcttgtcaaggaaagtacactccaagtggccagtctggagccgcagccagtgaatctctcttcatctctaaccatgcctactaaccagagctgatctaaggctgctccatcgacactccaggcccctgcctacccacttgctattgaagaggggccttcaggctctttcccatcactcttgctgccctcgtgtgtgcagtgttgtctgtgaatgctaaatctgccatcccttccagcccactgccaataaacagctatntaa

SEQ ID NO: 503 - DNA, 3019 bp, Rattus norvegicus; identical to SEQ ID NO: 145
  ref <308>: DATABASE ACCESSION NUMBER: Refseq / NM_030990
  ref <309>: DATABASE ENTRY DATE: 2003-01-13

SEQ ID NO: 504 - protein, 277 aa, Rattus norvegicus; identical to SEQ ID NO: 146
  ref <308>: DATABASE ACCESSION NUMBER: Refseq / NP_112252
  ref <309>: DATABASE ENTRY DATE: 2003-01-13

SEQ ID NO: 505 - DNA, 2938 bp, Homo sapiens; identical to SEQ ID NO: 147
  ref <308>: DATABASE ACCESSION NUMBER: Refseq / NM_000533
  ref <309>: DATABASE ENTRY DATE: 2002-11-05

SEQ ID NO: 506 - protein, 277 aa, Homo sapiens; identical to SEQ ID NO: 148
  ref <308>: DATABASE ACCESSION NUMBER: Refseq / NP_000524
  ref <309>: DATABASE ENTRY DATE: 2002-11-05

SEQ ID NO: 507 - DNA, 1246 bp, Rattus norvegicus
  ref <308>: DATABASE ACCESSION NUMBER: Refseq / NM_017066
  ref <309>: DATABASE ENTRY DATE: 2003-01-14
gacagaacggaattgagtgaaggcaggatcaggttccccgccttcccgtccaaaaatcccgccaaggaagccccagagcacaagaaaatccaaagtggagagaggggaagaaagaaagcactgagtcatccatccagaaggggggagagcgcagccgcccaggcaggagcagcagccagcgatacctggagtccgttgcagaaacctcgccctgcactttgcaacaaaggcagcctgctgtcagcgaggacatctgccaagccaaaaaatgtcgtcccagcaataccagcagcaacgtcgaaaatttgcagctgccttcctggctttgattttcatcctggcagccgtggacactgctgaggccgggaaaaaagagaaaccagaaaaaaaggtgaaaaaatctgactgtggagaatggcaatggagtgtgtgcgtgcccaccagcggggactgtggtctaggcacccgggagggcactcgcactggtgccgagtgcaaacaaaccatgaagactcagagatgtaagatcccttgcaactggaagaagcagtttggagctgagtgcaaataccagttccaggcttggggagaatgtgacctcaataccgccttgaagaccagaactggcagtctgaagagagctctgcacaatgccgactgtcagaaaactgtcaccatctccaagccctgtggcaaactcaccaagcccaagcctcaagcggaatcaaagaagaagaaaaaggaaggcaagaaacaggagaagatgctggattaaaagaggccaccttttgtggacaaggaaaaggacatcagcaagcaggatcagttaactattacatttatacctactgtaggctttttattcaacagttatctgtagcttaagtacatgataggcaaaaacaaagagaaaagaaatgtttttgtagtagcatttttttaatgtataccatagtaccagtaggggtttataataaaggactgtaatactatttaggaagttgagttgtagtacatgatagatggtaggattgaggtaagttttttttttttgtttttgttttgttttggttttggtttgttttgcttttcaaagttatgtgatatttcacatttaaatctttttttttacatttccaaaccttgtgcatcaatttaaatgttacaaccatgtaaactacttcccttattagatagattttcacctagacttttttttcccaattcagaagaaaatatacactaa

SEQ ID NO: 508 - protein, 168 aa, Rattus norvegicus
  ref <308>: DATABASE ACCESSION NUMBER: Refseq / NP_058762
  ref <309>: DATABASE ENTRY DATE: 2003-01-14
MSSQQYQQQRRKFAAAFLALIFILAAVDTAEAGKKEKPEKKVKKSDCGEWQWSVCVPTSGDCGLGTREGTRTGAECKQTMKTQRCKIPCNWKKQFGAECKYQFQAWGECDLNTALKTRTGSLKRALHNADCQKTVTISKPCGKLTKPKPQAESKKKKKEGKKQEKMLD

SEQ ID NO: 509 - DNA, 3865 bp, Rattus norvegicus
  ref <308>: DATABASE ACCESSION NUMBER: Refseq / NM_012568
  ref <309>: DATABASE ENTRY DATE: 2003-01-14
ttttttttcacaccaagcagagtttattgatgccgtgggcggggcccacgtacacagcaggtggcgcacgcagggcagatactcactggctggactgcaggggtgttagcagcggcaaaagcagatgacctgtggggagcaccctttggggggtgccctcctcctagcagcattgggggctttgggtgagcatcaagaaccacctagtcaccctaaggttctcttggaagcccctccccctccttcccgagctccttgtgagttgggggctaggatcccttcctgtgatcaaaggtgggatgatcccttgagattcactataaaaattaaaattcatttataaatcacaagagaagggcaggagggaacaccggggaaacctgacttcatcggttaccttgagcctactcccctccctcaggttctaactccaaaagagagagcaaagagctaggtctacaggcacagaaaggggcgagagacagaggaaaggcagtcggaagaacgggacgagagaggaaaaagatgcatcggaagaaaagtatggctgctgaggctcctctccccaacagctcccgaaagccatgacctggggataaaggagaaaagttcccagcccagagactcctacaaggtaaggttccaaatgtccccgatccggtccttgctcaagccatggcgggccttgagatactcagagctgtgtggatgggagctgagggaggcgagtgctactccaggtagatatcttctgtggggcaggcgaatgccaggtgctcctggtagtactccaggaaggcccggcccacgctccttgccactggcctcatagactcctgggacacaaagacgtggcaggcaaagcggcttagcagcgggtgtttggtaatgaagccaaaatagcagctgtttcggggatgacagccacagaaggagatgttcttcatctggaaaaagtggctgcaacgccctggtttgacctgaccatgatgcccaagactggcactttttgttttttctcagcaaactgtacaaccccaaatctctttttgattttcaaggaaactagattcctgccagaatttgagtctggacaataaatagacactttgtcctagtcttctttctggaatcatttcgggatattttccacaagcatcacggaaacaggaatgaaccggcagctagtgaacattttgacagccttgtttgcatttttcttagggacaaaccacttcagggaagcattctgcaaagaccatgactccaggtctggaaaacatccctcgcagaccctgtctccttcagatttcttggataaactaatgggaaggacatcaggatatgatgcaagaatcaggccaaattttaaaggtcctccagtaaacgttacttgcaatatttttatcaacagttttggatcggtcacagaaaccaccatggactaccgagtgaacatttttctgagacagcagtggaacgattcacggctggcatacagtgagtacccagatgattccctggatttggatccatcgatgctggattcgatttggaaaccagatttgttctttgccaatgagaaaggagccaatttccatgatgtcaccactgataacaagttgctgcggatttccaaaaatggcaaagtgctctacagtattagactcaccttgactttatcctgtcccatggacctgaagaactttccaatggatgtccagacctgtacaatgcagctggagagttttgggtacaccatgaatgacctgatatttgagtggttaagtgatggtccagtacaagttgctgaaggactcaccctgcctcagtttattttgaaagaagagaaggaacttggctattgcacaaagcattacaacactggcaagtttacctgcattgaggtcaagtttcacctggaacgccagatgggctattatttgatccagatgtatatccccagcctgctgatagtcattttgtcctgggtctccttttggataaacatggatgcagctcctgccagggttgcccttggcatcacaaccgtcctgacaatgactacccagagttcaggttccagggcatctctgccaaaggtctcatatgtgaaagcaattgacatctggatggcagtgtgccttctgtttgtgtttgctgccttactggaatatgcagcagtgaactttgtctccaggcaacacaaggagttccttcgtctccggagacgacagaagaggcagaataaggaagaagatgttactcgtgaaagccgttttaacttcagcggttatgggatgggtcactgcctccaagtgaaagatggtacagctgtcaaggctacacctgccaacccacttccgcaacccccaaaagatgcagatgctatcaagaagaagtttgtggatcgggcaaaaagaatcgacaccatatctcgagctgccttcccactggccttcctcattttcaacatcttttactggatcacatacaagatcattcggcatgaagatgtccacaagaaatagatgtatcctattgaccctgggaccttctttgcctaagtgttgtgcttgtaaatacacagtaatagtgtctttatattgctttgacagagaacattgagggtggggggaggaaaatcatgagggtggggtttctggcacctacatgacaaaggacaggttctatgggcaaggaagaaaactgcacaaaattaaggtgttgcagaatcacatgagcataactcccatccatagtctatagcattgttctttcagaggacacatcactcagacatgatatgcaaggtcaagttcttgagggctggttatcttatggtttgatttgacaagttctggttctgaaaggttagtttaatgcacacacacacacacacacacacacacacacacacacacacacacacagaaaatgcttaccatctgacaatagtgactaccatatagtaaattgaggaccaaactttttcaggaaaatgctgcctcatttttaaaacaagcctcctgagctatgatatttacaatgtctgtaattagtgtttcacccaagaaatccttttgtgggttgtaaattctttctacaaatccaggaaacaacaacaagataaacacaaatgactaagagcagatttctactctgctgtctgtgtaggtgtgcactttgatattatttttctttcctagatataatgtgggggcttccttgtgtattgcgtaattgatttactggtatatcctcttaaaagaaatgctcattttattttagatcaagttagcatattatgtatattttttcactttggctatacttatgtgtgactttaagtgcccaagtgtaatttagctattgcagctgctatgccacagtatttatggagacggtgtgttgtgattggtgtatctcagagtagctcaaacttcccatttctgccctcattgtagctgtaactactagtcctaatgttgactgacctgtaatttgtactttcaatccaagtgaatatcgttttaaatatccttgattaactgaaaaaaattcaaactgtactgtgattttcataacccgttgccttttcggtatcagagctacgtggtttgaatcctggctacatgttttaagtaagaaaaaaaatatgtatttttgcttactcaaaagacaacctgtaaagttatatggaaataattacattttacatgtgctgtaaaagggattattttaaaaaagcatttgttcagtttcaataaaggtaagtgtgccaccaaaaaataattcccatgttgctggtggtggtagttgttgaatagctgttggcattggtgaaaaaggagctggaactggc

SEQ ID NO: 510 - protein, 452 aa, Rattus norvegicus
  ref <308>: DATABASE ACCESSION NUMBER: Refseq / NP_036700
  ref <309>: DATABASE ENTRY DATE: 2003-01-14
MNRQLVNILTALFAFFLGTNHFREAFCKDHDSRSGKHPSQTLSPSDFLDKLMGRTSGYDARIRPNFKGPPVNVTCNIFINSFGSVTETTMDYRVNIFLRQQWNDSRLAYSEYPDDSLDLDPSMLDSIWKPDLFFANEKGANFHDVTTDNKLLRISKNGKVLYSIRLTLTLSCPMDLKNFPMDVQTCTMQLESFGYTMNDLIFEWLSDGPVQVAEGLTLPQFILKEEKELGYCTKHYNTGKFTCIEVKFHLERQMGYYLIQMYIPSLLIVILSWVSFWINMDAAPARVALGITTVLTMTTQSSGSRASLPKVSYVKAIDIWMAVCLLFVFAALLEYAAVNFVSRQHKEFLRLRRRQKRQNKEEDVTRESRFNFSGYGMGHCLQVKDGTAVKATPANPLPQPPKDADAIKKKFVDRAKRIDTISRAAFPLAFLIFNIFYWITYKIIRHEDVHKK

SEQ ID NO: 511 - DNA, 557 bp, Rattus norvegicus
  ref <308>: DATABASE ACCESSION NUMBER: EMBL / AI172452
  ref <309>: DATABASE ENTRY DATE: 2000-03-03
gccaacatgtactccagtttaacagtttcacgcagaagttggttagtgcttgggcttcggaagcctatactccgcaggaagcagatgtaacaggatcaggagttcaagaccagcctgggctgcaagtgagttaaaggccagctcaggatacatggacctgttgtgagccaccatggcagaaaccaaaaaagggttttaagccggtttccagagaagcaccgcctatcatatttgccacaccgaccaaactgacctccagtgtgacagcatatgactatgctgggaagaataaagttccagagctacagagattcttccagaaggctgacggtgtgcccatccacctgaaacgaggccttccggaccaaatgctttaccggaccaccatggctctcacagtgggagggaccatctactgcctgatcgccctctacatggcctcgaagcccaaaaacaaatgaatttgcctgtggaggactggtttactttgtgacacaaaccctttgaattcattttttccccccttggatagtctccttaacattttgcaaacaaag

SEQ ID NO: 512 - DNA, 1145 bp, Homo sapiens
  ref <308>: DATABASE ACCESSION NUMBER: Refseq / NM_004718
  ref <309>: DATABASE ENTRY DATE: 2002-05-16
cttctctggggcggtcgcgttggcagcggatgcgggaagccggactctgggcgtcatgtactacaagtttagtggcttcacgcagaagttggcaggagcatgggcttcggaggcctatagcccgcagggattaaagcctgtggtttccacagaagcaccacctatcatatttgccacaccaactaaactgacctccgattccacagtgtatgattatgctgggaaaaacaaagttccagagctacaaaagtttttccagaaagctgatggtgtgcccgtctacctgaaacgaggcctgcctgaccaaatgctttaccggaccaccatggcgctgactgtgggagggaccatctactgcctgatcgccctctacatggcttcgcagcccaaaaacaaatgagttaggctgcagaggactggtttgttttttggcataaaccctttgaagttcctttttcattgttaaattaaaatttttttttttacttggatggcttaacatttttgcaagaaaaataggaagatatgaagatgatgttttggtttgtttatgaaatgcatatggcttgtcagagctcattcgacagttaaagccattgtttaaagaaatggtgctttgctctgtgtttgtgctcctgatttccctggaggttctggatgaaggctgaacacaggcttgttaatgtcagtctgtgctgaggacctcagggacttgaggttgcatttttgagcatggggtgcaggagcctttctggatttggatgtggctatggaaagaacacagaagccaaggtcatgtgcatgaaatgaggagtttgagttagtcacctcggggattttttccattttgcagtaaaatgttaaattaatgtagcctgcctctatttgttgggcaggtaatttcaaagggttatttgcctcatctcctatctttagtgaaatcttatgtgtaattattccaccgtgggaacagagaatacctgtttagtgttgcactttagactggtgtctgttttgttaatgcagctgtgccacaaattctcctttatcttttaaaaatgttatagctttaaattttgatttattttgactgtggaataaatacatgaatgaaaaaaaaaaaaaaaaaaaaaaaaaaaaaaaaa

SEQ ID NO: 513 - protein, 114 aa, Homo sapiens
  ref <308>: DATABASE ACCESSION NUMBER: Refseq / NP_004709
  ref <309>: DATABASE ENTRY DATE: 2002-05-16
MYYKFSGFTQKLAGAWASEAYSPQGLKPVVSTEAPPIIFATPTKLTSDSTVYDYAGKNKVPELQKFFQKADGVPVYLKRGLPDQMLYRTTMALTVGGTIYCLIALYMASQPKNK

SEQ ID NO: 514 - DNA, 1386 bp, Rattus norvegicus
  ref <308>: DATABASE ACCESSION NUMBER: Refseq / NM_013156
  ref <309>: DATABASE ENTRY DATE: 2003-01-14
aattccgcggcgacctccggggatccgagtttgcagactacgtgtgtgcgcagctagccacctcaggtgtttgaaccatgacccctttactcctcctggctgtcctctgcttgggaacagccttagccactccaaaatttgatcaaacgtttaatgcacagtggcaccagtggaagtccacacacagaagactgtatggcacgaatgaggaagagtggaggagagcagtgtgggagaagaacatgaggatgatccagctacacaatggggagtacagcaacgggaagcacggctttaccatggagatgaacgccttcggtgacatgaccaatgaggaattcaggcagatagtgaatggctatcgccaccagaagcacaagaagggaaggttatttcaggaacctctgatgctgcagatccccaagactgtggactggagagaaaagggttgtgtgactcctgtgaagaatcagggccagtgtggttcttgctgggcttttagcgcatcgggttgcctagaaggacagatgttccttaagactggcaaactgatctcactgagtgaacagaaccttgtggactgttctcacgatcaaggcaatcagggctgtaatggaggcctgatggattttgctttccagtacattaaggaaaatggaggtctggactcagaggagtcttatccctatgaagcaaaggatggatcttgtaaatacagagctgagtatgctgtggctaacgacacagggtttgtggatatccctcagcaagagaaagccctcatgaagcctgtagcgacggtggggcctatttctgttgccatggatgcaagccatccgtctctccagttctatagttcaggtatctactatgaacccaactgtagcagcaaggacctcgaccatggggttctggtggttggctatggttatgaaggaacagattcaaataaggataaatactggcttgtcaaaaacagctggggtaaagaatggggtatggatggctacatcaaaatagccaaagaccggaacaaccactgcggacttgccaccgcagccagctatcctatcgtgaattgatggacagcgataataaggactgacggacactacatccgaaggagttcatcttaaaactgaccaaacccgtctctgagtgagaccatggtacttgaatcgttcaggatccaagtcacgatttaaattctgttgacatttttacatgggttaaatgttaccactacttaaaactcctgttataaacagctttataatattggacacttaatgcttaattctgattctggaatatttgttttataaaagttgtataaaactttctttaccttttaaaaataaattttagctcagtgcaaaaaaaaaa

SEQ ID NO: 515 - protein, 334 aa, Rattus norvegicus
  ref <308>: DATABASE ACCESSION NUMBER: Refseq / NP_037288
  ref <309>: DATABASE ENTRY DATE: 2003-01-14
MTPLLLLAVLCLGTALATPKFDQTFNAQWHQWKSTHRRLYGTNEEEWRRAVWEKNMRMIQLHNGEYSNGKHGFTMEMNAFGDMTNEEFRQIVNGYRHQKHKKGRLFQEPLMLQIPKTVDWREKGCVTPVKNQGQCGSCWAFSASGCLEGQMFLKTGKLISLSEQNLVDCSHDQGNQGCNGGLMDFAFQYIKENGGLDSEESYPYEAKDGSCKYRAEYAVANDTGFVDIPQQEKALMKPVATVGPISVAMDASHPSLQFYSSGIYYEPNCSSKDLDHGVLVVGYGYEGTDSNKDKYWLVKNSWGKEWGMDGYIKIAKDRNNHCGLATAASYPIVN

SEQ ID NO: 516 - DNA, 620 bp, Rattus norvegicus
  ref <308>: DATABASE ACCESSION NUMBER: Refseq / NM_033234
  ref <309>: DATABASE ENTRY DATE: 2001-12-28
tgcttctgacatagttgtgttgactcacaaactcagaaacagacaccatggtgcacctgactgatgctgagaaggctgctgttaatggcctgtggggaaaggtgaaccctgatgatgttggtggcgaggccctgggcaggctgctggttgtctacccttggacccagaggtactttgatagctttggggacctgtcctctgcctctgctatcatgggtaaccctaaggtgaaggcccatggcaagaaggtgataaacgccttcaatgatggcctgaaacacttggacaacctcaagggcacctttgctcatctgagtgaactccactgtgacaagctgcatgtggatcctgagaacttcaggctcctgggcaatatgattgtgattgtgttgggccaccacctgggcaaggaattcaccccctgtgcacaggctgccttccagaaggtggtggctggagtggccagtgccctggctcacaagtaccactaaacctcttttcctgctcttgtctttgtgcaatggtcaattgttcccaagagagcatctgtcagttgttgtcaaaatgacaaagacctttgaaaatctgtcctactaataaaaggcatttactttcactgc

SEQ ID NO: 517 - protein, 147 aa, Rattus norvegicus
  ref <308>: DATABASE ACCESSION NUMBER: Refseq / NP_150237
  ref <309>: DATABASE ENTRY DATE: 2001-12-28
MVHLTDAEKAAVNGLWGKVNPDDVGGEALGRLLVVYPWTQRYFDSFGDLSSASAIMGNPKVKAHGKKVINAFNDGLKHLDNLKGTFAHLSELHCDKLHVDPENFRLLGNMIVIVLGHHLGKEFTPCAQAAFQKVVAGVASALAHKYH

SEQ ID NO: 518 - DNA, 585 bp, Homo sapiens
  misc_feature (1)..(585): n=a, c, g or t
  ref <308>: DATABASE ACCESSION NUMBER: EMBL / BG311786
  ref <309>: DATABASE ENTRY DATE: 2002-03-15
ntgtgttgactttcacaaccccagtaaacatacatcatggtgcacctgactgatgctgagaaggctgctgtctctggcctgtggggaaaggtgaacgccgatgaagttggtggtgaggccctgggcagattgctggttgtctacccttggacccagcggtactttgatagctttggagacctatcctctgcctctgctatcatgggtaatgccaaagtgaaggcccatggcaagaaagtgataactgcctttaacgatggcctgaatcacttggacagcctcaagggcacctttgccagcctcagtgagctccactgtgacaagctgcatgtggatcctgagaacttcaggctcctgggcaatatgatcgtgattgtgctgggccaccacctgggcaaggatttcacccccgctgcacaggctgccttccagaaggtggtggctggagtggccgctgccctggctcacaagtaccactaaaccccctttcctgctcttgcctgtgaacaatggttaattgttnccaagagagcatctgtcagttgttggcaaaatgataaagacatttgaaaatctgtcttctga

SEQ ID NO: 519 - DNA, 376 bp, Rattus norvegicus
  misc_feature (1)..(376): n=a, c, g or t
  ref <308>: DATABASE ACCESSION NUMBER: EMBL / H33001
  ref <309>: DATABASE ENTRY DATE: 2000-03-04
gggtaaatgggccatncggttctcaatgcccggtncctccggtcatttgagccggccacggggagcatcttgcaccaggcccaccgggaccctgactgaactctctccttgtttttgtctcccgccccaccagaaggtgatgcttccgtcgggagctgccttccggtggtttcagtgatttcagtgacggccgggaacccaaagctgccctctccgtgcaatgtcacagcccgcgtggtctccggcaagggantcgggcgaanacaaacggatgcacccgtctttagaaccaaaaatattctctcacagatttcattcctgnttttatatatatatattttttgttgtcgttttaacatctccacgtccctagtat

SEQ ID NO: 520 - DNA, 879 bp, Homo sapiens
  misc_feature (1)..(879): n=a, c, g or t
  ref <308>: DATABASE ACCESSION NUMBER: EMBL / AA203456
  ref <309>: DATABASE ENTRY DATE: 2000-03-03
gacagctgacgctgcagcagtttgcgcagtccacagagatgctgaagcgcgtggtgcaggagcatctcccgctgatgagcgaggcgggtgctggcctgcctgacatggaggctgtggcaggtgccgaagccctcaatggccagtccgacttcccctacctgggcgctttccccatcaacccaggcctcttcattatgaccccggcaggtgtgttcctggccgagagcgcgctgcacatggcgggcctggctgagtaccccatgcagggagagctggcctctgccatcagctccggcaagaagaagcggaaacgctgcggcatgtgcgcgccctgccggcggcgcatcaactgcgagcagtgcagcagttgtaggaatcgaaagactggccatcagatttgcaaattcagaaaatgtgaggaactcaaaaagaagccttccgctgctctggagaaggtgatgcttccgacgggagccgccttccggtggtttcagtgacggcggcggaactcaaagctgccctctccgtgcaatgtcactgctcgtgtggtctnagcacaggattcggcgaagaaaacggatgcaccgctttagaacaaaatattcttcaagatttatctgtgttataatatattttgtgtcgttacattcacgtcgtgataaaaaaaaaaaagtcttattagcgcgactattcctagtaggtattcgtgcatgcgggttacaggcctggaactgggccaatacgtgaacccttcgagggaatggaagccgcaaaccggccagaatgggcggggccaaaggtgtgcagacacgcgttttttttggcgcaaaagggttttccaaaaggcgggtttctagacccactttggaaaaaccccat

SEQ ID NO: 521 - DNA, 1052 bp, Rattus norvegicus
  ref <308>: DATABASE ACCESSION NUMBER: EMBL / S72505
  ref <309>: DATABASE ENTRY DATE: 2000-02-02
gcagcggggaccttattggactatctccccttaagtgggaagggcttagtcaaatgcagtaaagagctataaaacaccgagaactcttgatgtgttgtgaaacttagagggagcagctttttaacaagagaactcaagcaattgctgccatgccggggaagccagtccttcactatttcgatggcagggggagaatggagcccatccggtggctcctggctgcagctggagtagagtttgaagaacaatttctgaaaactcgggatgacctggccaggctaaggaatgatgggagtttgatgttccagcaagtgcccatggtggagattgatgggatgaagctggtgcagaccagagccattctcaactacattgccaccaaatacaacctctatgggaaggacatgaaggagagagccctcatcgacatgtatgcagaaggagtggcggatctggatgaaatagttctccattacccttacattccccctggggagaaagaggcaagtcttgccaaaatcaaggacaaagcaaggaaccgttactttcctgcctttgaaaaggtgttgaagagccatggacaagattatctcgttggcaataggctgagcagggctgatgtttacctagttcaagttctctaccatgtggaagagctggaccccagcgctttggccaacttccctctgctgaaggccctgagaaccagagtcagcaacctccccacagtgaagaagtttcttcagcctggcagccagaggaagccattagaggatgagaaatgtgtagaatctgcagttaagatcttcagttaattcaggcatctatggatacactgtacccacaaagccagccttcgaaagctttgcaacaatcgcatattttgactaaatgttgaccctacttattgggaggccaacacgttttctaatgcttctgtgttaattcatatagacatgactgatgaggaattgctgggatgctatttggttgtagttaaaatttgaaatcatgatcacttcctcagatattactttgaatctcaataaaaa

SEQ ID NO: 522 - DNA, 1742 bp, Rattus norvegicus
  ref <308>: DATABASE ACCESSION NUMBER: EMBL / S82383
  ref <309>: DATABASE ENTRY DATE: 2000-08-03
cggagacctgatttccagaagcagctgggtaggcaccatggccgggagcaccaccatcgaggcggtaaagcgcaagatccaggttctgcagcagcaggctgatgatgcggaggagagggccgagcgcctccagcgggaagtggagggagaaaggcgggcccgggagcaggctgaagctgaggtggcctccttgaaccgcaggatccagctggttgaagaggagctggaccgcgcccaggagccgcttgccactgctttgcagaagctggaggaagcggagaaggctgctgatgagagtgagagaggtatgaaggtgattgaaaaccgggctctaaaagatgaagaaaagatggagctccaggaaatccagctgaaggaagcaaagcacattgcagaagaggcagacaggaagtatgaagaggtggctcgtaagttggtgattattgaaggagacttggaacgcacggaggaacgcgccgagctggcagagtcccgttgccgagagatggatgagcagatcagactgatggaccagaacctgaagtgtctgagtgctgctgaagaaaagtactctcaaaaagaagacaagtatgaagaagaaataaagattcttactgataaactcaaggaggcggagacccgggctgagtttgctgaaagatcggtagccaaactggaaaagaccattgatgacttggaagataagctgaagtgcaccaaagaggagcatctctgtacacaaaggatgctggaccagaccctgctggacctgaacgagatgtagaccttccccatccctgccctgccctgctggccgctcctccctctgaccttgactccgcctgaggccagcctccctgaagctggcttgaaactgagggctgatctttttaactgaaggctgctttccctcctgccacccctcttacccctcttgtctttttcacaaaactgtgtcagcctcttcccagagttccagctggagggctgaacacctttgggaacaatatttaagggaatgtgagcacagcgcaaagtgtcctcaatgcagttgtgatatgcacattgtgattactttttgtcttagcaaccattttaacattccaagcacttgtcaggcttggagcagcacatcttagcctaatggataccgtctctccatggaggagaaacacaggaatgggcctgccttactgagagccagcagagcccaggcagactccactgtgggagacctcagtgctctgtaccaagtcttagccaaacaacagggattctaggaagttagccaaaaacaaaaaccattccggtctgtgaaggttttcagctttgatatctttgaacaactttacacttatttttagttttgactttttccgtccgatgtgaccaaataggagagtgagacatctgagacgcccccgcctcccagggccttgtgcatgttaggccagcgtgctaccgttcacccccagccctgagcccgaacttgtctcagctctacccctttcccaactgctcagaaatggatcatgatgccccttagtgttgtggtgacctcttagtgttcacctgcccccaagggagacggaaaaggaaattatgtttgtgcccactgatttagccacatgaaagtcatctcattgctctttcctgaagctgctgtctctaaagtgccatctctttgtgctttgtatcagtcagtgctggagaaatcttgaatagcttatgtttaaaaaaaa

SEQ ID NO: 523 - DNA, 4926 bp, Rattus norvegicus
  ref <308>: DATABASE ACCESSION NUMBER: Refseq / NM_013219
  ref <309>: DATABASE ENTRY DATE: 2003-01-14
gaattccggttttgcaccccaagccgaggactccggggaccctcctctcccaggcgccaccatgctggacccttcgtccagcgaagaggaatcggatgagatcctggaagaggagagcggcaaggaggtgctgggctcggccgcgtccggagcgcgcctgtctccaagccgcaccaacgagggctcggcgggcagcgccggcatggggggcagtggcgccggggccggggtgggcgccggcggcggtgggggtagcggcgcgagcagcggcggcggggccggggggctgcagcccagcagccgcgccggcggcggccggccctccagccccagcccgtcggtggtgagcgagaaggagaaggaagagttggagcggctgcagaaggaagaggaggagaggaagaagaggctgcagctgtacgtgttcgtgatgcgctgcattgcctaccccttcaacgccaagcagcccaccgacatggctcggcggccaaggaagatcagcaaacagcagctgcagactgtcaaggaccgattccaggctttcctcaatggggagacccaaatcgtggcagatgaagcctttatgaatgctgtccagagctactatgaggtgtttctcaagagtgaccgtgtggcccgcatggtacagagtgggggctgctcagccaacgactctcgggaggtcttcaagaaacacatcgagaagagggtacgcagcctacctgagattgatggcctcagcaaggagactgtgctaagctcctggatggctaagtttgacgccatctaccgtggtgaggaggaccccaggaagcagcaagcccggatgacagccagtgcagcttctgagttgattctgagcaaggaacagctctatgagatgttccagaacattcttgggatcaagaaatttgaacatcaactcctatataatgcgtgtcagctggacaatccagatgagcaggcagcccagatcagacgagagctggacggacgtctccaaatggcagaccaaatagccagggaacgcaaatttcctaagttcgtatccaaagaaatggaaaatatgtacatcgaggagctgaagtcctccgtcaacctactcatggccaacttggagagcatgccggtgtccaagggtggagagttcaagctgcagaaactgaaacgcagtcacaacgcgtccatcattgacatgggtgaggagagcgagaaccagctgtccaagtcggatgtcctgctgtccttctccttggaggttgtcatcatggaagtccaaggccttaagtccttggctccaaaccgaatcgtgtactgcacaatggaggtggagggtggagagaaacttcagactgatcaagcagaggcttctaaaccaacctggggcactcaaggcgacttctctacaacccacgcgctgccagctgttaaagtaaagctattcacagagagcactggtgtcctggccttggaagacaaggaactcgggcgggttatcctccatcccaccccaaacagccccaaacaatccgagtggcacaaaatgacagtctccaaaaactgccccgatcaagacctcaaaatcaaactcgctgtccgaatggataagcctcaaaacatgaagcactctgggtacttatggaccattggtaagaatgtgtggaagaggtggaagaaaaggttctttgtgttggtgcaggtcagccagtacacttttgccatgtgcagctatcgagaaaagaaagcagaacctcaggaactcctacagctggatggctacaccgtggattacaccgaccctcagccaggtttggagggtggccgagccttcttcaatgcagtcaaagaaggagacacggtgatatttgccagtgacgatgagcaagatcgaatcctgtgggtccaagctatgtacagggccaccgggcagtcgcacaaacctgtgccccctacccaggtgcagaagctcaagccaagggcggaaacgtgcctcagcatggatgcccccatctcccagttttacgcagatagagctcaaaagcatggcatggatgaatttatctcgtccaacccctgtaactttgaccacgcttccctctttgagatggtacagcggctgactttggatcacagactaaacgattcctattcttgcctgggctggttcagtcctggccaggtgtttgtgttagacgagtactgcgctcggaatggagtccgaggatgtcatcggcatctctgttaccttagagacttgctggaacgggcagaaaatggcgccatgatcgaccccacgcttcttcattacagctttgccttctgcgcatcccatgtccacgggaacaggcctgatggaatcggaactgtgactgttgaagaaaaagagcgctttgaagaaatcaaagagagactccgagttctgctggaaaatcaaattacacatttcaggtactgctttccgtttggtcgacctgaaggtgctttgaaagcgactctctcacttttggaacgggttttgatgaaagatattgtcactccagtaccccaagaggaggtcaaaactgtcatccgtaaatgcctagagcaggctgctctagtcaactactctcgcctatctgagtatgccaaaatcgaagaaaatgtaggccgcttaatcactcccgccaaaaagctcgaagacacaatccgtcttgctgaactagtcattgaagtgctgcaacaaaacgaagagcaccacgccgaggcctttgcgtggtggtcagacttaatggtggagcacgcggagacgttcctgtcactctttgcagtggacatggatgcagcattagaggtgcaacccccagacacgtgggacagtttcccactcttccagctgctgaatgactttctccgtacagactataacttgtgcaatggaaagtttcacaaacacctgcaggatctgttcgccccactcgttgttagatacgtggatctgatggagtcctcaattgcacaatctatccacaggggctttgagcgggagtcatgggaaccagtcaataacggatcgggtacatcagaagatttgttctggaaacttgatgcccttcagactttcatccgtgacctacactggcctgaggaagagtttggaaagcacttagagcagcggctaaaactaatggcaagcgacatgattgagtcctgcgtcaagagaaccaggattgcatttgaagttaagctgcaaaaaaccagtcgatcaacagattttcgagtcccacagtcaatatgcaccatgtttaatgttatggttgatgccaaagctcaatcaacaaaactttgcagcatggaaatgggccaggagcatcaataccattcaaaaatagacgaactaattgaagaaaccgttaaggaaatgatcacactcttggtggcaaagtttgtaactatattggaaggcgtactggcaaagttatccagatacgacgaggggactttgttttcttcgtttctgtcatttacggtgaaggcggcatctaagtatgtggacgtacctaaacccgggatggatgtggccgacgcctacgtgactttcgtccgccactctcaggatgtccttcgtgataaggtcaatgaggagatgtatatagaaaggttatttgatcaatggtacaacagctccatgaacgtcatctgcacctggctgaccgaccggatggacctccagcttcacatttatcagctgaaaacactaattaggatggtaaagaaaacctacagagatttccgattgcaaggggtcctggattccaccttaaacagcaagacctatgagaccattcgaaatcggctcactgtagaggaacgtaccgcgtccgtgagtgagggagggggcttgcaaggcatcagcatgaaggacagtgacgaggaagatgaagaagacgactagatcattctctgggtccaagagtccactgggatggagtcctgtaatcaatgcatgtctttagtctgttagttaaccccattagggaattttctgtcaaccaccatgcccatgagatgtttaccaatacagacaccattttagctgcgtggtaccaagattagcacattggtttaatgcaagactggcattacccaattcttaaacacagttccatggagagacacatagttcagctgctaggtgtgtcccttttgttagcagaacaaaacgatgcttcaccctgtgctccgtatgtactgataggaagcagacgtgggagccagtgtgtttccaagtctctgtttcacatatgtgggtatcaggtacttaaattagtacataaataaattaatttaagcacatagatctgcttggttttggtctccgttttgttctcatcccccgaaactgaaagcaatgggcgtttgtgtcctggcaaacacagctttgcatttttccttgtagtttccccccaccaccaaaaaagttaattattgattaacttggattaataataaagtgaattaattattttaattgtcatggtcaaggggccatgtgatcagacgtagcatcaagcaaggttcagaccaattgtcttctgtggaagtttatcctagtacatgtcacgttttctgtttcaataactgtatatgtaaaaaaaaagtatcgaaatgacaaccctagactataaatgtatttataataagatatggatatctcctccagtagactgtaaccatgatttccattattttgttccacactgtttttatatctgtcacgtacattgcactctgatctgtaactgagcgaccctggggtcctctgtagagctgtttctttctgtggaaagtagtggatccatcttgctttttgccttatataaaagcctacagttgtaaaagtgtggggaactgtggcttctcaataaacaattattcaaacgtcaaaaa

SEQ ID NO: 524 - protein, 1289 aa, Rattus norvegicus
  ref <308>: DATABASE ACCESSION NUMBER: Refseq / NP_037351
  ref <309>: DATABASE ENTRY DATE: 2003-01-14
MLDPSSSEEESDEILEEESGKEVLGSAASGARLSPSRTNEGSAGSAGMGGSGAGAGVGAGGGGGSGASSGGGAGGLQPSSRAGGGRPSSPSPSVVSEKEKEELERLQKEEEERKKRLQLYVFVMRCIAYPFNAKQPTDMARRPRKISKQQLQTVKDRFQAFLNGETQIVADEAFMNAVQSYYEVFLKSDRVARMVQSGGCSANDSREVFKKHIEKRVRSLPEIDGLSKETVLSSWMAKFDAIYRGEEDPRKQQARMTASAASELILSKEQLYEMFQNILGIKKFEHQLLYNACQLDNPDEQAAQIRRELDGRLQMADQIARERKFPKFVSKEMENMYIEELKSSVNLLMANLESMPVSKGGEFKLQKLKRSHNASIIDMGEESENQLSKSDVLLSFSLEVVIMEVQGLKSLAPNRIVYCTMEVEGGEKLQTDQAEASKPTWGTQGDFSTTHALPAVKVKLFTESTGVLALEDKELGRVILHPTPNSPKQSEWHKMTVSKNCPDQDLKIKLAVRMDKPQNMKHSGYLWTIGKNVWKRWKKRFFVLVQVSQYTFAMCSYREKKAEPQELLQLDGYTVDYTDPQPGLEGGRAFFNAVKEGDTVIFASDDEQDRILWVQAMYRATGQSHKPVPPTQVQKLKPRAETCLSMDAPISQFYADRAQKHGMDEFISSNPCNFDHASLFEMVQRLTLDHRLNDSYSCLGWFSPGQVFVLDEYCARNGVRGCHRHLCYLRDLLERAENGAMIDPTLLHYSFAFCASHVHGNRPDGIGTVTVEEKERFEEIKERLRVLLENQITHFRYCFPFGRPEGALKATLSLLERVLMKDIVTPVPQEEVKTVIRKCLEQAALVNYSRLSEYAKIEENVGRLITPAKKLEDTIRLAELVIEVLQQNEEHHAEAFAWWSDLMVEHAETFLSLFAVDMDAALEVQPPDTWDSFPLFQLLNDFLRTDYNLCNGKFHKHLQDLFAPLVVRYVDLMESSIAQSIHRGFERESWEPVNNGSGTSEDLFWKLDALQTFIRDLHWPEEEFGKHLEQRLKLMASDMIESCVKRTRIAFEVKLQKTSRSTDFRVPQSICTMFNVMVDAKAQSTKLCSMEMGQEHQYHSKIDELIEETVKEMITLLVAKFVTILEGVLAKLSRYDEGTLFSSFLSFTVKAASKYVDVPKPGMDVADAYVTFVRHSQDVLRDKVNEEMYIERLFDQWYNSSMNVICTWLTDRMDLQLHIYQLKTLIRMVKKTYRDFRLQGVLDSTLNSKTYETIRNRLTVEERTASVSEGGGLQGISMKDSDEEDEEDD

SEQ ID NO: 525 - DNA, 96 bp, Rattus norvegicus
  ref <308>: DATABASE ACCESSION NUMBER: EMBL / U20643
  ref <309>: DATABASE ENTRY DATE: 2000-03-04
gcagaacgaggttctggtgaccctagccgcgttccctccttagtcctttcgcctacccacccgcgtacccgacagacccaccccgtcctgtgccag

SEQ ID NO: 526 - DNA, 1684 bp, Rattus norvegicus
  ref <308>: DATABASE ACCESSION NUMBER: Refseq / NM_053752
  ref <309>: DATABASE ENTRY DATE: 2003-01-13
gctcctactgggcctgactttgctggtgagctccctgcaagctttggtgtgctttgagtgtggcaacctcaattctatggggatttgtaactttagaacagctgtatgttacgctcatcctggtgaggtttgtgcctcagttttaacctataaagatggaaaatttgtatatggaaaccagagctgtgctgagtgctccgggaggactgttgagcatggaagtctgatagtatcaacaaactgttgctcagccacctctttctgcaatatagtacgtccctgatacttaattgtatggaaggattttagtgctctttactgagtcttgacactggagcatgccagaaagaattatctactgaccgtgtctggagaacgcactaagatttctacatcatgttttctgactacgtgtacatcatatcatatgatcttcagtgatctgtaataaattgaaggccttacaaattttgcggctgccactgcaaccatggtctccggcagcagcggccttgccgccgcccgcctgctgtcgcgcaccttcctcctgcaacagaatggaatacggcacgggtcttacacagcctctcggaaaaatatctatattgataaaaatacgaaggttatttgccagggtttcacaggcaagcagggtacctttcacagccagcaggctttggagtacggcaccaaactcgtgggaggaaccactccagggaaagggggcaagaagcacctgggcttacctgtctttaatactgtgaaggaagccaaagagaaaacaggagcgacagcttctgtcatttatgtccctcctcctttcgctgctgccgccatcaatgaagcaattgacgcagagattcccttggttgtgtgcattactgaaggtattccgcagcaggacatgttgcgggtcaagcacaagctgacacgccaggggaagacgaggctaattgggccaaactgccccggtatcatcaaccctggagaatgcaaaatcggcatcatgcctggccacattcacaagaaaggaagaataggtatcgtgtccaggtccggtactctgacttatgaagcagttcaccaaacaacccaagttggattggggcagtccttgtgtattggcattggaggtgacccttttaatgggactaattttattgattgccttgacgtcttcctgaaggatccagctacagaaggcatcgtactgattggtgaaattggtggtcacgctgaagaaaatgccgcggagtttctgaaggagcataactcaggtccaaaggccaagcctgtagtgtccttcattgctggtataactgctcctcctggcagaaggatgggccacgcaggggcgattattgctggaggaaaaggtggcgccaaagagaagatctctgctcttcagagtgcgggtgtaattgtcagcatgtcccccgcacagctgggaacctgcatgtataaggaatttgaaaagaggaagatgctttgaaggacacgacatgaattttaaggctgtggaggaaatctcacagactggagagcccgtccagactgcagcccaggcacctgaccctggtctctcagtacaggggaagtccaggcatgttttagaatgtcctaaattgagctattttcacttactgtgtaacagagacagataataaatctatcatttgatttg

SEQ ID NO: 527 - protein, 333 aa, Rattus norvegicus
  ref <308>: DATABASE ACCESSION NUMBER: Refseq / NP_446204
  ref <309>: DATABASE ENTRY DATE: 2003-01-13
MVSGSSGLAAARLLSRTFLLQQNGIRHGSYTASRKNIYIDKNTKVICQGFTGKQGTFHSQQALEYGTKLVGGTTPGKGGKKHLGLPVFNTVKEAKEKTGATASVIYVPPPFAAAAINEAIDAEIPLVVCITEGIPQQDMLRVKHKLTRQGKTRLIGPNCPGIINPGECKIGIMPGHIHKKGRIGIVSRSGTLTYEAVHQTTQVGLGQSLCIGIGGDPFNGTNFIDCLDVFLKDPATEGIVLIGEIGGHAEENAAEFLKEHNSGPKAKPVVSFIAGITAPPGRRMGHAGAIIAGGKGGAKEKISALQSAGVIVSMSPAQLGTCMYKEFEKRKML

SEQ ID NO: 528 - DNA, 336 bp, Homo sapiens
  ref <308>: DATABASE ACCESSION NUMBER: EMBL / BM723664
  ref <309>: DATABASE ENTRY DATE: 2002-03-07
ggaaaaggtggcgccaaagagaagatctctgctcttcagagtgcgggtgtaattgtcagcatgtcccccgcacagctgggaacctgcatgtataaggaatttgaaaagaggaagatgctttgaaggacacgacatgaattttaaggctgtggaggaaatctcacagactggagagcccgtccagactgcagcccaggcacctgaccctggtctctcagtacaggggaagtccaggcacgttttagaatgtcctaaattgagctattttcacttactgtgtaacagagacagataataaatctatcatttgatttgaaaaaaaaaaaaaaaaaagac

SEQ ID NO: 529 - DNA, 202 bp, Rattus norvegicus
  ref <308>: DATABASE ACCESSION NUMBER: EMBL / U90261
  ref <309>: DATABASE ENTRY DATE: 1997-12-12
tagtaacggccgccagtgtgctggaattcggcttgtgaagcactacaagatccggctccgattgcagatggaggtgaatgacataaagaaagctctccaatcaaaatgaatacttgatcattgaaacgccacattattcaccccgagtgcaagactcagatattctgccccaatcaaaatcatcttgtgccaaaaaaaaaaa

SEQ ID NO: 530 - DNA, 1539 bp, Rattus norvegicus
  ref <308>: DATABASE ACCESSION NUMBER: Refseq / NM_030826
  ref <309>: DATABASE ENTRY DATE: 2002-11-05
gaattccgcgctacaggcatttttgagtccaatatcttctacagtatgtctgctgctcggctctccgcggtggcacagtccaccgtgtatgccttctccgcgcgcccgctggcgggcggggagcccgtgagcctgggctccctgcggggcaaggtgctgctcattgagaatgtcgcgtccctctgaggcaccacgacccgggactacaccgaaatgaatgatctgcagaagcgtctggggcctcgtggcctggtggtgctcggtttcccgtgcaatcagttcggacatcaggagaatggcaagaatgaagagattctgaattccctcaagtatgtccgacccggtggtgggttcgagcccaactttacattgtttgagaagtgcgaggtgaatggtgagaaggctcacccgctctttaccttcctgcggaatgccttgccagcacccagtgacgatcccactgcgctcatgaccgaccccaagtacatcatttggtccccggtgtgccgcaacgacatttcctggaactttgagaagttcctggtaggtccagacggtgttccagtgcgcagatacagcaggcgctttcgcaccatcgacatcgaacccgatatagaagccctgctgtccaagcagcctagcaacccctaaggcattcctggtatctgggcttggtgatggctggctgccctccggggggaggtttttccatgacggtgtttcctctaaatttacatggagaaacacctgatttccagaaaaatcccctcagatgggcgctggtctcgtccattcccgatgcctttacgcctaaagaaaggcggtttcaccactaagaataaagtgctgcggaattccgtgtcttcctgggcacgtttttgtatgaatattcaagaaggcaccccgattactccgtgtccctgctgctgagacttgctaagaaatatgaagccacactggagaagtgctgtgctgaaggcgatcctcctgcctgctacggcacagtgcttgcagaatttcacctcttgtagaagaacctaagaacttggtcaaactaactgtgagctttacgagaagcttggagagtatggattccaaaacgcattctggtccgatacacccagaaagcaccctaggtgtcgaccccaactctcgtggaggcagcaagaaacctgggaagagtgggcaccaagtgttgtacccttcctgaagctcagagactgccctgtgtggaagactatctgtctgccatcctgaaccgtctgtgtgtgctgcatgagaagaccccagtgagcgagaaggctcaccaagtgctgtagtgggtccctggtggaaagacggccatgtttctctgctctgacagttgacgagacatatgtccccaaagagtttaaagctgagaccttcaccttccactctgatatctgcacactcccagacaaggagaagcagataaagaagcaaacggctctcgctgagctggtgaaacacaagcccaaggccacagaagatcagctgaagacggtgatgggtgacttc

SEQ ID NO: 531 - protein, 201 aa, Rattus norvegicus
  misc_feature (1)..(201): Xaa=Unknown amino acid
  ref <308>: DATABASE ACCESSION NUMBER: Refseq / NP_110453
  ref <309>: DATABASE ENTRY DATE: 2002-11-05
MSAARLSAVAQSTVYAFSARPLAGGEPVSLGSLRGKVLLIENVASLXGTTTRDYTEMNDLQKRLGPRGLVVLGFPCNQFGHQENGKNEEILNSLKYVRPGGGFEPNFTLFEKCEVNGEKAHPLFTFLRNALPAPSDDPTALMTDPKYIIWSPVCRNDISWNFEKFLVGPDGVPVRRYSRRFRTIDIEPDIEALLSKQPSNP

SEQ ID NO: 532 - DNA, 661 bp, Homo sapiens
  ref <308>: DATABASE ACCESSION NUMBER: EMBL / BG562874
  ref <309>: DATABASE ENTRY DATE: 2001-04-11
cctccattaagttctctgtacctgctggaattgtcattccttcctttcaagcactgactgcacgctttgaggtagactctcccgtgtataatgccacttggagtgccagtttgaaaaacaaagcagattatgttgaaacagtcctggattccacatgcagctcaaccgtacagttcctagaatatgaactaaatgttttgggaacacacaaaatcgaagatggtacgttagcctctaagactaaaggaacatttgcacaccgtgacttcagtgcagaatatgaagaagatggcaaatatgaaggacttcaggaatgggaaggaaaagcgcacctcaatatcaaaagcccagcgttcaccgatctccagtaaactgaaggaatgctgtgaaaaacctctgttggaaaaatcccactgcattgccgaagtggaaaatgatgagatgcctgctgacttgccttcattagctgctgatttgttgaaagtaaggatgtttgcaaaaactatgctgaggcaaaggatgtcttcctgggcatgtttttgtatgaatatgcaagaaggcatcctgattactctgtcgtgctgctgctgagacttgccaagacatatgaaaccactctagagaagtgctgtgccgtgcagatcctcatgaatgctatgca

SEQ ID NO: 533 - DNA, 2088 bp, Rattus norvegicus
  ref <308>: DATABASE ACCESSION NUMBER: EMBL / X07648
  ref <309>: DATABASE ENTRY DATE: 1993-09-12
atgctgcccagcctggcactgctcctgctggccgcctggacggttcgggctctggaggtgcccactgatggcaatgccggtctgctggcagaaccccagatcgccatgttctgtggtaaactcaacatgcacatgaatgtgcagaatggaaaatgggagtcagacccatcagggaccaaaacctgcattggcaccaaggagggaatcctgcagtactgccaagaggtctaccctgaactgcagatcacaaacgtggtggaagccaaccagccagtgaccatccagaactggtgcaagcggggccgcaagcagtgcaagacgcacacccacatcgtgattccttaccggtgcctagttggtgagtttgtaagcgatgcccttctcgtgcccgacaagtgcaagtttctacaccaggagcggatggacgtttgtgagacccatcttcactggcatactgttgccaaagagacatgcagtgagaagagcactaacttgcacgactatggcatgctgctgccctgtggcatcgacaagttccgaggggtcgagttcgtgtgctgcccgttggcggaggagagcgacagcatcgattctgcggacgcagaggaggacgactccgatgtctggtggggtggagcggacacagactatgctgatggcggtgaagacaaagtcgtagaagtagccgaagaggaggaagtggccgatgttgaggaagaagaagctgaggatgacgaggatgtggaggatggggatgaggtggaggaggaggccgaggagccctacgaagaggccacagagagaacaaccagcattgccaccactaccacaactaccactgagtctgtggaggaggtagtccgagttcccacgacggcagccagcacccctgacgcagtcgacaagtacctggagacccccggagatgagaacgagcacgcccatttccagaaagccaaagagaggttggaagccaagcaccgagagagaatgtcccaggtcatgagagaatgggaggaggcagaacgtcaagccaagaatttgcccaaagctgacaagaaggccgttatccagcatttccaggagaaagtggaatctctggaacaggaagcagccaacgagaggcagcagcttgtagagacacacatggccagagttgaagccatgctcaatgatcgccgtcgcctggccctcgagaattacatcaccgcactgcaggcggtgcctccaaggcctcatcatgtgttcaacatgctgaagaagtacgtccgtgcagagcagaaggacagacagcacaccctaaagcattttgaacatgtgcgcatggtggaccccaagaaagctgctcagatccggtcccaggttatgacacacctccgtgtgatctacgagcgcatgaaccagtctctgtccctgctctacaacgtccctgccgtggctgaggagattcaagatgaagttgacgagctgcttcagaaggagcagaactactccgacgacgtcttagccaacatgatcagtgaacccagaatcagttacggcaacgatgctctcatgccttctttgactgaaacgaagaccactgtggagctccttcccgtgaatggcgaattcagcctggatgatctccaaccgtggcatccttttggggtggactctgtgccagccaatacagaaaatgaagttgagcctgtcgacgcccgccccgctgctgaccgaggactgaccactcgaccagggtctgggttgacaaacatcaagacagaagagatctcagaagtgaagatggatgcggagttcggacatgattcaggcttcgaagtccgccatcaaaaactggtgttctttgcagaagatgtgggttcaaacaaaggtgccatcattggactcatggtgggtggcgttgtcatagcaacagtgattgtcatcaccttggtgatgctgaagaagaaacagtacacatccatccatcatggcgtggtggaggttgacgctgctgtgaccccggaggagcgccacctctccaagatgcagcagaatggatatgagaatccaacatacaagttctttgagcagatgcagaactaa

SEQ ID NO: 534 - DNA, 1488 bp, Rattus norvegicus
  ref <308>: DATABASE ACCESSION NUMBER: EMBL / X12589
  ref <309>: DATABASE ENTRY DATE: 1993-09-12
atgacggtgatgtcaggggagaatgcagacgaggcttcggccgctccaggtcacccccaggatggcagctacccaaggcaggcggaccacgacgaccacgaatgctgcgagcgcgtggtgatcaacatctccgggctgcgcttcgagacgcagctcaagactctggcccagttccccaacacgctgctgggcaacccgaagaaacgcatgcgctactttgaccctctgaggaatgagtacttctttgaccgcaaccggcccagcttcgatgccatcctttattactaccagtcgggggggcgcctgcgcaggccggtcaacgtgcccctggacatgttctccgaggagattaaattttacgagttgggcgaggaggccatggagaagttccgggaagatgagggcttcatcaaggaagaggagcgccccctacccgagaaggagtaccagcgccaggtgtggctgctctttgagtatccggagagctcaggacctgcacgggttattgccattgtatccgtcatggtcatcctcatctccatagtcatcttttgcctggagactctccctgagctgaaggatgacaaggacttcacgggcaccattcaccgcatcgataacaccacagtcatctacacttctaacatcttcacagaccctttcttcattgtggaaaccttgtgtatcatctggttctcttttgagctggtggtgcgcttcttcgcctgccccagcaagacagacttctttaagaacatcatgaacttcatcgacattgtggccatcatcccttatttcattaccctgggcacagagatagctgagcaggaggggaatcagaagggcgagcaggccacttccctggccatcctcagggtcatccgcttggtaagggtgttcagaatcttcaaactctcccgccactccaagggccttcagatcctgggccagaccctcaaagctagtatgagggagttagggctgctcatctttttcctcttcattggcgtcatactgttttctagtgcagtgtactttgcggaggcggaagaagctgagtcgcacttctccagtatccccgatgctttctggtgggcggtggtgtccatgaccactgtgggatacggtgacatgtaccctgtgacaattggaggcaagatcgtgggctccttgtgtgccatcgctggtgtgctgacaattgccctgcccgtacctgtcattgtgtccaatttcaactatttctaccaccgagaaactgagggggaagagcaggctcagttgctccatgttagttctcctaacttagcctctgacagtgacctcagccgccgcagctcctctactatcagcaagtctgagtacatggagatcgaagaggacatgaacaatagcatagcccactacaggcaggctaatatcagaactggtaactgcaccgcaactgatcaaaactgcgttaataagagcaagctcctgaccgatgtttaa

SEQ ID NO: 535 - DNA, 2137 bp, Rattus norvegicus
  ref <308>: DATABASE ACCESSION NUMBER: EMBL / X57986
  ref <309>: DATABASE ENTRY DATE: 1991-08-02
gccgcgtcgcagctccgagactggccccggccgcgacgccgccgcgatgggcaacgccgccgccgccaagaagggcagcgagcaggagagcgtgaaagagttcctagccaaagccaaggaagatttcctgaaaaaatgggaagacccctctcagaatacagcccagttggatcattttgatagaatcaagacccttggcaccggctcctttgggcgagtgatgctcgtgaagcacaaggaaagtgggaaccactatgccatgaagatcttggacaagcagaaggtggtgaagctgaagcagatcgagcacactctgaatgagaagcgcatcctgcaggctgtcaacttcccgttcctggtcaaacttgaattctccttcaaggacaactcaaacttgtacatggtcatggagtacgtgcctggtggggagatgttctcccacttacggcggattgggaggttcagtgagccccacgcccgtttctacgcggcgcagatcgtcttgacttttgagtatctgcactccctggacctcatctaccgggacctgaagcccgagaaccttctcatcgaccagcagggctatattcaggtgacagacttcggttttgccaagcgtgtgaaaggccgaacttggaccttgtgtgggacccccgagtacttggcccccgagattatcttgagcaaaggctacaacaaagctgtggactggtgggctctcggggtcctcatctacgagatggctgctggttacccgcccttcttcgctgaccagcctatccagatctatgagaaaatcgtctctgggaaggtgcggttcccatcccacttcagctctgacttgaaggacctgcttcggaaccttctgcaggtggatctcaccaagcgctttgggaatctcaagaacggggtcaatgacatcaagaaccacaagtggtttgccacaactgactggatcgccatctatcagagaaaggtggaagctcccttcataccaaagtttaaaggccctggggacacgagtaactttgacgactatgaggaggaagagatccgggtctccatcaatgagaaatgtggcaaggagtttactgagttttaggggtgtgcttgtgccccatgggttttcttttcttttttttttttctttttctttctatttttttttctggttgggggtgggggggttggatcgaacagccagagggccctagagttccatgcatctaatttaacatccactccacacccccagggttaaggagagcaggaaagtcagatactggggaaggggcaacatcagctgctccccctctcccttcacctccaccctgcccttcctgttttcaatgaatttcttagctccagtcatactcaatcttgctggtgtatccaggggcgagtagggaaagagggccccaaattcagcctccacccctaccccagcactggatactaaggatgaacagtaaagccaaccttcccttccatgcagccctacctggaaagggagattttatgacctatacagagggctgcttgccagtggggttttttttttttttttcctcatttaaattaagttccaccagtgcctcccaccctccaaattgtcccacccctctcaaccccacccccactccctaaatccattctgatgagacccgggtagccaactgactctgtcaaggaaggaactgggcttggaacctcgccctgagctgctagcctcccggcccccctttccagtggtctcatgccaattgttctgtgcaccagcccccctaagaagcccctccccatcctgggcgctcacttctagcttagctgtcagctgtccatcacctcttgccgtgtgtccccactcactgcacccccaagtctgattgtgctttttctctcaatagaaaggtggggagctgctggggatatgaccccgtttatccctgtgtttatccctctcgtaacttctcccaaaaaggaggagctctcaggcctgggtgggggccccgggtgggcgagaggggccgttcaacctgtgtgcttcgaaggatgagacttcctcttgaacagtgtgctgttgtaaacatatttgaaaactattaccaataaagttttgttttaaaaaaaaaaaaaa

SEQ ID NO: 536 - DNA, 2309 bp, Rattus norvegicus; identical to SEQ ID NO: 354
  ref <308>: DATABASE ACCESSION NUMBER: Refseq / NM_032083
  ref <309>: DATABASE ENTRY DATE: 2003-01-13

SEQ ID NO: 537 - protein, 334 aa, Rattus norvegicus; identical to SEQ ID NO: 355
  ref <308>: DATABASE ACCESSION NUMBER: Refseq / NP_114472
  ref <309>: DATABASE ENTRY DATE: 2003-01-13

SEQ ID NO: 538 - DNA, 2315 bp, Homo sapiens; identical to SEQ ID NO: 356
  ref <308>: DATABASE ACCESSION NUMBER: Refseq / NM_001822
  ref <309>: DATABASE ENTRY DATE: 2002-11-05

SEQ ID NO: 539 - protein, 459 aa, Homo sapiens; identical to SEQ ID NO: 357
  ref <308>: DATABASE ACCESSION NUMBER: Refseq / NP_001813
  ref <309>: DATABASE ENTRY DATE: 2002-11-05

SEQ ID NO: 540 - DNA, 940 bp, Rattus norvegicus
  ref <308>: DATABASE ACCESSION NUMBER: Refseq / NM_019381
  ref <309>: DATABASE ENTRY DATE: 2002-11-05
ccgaggtgagaagccccgagcttggcctggctcccccgccccacggagcagccccactctgatctgattggttacctgtggacagcggaggctgcgctgaacagacttggagccatgaatatatttgatcggaagatcaactttgatgccctcttaaaattttcccacataactccctccacacagcagcacctaaagaaggtctatgccagttttgcactgtgcatgtttgtggcagcagcaggggcctatgtccatgtggtcacacgtttcatccaggctggcctgctctctgccctgggcgccctggccttgatgatttgcctgatggccacacctcacagccatgagacggagcagaagaggctgggactgctcgccgtcgccttccttacaggagttggcctgggacctgccctggagctgtgcattgccatcaaccccagcatcctccccacggccttcatgggcacggccatgatcttcacctgcttcagcctgagtgccctctacgccaggcgccggagttacctctttttgggaggtatcttgatgtcagccatgagcctcatgttcgtgtcctctctggggaaccttttctttggatccatttggctgttccaggcaaacctgtacatggggctgctggtcatgtgcggctttgtcctcttcgacactcagctcattattgaaaaggctgaacacggagacaaggattacatctggcactgcattgacctcttcttggacttcgttacactcttcaggaagctcatgctgatcttggccttcaatgagaaggacaaaaagaaagagaagaagtgacgtggtgatcgatcggcctctcccagctcgccttctctccctcagccccgtttctttgcacacatcacaggtgtcgtgtcccatgaaatgaaaagcatcagaaaaaaaaaaaaaa

SEQ ID NO: 541 - protein, 236 aa, Rattus norvegicus
  ref <308>: DATABASE ACCESSION NUMBER: Refseq / NP_062254
  ref <309>: DATABASE ENTRY DATE: 2002-11-05
MNIFDRKINFDALLKFSHITPSTQQHLKKVYASFALCMFVAAAGAYVHVVTRFIQAGLLSALGALALMICLMATPHSHETEQKRLGLLAVAFLTGVGLGPALELCIAINPSILPTAFMGTAMIFTCFSLSALYARRRSYLFLGGILMSAMSLMFVSSLGNLFFGSIWLFQANLYMGLLVMCGFVLFDTQLIIEKAEHGDKDYIWHCIDLFLDFVTLFRKLMLILAFNEKDKKKEKK

SEQ ID NO: 542 - DNA, 2755 bp, Rattus norvegicus
  ref <308>: DATABASE ACCESSION NUMBER: Refseq / NM_031780
  ref <309>: DATABASE ENTRY DATE: 2003-01-13
ggcgaggccgagagccgggcgcggccgcagttctctggagactgaggcactgctgaagctcagccaggtgacacccccgccccgtcgcagtagactttcctgcagacaggagcagggagagccatcctgtgtgtggagactgccggaagactggatcaccaggagagttctcaggacattatcaaggcactcatttctgtggctgcttccaggtaacaatggctgtgtgagtgtctaccatggcccaccgcaagcgccagagcactgcaagcagcatgttggaccacagggcccggccaggtcctatcccccatgaccaggagcctgagaatgaggatacagaactgcctctggagagctatgtacccacaggcctggagctaggcactctgagaccagacagccccacgcctgaggaacaggagtgccacaaccatagccctgatggggactccagctctgactatgtgaacaacacgtctgaggaggaggactatgacgagggcctccctgaggaggaggaaggtgtcacctactacatccgctattgtcctgaggatgacagctacctggagggcatggactgtaatggggaggagtacctagcccatggtgcacatcctgtggacactgatgagtgtcaggaggcggtagaggactggacggactcagtgggtcctcatactcatagccacggggctgaaaacagccaagagtatccagacagccacctgcctatcccagaggatgaccctactgtcctggaggtccatgaccaggaagaagatggccactactgtcccagcaaggagagctaccaggactattatcccccagagaccaatgggaacacgggtggcgcttctccctatcgcatgaggcgtggggatggggacctagaggagcaggaggaagacatcgaccagatagtggctgagatcaagatgagcctgagcatgaccagtattaccagtgccagtgaggccagccctgagcacatgcctgagctggaccctggggactccactgaggcctgttcacccagtgacactggccgtggacccagtaggcaagaagcgaggcccaagtcgctgaaccttccccctgaggttaagcactccggagacccccaaagaggactcaagaccaagaccaggaccccagaggagaggccaaagtggccccaagagcaggtttgcaatggcttggaacagccgaggaagcagcagcgctctgatctcaatggacccactgacaataacaacatcccagagacaaagaaggtggcctcgtttccaagctttgtagctgttccagggccctgtgagccagaagacctcatcgatggcatcatctttgcagccaactacctgggctccacccagctgctctctgagcgcaacccctccaaaaacatccgaatgatgcaagctcaagaagctgtcagcagggtcaagaggatgcagaaggctgctaagatcaagaaaaaagcgaattctgagggtgatgctcagacactgacagaagtagacctcttcatttctacccagaggatcaaagtcttaaacgctgacacacaggaaaccatgatggaccatgccttgcgcaccatctcctacattgcagacattgggaacatcgtggttctgatggccaggcgccgcatgcccaggtcagcctctcaggactgcatcgagaccacgcctggggcccaggaagggaagaagcagtacaagatgatctgtcacgtgttcgagtcagaggatgcccagctgatagcccagtcaattgggcaggccttcagtgtggcctaccaggagttcctgagggccaacggcatcaaccctgaggacctgagccagaaggaatacagtgatatcataaatacccaggagatgtataatgatgaccttatccacttctcaaactcggagaactgcaaggagctgcagctggagaagcacaagggtgagattttgggtgtggtggtcgtggagtcaggctggggctccatcctgcccactgtgatcctggcgaacatgatgaacggcggcccagcagctcgctcggggaagctgagcattggcgaccagatcatgtccatcaatggcaccagcctggtggggctgcccctcgctacctgccagggtatcatcaagggcctgaagaaccaaacacaggtaaagctcaacatcgtcagctgtcccccagtcaccacagtcctcatcaaacgtccagatctcaagtaccagctgggtttcagcgtgcaaaatggaatcatttgcagcctcatgagagggggtattgcagagcgaggtggtgtccgagtcggccaccgtatcatcgagatcaacggacagagtgtggtagccacagcccacgagaagatagtccaggctctgtctaactcagttggagagattcacatgaagaccatgcctgcagccatgttcaggctcctcacaggccaggagacaccgctgtacatctaggtacaccctgcctcgccaaggagcagggactccaggcagacccacctgggcccagaggagccagaagccaggacaaagccctgacccctgaccccgcagcccaaccaagaactctggctctcccccctccccacccccaagggtgtgtccttgtcacctaggttttttttttgtttgtttggttggttggtttgggtttttttttgtttgtttgtttgttttattttgttttgggttttgctaaaaaaaaaaaaaaaaaaaaa

SEQ ID NO: 543 - protein, 750 aa, Rattus norvegicus
  ref <308>: DATABASE ACCESSION NUMBER: Refseq / NP_113968
  ref <309>: DATABASE ENTRY DATE: 2003-01-13
MAHRKRQSTASSMLDHRARPGPIPHDQEPENEDTELPLESYVPTGLELGTLRPDSPTPEEQECHNHSPDGDSSSDYVNNTSEEEDYDEGLPEEEEGVTYYIRYCPEDDSYLEGMDCNGEEYLAHGAHPVDTDECQEAVEDWTDSVGPHTHSHGAENSQEYPDSHLPIPEDDPTVLEVHDQEEDGHYCPSKESYQDYYPPETNGNTGGASPYRMRRGDGDLEEQEEDIDQIVAEIKMSLSMTSITSASEASPEHMPELDPGDSTEACSPSDTGRGPSRQEARPKSLNLPPEVKHSGDPQRGLKTKTRTPEERPKWPQEQVCNGLEQPRKQQRSDLNGPTDNNNIPETKKVASFPSFVAVPGPCEPEDLIDGIIFAANYLGSTQLLSERNPSKNIRMMQAQEAVSRVKRMQKAAKIKKKANSEGDAQTLTEVDLFISTQRIKVLNADTQETMMDHALRTISYIADIGNIVVLMARRRMPRSASQDCIETTPGAQEGKKQYKMICHVFESEDAQLIAQSIGQAFSVAYQEFLRANGINPEDLSQKEYSDIINTQEMYNDDLIHFSNSENCKELQLEKHKGEILGVVVVESGWGSILPTVILANMMNGGPAARSGKLSIGDQIMSINGTSLVGLPLATCQGIIKGLKNQTQVKLNIVSCPPVTTVLIKRPDLKYQLGFSVQNGIICSLMRGGIAERGGVRVGHRIIEINGQSVVATAHEKIVQALSNSVGEIHMKTMPAAMFRLLTGQETPLYI

SEQ ID NO: 544 - DNA, 3627 bp, Homo sapiens
  ref <308>: DATABASE ACCESSION NUMBER: Refseq / NM_005503
  ref <309>: DATABASE ENTRY DATE: 2003-01-15
atttacgcgttgctgaatctcctgtggacaaaccaccaataggccaggactgtcctgtggacagacggggtgagcctcttcttgtgtctggagattctgaaaagatttgatcaccaggagatttttcgggacattaccaaaccactcattttagtggctgcctccgggtgatgatggctgtgtgaacgactgccatggcccaccggaagcttgagagcgtggggagcggcatgttggaccatagggtgagaccaggtcctgtccctcacagccaggagcccgagagcgaggacatggagctgcccttggagggctatgtgcccgagggcctggagctggctgccctgcggccagagagccccgcgccagaggaacaggagtgccacaaccacagccccgatggggactccagctctgactacgtgaacaacacctctgaggaggaggactatgacgagggcctccctgaggaggaggagggcatcacctactacatccgctactgccctgaggacgacagctacctagagggcatggactgcaacggggaggagtacctggcccacagtgcacaccctgtggacactgatgagtgccaggaggcggtggaggagtggacggactcggcgggcccgcacccccacggccacgaggctgaaggcagccaggactacccagacggccaactgcccattccggaggatgagccctccgtccttgaggcccatgaccaggaagaagatggtcactactgtgccagcaaagagggctaccaggactactaccccgaggaggccaacgggaacaccggcgcctccccctaccgcctgaggcgtggggatggggacctggaggaccaggaggaggacattgaccagatcgtggcagagatcaagatgagtctgagcatgaccagcatcaccagcgccagtgaggccagccccgagcatgggcctgagccagggcctgaggactctgtagaggcctgcccacccatcaaggccagctgcagccccagcaggcacgaggcgaggcccaagtcgctgaacctccttcccgaggccaagcaccccggagacccccagagaggcttcaagcccaagaccaggaccccagaagagaggctgaagtggccccacgagcaggtttgcaatggtctggagcagccaaggaagcagcagcgctctgatctcaatggacctgttgacaataacaacattccagagacaaagaaggtggcatcatttccaagttttgtggctgttccagggccctgcgaaccagaagacctcatcgacgggatcatctttgctgccaattacctggggtccacccagctgctatcagaacggaacccttccaaaaacatcagaatgatgcaagcgcaggaggccgtcagccgggtcaagaggatgcaaaaggctgctaagatcaagaaaaaagcgaattctgagggggatgcccagacgctgacggaagtggacctcttcatttccacccagaggatcaaggttttaaatgcagacacgcaggaaaccatgatggaccacgccttgcgtaccatctcctacatcgccgacattgggaacattgtagtgctgatggccagacgccgcatgccccggtcagcctctcaggactgcatcgagaccacgcccggggcccaggaaggcaagaagcagtataagatgatctgccatgtgttcgagtcggaggatgcccagctcatcgcccagtctatcggccaggccttcagcgtggcctaccaggagttcctgcgagccaatggcatcaaccccgaagacttgagccagaaggaatacagcgacatcatcaacacccaggagatgtacaacgacgacctcatccacttctcaaactcggagaactgcaaggagctgcagctggagaagcacaagggcgagatcctgggcgtggtggtggtggagtcgggctggggctccatcctgcccacggtgatcctggccaacatgatgaatggcggcccggctgcccgctcggggaagctgagcatcggggaccagatcatgtccatcaatggcaccagcctggtggggctgcccctcgccacctgccaaggcatcatcaagggcctgaagaaccagacacaggtgaagctcaacattgtcagctgtcccccggtcaccacggtccttatcaagcggccagacctcaagtaccagctgggcttcagcgtgcagaatggaattatctgcagcctcatgagagggggcattgctgagcgagggggcgtccgtgtgggccaccgcatcatcgagatcaacgggcagagcgtggtggccacagcccacgagaagatagtccaagctctgtccaactcggtcggagagatccacatgaagaccatgcccgccgccatgttcaggctcctcacgggtcaggagaccccgctgtacatctaggccaccccagcctggccacgcagccaggacaccgggcagggccgcccgggcccagaggagctgggagccgggccgcagacttgaccccgacgccacagcccagccacggacgctggctccccaaagggtgtgccctcaccacccacttgatttttttcattttgccaaaaaggggtatgtctttatcaaaggagagtcacagaacaaatgtttgtttgtaaagcgttccaagtattttgccacgttctggactgtcttctccctgcacaagccagggtgtgtctcggtagctgtgcgtggtgtggagtgtgtgtctttcctccctgaagctgtgcggagcgaactggcgcctccgagggacgcggctcccggggcagggcagccgtcacccctgcctcccgcccccttggctgggacgtctggggtcctgtggggcccccacaatggtcccaaacagctgcctctgccactgactgcagggacacgggcagcctggctcccaggacacgacttgtaatgaaagtttggggacatgtgattgattgattgattgattgtaaataaaggatgatggccacaacatgaaaactccatatttatttagatgctattattactgtttggacttttattttggcaggcttttttccagactctagggttttccaatgtgactaatgaccacacctgcctctcccgtcgtctcttctgggcaccctcccacccggctgcatacccgggcagggctcccacagagacaaggagggcacaggtgtctgccccctctttaaaatcgatctacacacatccacgcacatgcgaccccgaggaaacgaaacccactctagaaaacgcgaccttggccgcacctaaagcagccagccgtgagtgcagaccccttggccagcgtggcgcagtggccctgagcagtagtggcatgtgtgtagatcaagtcggatctagtccagctcggttcattagcgatccatgtaatctgacgtcatcttgtctcgaagtctctttttttggcccaggccttgaagaatacactgtgacttaagaagccttaccacgcagtaactaaagctttaggatgactgtattcgaggagtgccgtgtgttgcatgcagctacccgtaggaagacttcgcgcatatcactaataaacctgaagtcgtgatga

SEQ ID NO: 545 - protein, 749 aa, Homo sapiens
  ref <308>: DATABASE ACCESSION NUMBER: Refseq / NP_005494
  ref <309>: DATABASE ENTRY DATE: 2003-01-15
MAHRKLESVGSGMLDHRVRPGPVPHSQEPESEDMELPLEGYVPEGLELAALRPESPAPEEQECHNHSPDGDSSSDYVNNTSEEEDYDEGLPEEEEGITYYIRYCPEDDSYLEGMDCNGEEYLAHSAHPVDTDECQEAVEEWTDSAGPHPHGHEAEGSQDYPDGQLPIPEDEPSVLEAHDQEEDGHYCASKEGYQDYYPEEANGNTGASPYRLRRGDGDLEDQEEDIDQIVAEIKMSLSMTSITSASEASPEHGPEPGPEDSVEACPPIKASCSPSRHEARPKSLNLLPEAKHPGDPQRGFKPKTRTPEERLKWPHEQVCNGLEQPRKQQRSDLNGPVDNNNIPETKKVASFPSFVAVPGPCEPEDLIDGIIFAANYLGSTQLLSERNPSKNIRMMQAQEAVSRVKRMQKAAKIKKKANSEGDAQTLTEVDLFISTQRIKVLNADTQETMMDHALRTISYIADIGNIVVLMARRRMPRSASQDCIETTPGAQEGKKQYKMICHVFESEDAQLIAQSIGQAFSVAYQEFLRANGINPEDLSQKEYSDIINTQEMYNDDLIHFSNSENCKELQLEKHKGEILGVVVVESGWGSILPTVILANMMNGGPAARSGKLSIGDQIMSINGTSLVGLPLATCQGIIKGLKNQTQVKLNIVSCPPVTTVLIKRPDLKYQLGFSVQNGIICSLMRGGIAERGGVRVGHRIIEINGQSVVATAHEKIVQALSNSVGEIHMKTMPAAMFRLLTGQETPLYI

SEQ ID NO: 546 - DNA, 663 bp, Rattus norvegicus
  ref <308>: DATABASE ACCESSION NUMBER: EMBL / AA892789
  ref <309>: DATABASE ENTRY DATE: 2000-03-03
tttactgtgtttgggcttggcctacctgtagctttagggtgaagggaaggggccagcgttggtggaccccacacatccatgtgcctggctttggccaagcaggagaggtggtcctaccacaggctttgacttgcctccctgtaccccaggtgagcataaccttgggggccaacagtctgaatgtatctttctccccattttaacctgagctgcctaatgcatagttgggtaaggggtgggacccagggctgaattgtggatcccagggaaagtgccatgcctaggagtgattgtcacctcggtggagcctgactccttcttggtttttgccatataagcacttacacaaagaagctcttgggtgttggggctcctactgccttggctgccctctctctctcccctccctgcctgtgtcgtttttctttgtctgctgtccctgaaggagatggccaccctttgagcctaagagagctgttttaggcagatcctctacttggggcttttctggagctgctgatggatagtatctgtccagggaccttgtttcaaagggaatgggcggccagcaaggcatccccacagctactaagaacgttttcttgtttttaaaccatcacatcttcatttcacattggaataaagtgagtttttgaaacctgc

SEQ ID NO: 547 - DNA, 568 bp, Rattus norvegicus
  ref <308>: DATABASE ACCESSION NUMBER: EMBL / AA892859
  ref <309>: DATABASE ENTRY DATE: 2000-03-03
ccacaccaagacacgggcagtgatgaactttgtggtccgctaccggccagatgagcagccctcacttcggccacaccatgactcgtccaccttcacgctcaacgttgccctcaatcacaagggtgtagattatgagggaggtggctgccgcttcctgaggtacgactgcagagtctcatccccgaggaagggctgggctctcctgcaccctggtcgcctcacacactaccacgaggggctgcccaccaccaggggaactcgatacatcatggtgtccttcgttgacccctgacactcaatcagtctgccaaaccttctctgccactgtgccttgttgggccacctgggttgtcattctcatctcctgagtgtgtctatgtgcctgggacagaatgtgctggccccaacagccctcccaggaggtccctagagtcttctattttcccattgacccttctgagggtcccctgcctgataaattattaagcttcctcagcctcactttcaataaaaggatgtttgtaaaaaaaaaaaaaaaaaaaaaaaaaaaaaaaaattttggcggccg

SEQ ID NO: 548 - DNA, 2852 bp, Homo sapiens
  ref <308>: DATABASE ACCESSION NUMBER: Refseq / NM_001084
  ref <309>: DATABASE ENTRY DATE: 2003-01-08
ggcacgagggcttccacatgtgtcaagcggctggctcagcccagagtccctgtctcccgcccgccggcccgagccgccgcccctcccccgcctcccgtgcgcccgggacaatcctcgccttgtctgtggcgccggcatctggagctttctgtagcctccggatacgcctttttttcagggcgtagccccagccaagctgctccccgcggcggccgcacagcagcccgagcgccccctttccggagctcccctccggagctgggatccaggcgcgtagcggagatcccaggatcctgggtgctgtctgggcccgctccccaccatgacctcctcggggcctggaccccggttcctgctgctgctgccgctgctgctgccccctgcggcctcagcctccgaccggccccggggccgagacccggtcaacccagagaagctgctggtgatcactgtggccacagctgaaaccgaggggtacctgcgtttcctgcgctctgcggagttcttcaactacactgtgcggaccctgggcctgggagaggagtggcgagggggtgatgtggctcgaacagttggtggaggacagaaggtccggtggttaaagaaggaaatggagaaatacgctgaccgggaggatatgatcatcatgtttgtggatagctacgacgtgattctggccggcagccccacagagctgctgaagaagttcgtccagagtggcagccgcctgctcttctctgcagagagcttctgctggcccgagtgggggctggcggagcagtaccctgaggtgggcacggggaagcgcttcctcaattctggtggattcatcggttttgccaccaccatccaccaaatcgtgcgccagtggaagtacaaggatgatgacgacgaccagctgttctacacacggctctacctggacccaggactgagggagaaactcagccttaatctggatcataagtctcggatctttcagaacctcaacggggctttagatgaagtggttttaaagtttgatcggaaccgtgtgcgtatccggaacgtggcctacgacacgctccccattgtggtccatggaaacggtcccactaagctgcagctcaactacctgggaaactacgtccccaatggctggactcctgagggaggctgtggcttctgcaaccaggaccggaggacactcccgggggggcagcctcccccccgggtgtttctggccgtgtttgtggaacagcctactccgtttctgccccgcttcctgcagcggctgctactcctggactatccccccgacagggtcacccttttcctgcacaacaacgaggtcttccatgaaccccacatcgctgactcctggccgcagctccaggaccacttctcagctgtgaagctcgtggggccggaggaggctctgagcccaggcgaggccagggacatggccatggacctgtgtcggcaggaccccgagtgtgagttctacttcagcctggacgccgacgctgtcctcaccaacctgcagaccctgcgtatcctcattgaggagaacaggaaggtgatcgcccccatgctgtcccgccacggcaagctgtggtccaacttctggggcgccctgagccccgatgagtactacgcccgctccgaggactacgtggagctggtgcagcggaagcgagtgggtgtgtggaatgtaccatacatctcccaggcctatgtgatccggggtgataccctgcggatggagctgccccagagggatgtgttctcgggcagtgacacagacccggacatggccttctgtaagagctttcgagacaagggcatcttcctccatctgagcaatcagcatgaatttggccggctcctggccacttccagatacgacacggagcacctgcaccccgacctctggcagatcttcgacaaccccgtcgactggaaggagcagtacatccacgagaactacagccgggccctggaaggggaaggaatcgtggagcagccatgcccggacgtgtactggttcccactgctgtcagaacaaatgtgtgatgagctggtggcagagatggagcactacggccagtggtcaggcggccggcatgaggattcaaggctggctggaggctacgagaatgtgcccaccgtggacatccacatgaagcaggtggggtacgaggaccagtggctgcagctgctgcggacgtatgtgggccccatgaccgagagcctgtttcccggttaccacaccaaggcgcgggcggtgatgaactttgtggttcgctaccggccagacgagcagccgtctctgcggccacaccacgactcatccaccttcaccctcaacgttgccctcaaccacaagggcctggactatgagggaggtggctgccgcttcctgcgctacgactgtgtgatctcctccccgaggaagggctgggcactcctgcaccccggccgcctcacccactaccacgaggggctgccaacgacctggggcacacgctacatcatggtgtcctttgtcgacccctgacactcaaccactctgccaaacctgccctgccattgtgcctttttagggggcctggcccccgtcctgggagttgggggatgggtctctctgtctccccacttcctgagttcatgttccgcgtgcctgaactgaatatgtcaccttgctcccaagacacggccctctcaggaagctcccggagtccccgcctctctcctccgcccacaggggttcgtgggcacagggcttctggggactccccgcgtgataaattattaatgttccgcagtctcactctgaataaaggacagtttgtaaaaaaaaaaaaaaaaaa

SEQ ID NO: 549 - protein, 738 aa, Homo sapiens
  ref <308>: DATABASE ACCESSION NUMBER: Refseq / NP_001075
  ref <309>: DATABASE ENTRY DATE: 2003-01-08
MTSSGPGPRFLLLLPLLLPPAASASDRPRGRDPVNPEKLLVITVATAETEGYLRFLRSAEFFNYTVRTLGLGEEWRGGDVARTVGGGQKVRWLKKEMEKYADREDMIIMFVDSYDVILAGSPTELLKKFVQSGSRLLFSAESFCWPEWGLAEQYPEVGTGKRFLNSGGFIGFATTIHQIVRQWKYKDDDDDQLFYTRLYLDPGLREKLSLNLDHKSRIFQNLNGALDEVVLKFDRNRVRIRNVAYDTLPIVVHGNGPTKLQLNYLGNYVPNGWTPEGGCGFCNQDRRTLPGGQPPPRVFLAVFVEQPTPFLPRFLQRLLLLDYPPDRVTLFLHNNEVFHEPHIADSWPQLQDHFSAVKLVGPEEALSPGEARDMAMDLCRQDPECEFYFSLDADAVLTNLQTLRILIEENRKVIAPMLSRHGKLWSNFWGALSPDEYYARSEDYVELVQRKRVGVWNVPYISQAYVIRGDTLRMELPQRDVFSGSDTDPDMAFCKSFRDKGIFLHLSNQHEFGRLLATSRYDTEHLHPDLWQIFDNPVDWKEQYIHENYSRALEGEGIVEQPCPDVYWFPLLSEQMCDELVAEMEHYGQWSGGRHEDSRLAGGYENVPTVDIHMKQVGYEDQWLQLLRTYVGPMTESLFPGYHTKARAVMNFVVRYRPDEQPSLRPHHDSSTFTLNVALNHKGLDYEGGGCRFLRYDCVISSPRKGWALLHPGRLTHYHEGLPTTWGTRYIMVSFVDP

SEQ ID NO: 550 - DNA, 725 bp, Rattus norvegicus
  ref <308>: DATABASE ACCESSION NUMBER: Refseq / NM_013060
  ref <309>: DATABASE ENTRY DATE: 2003-01-14
gtgcggcgcagcacctcagccccctgcggcggctccctcccggcctttcctcctacgagcagcatgaaagccttcagtccggtgaggtccgttaggaaaaacagcctgtcggaccacagcttgggcatctcccggagcaaaaccccggtggacgacccgatgagtctgctctacaacatgaacgactgctactccaagctcaaggaactggtgcccagcatcccccagaacaagaaggtgaccaagatggaaatcctgcagcacgtcatcgattatatcttggacctgcagatcgccctggactcgcaccccactatcgtcagcctgcaccaccagagacctggacagaaccaaacgtccaggacgccgctgaccaccctgaacacggacatcagcatcctgtccttgcaggcgtctgaattcccttctgagcttatgtcgaatgacagcaaagtactctgtggctaaataaatggcatttggggactttttcctttttttttttttttatttttactttctctttttcttttgcacaacaagaagtctacaggatcttttaagactgttgttttgttctgctttgttatcaaccatttcaccaggagaacaagttgaatggacctttttaaaaagaaaacggaaggaaaactaagagtgatcatctccccaggtgtctccggcctggactgtgataaccgttatttatgagagacttcaatgcc

SEQ ID NO: 551 - protein, 134 aa, Rattus norvegicus
  ref <308>: DATABASE ACCESSION NUMBER: Refseq / NP_037192
  ref <309>: DATABASE ENTRY DATE: 2003-01-14
MKAFSPVRSVRKNSLSDHSLGISRSKTPVDDPMSLLYNMNDCYSKLKELVPSIPQNKKVTKMEILQHVIDYILDLQIALDSHPTIVSLHHQRPGQNQTSRTPLTTLNTDISILSLQASEFPSELMSNDSKVLCG

SEQ ID NO: 552 - DNA, 534 bp, Rattus norvegicus
  ref <308>: DATABASE ACCESSION NUMBER: EMBL / X06916
  ref <309>: DATABASE ENTRY DATE: 1993-04-14
atggcgagacccttggaggaggccctggatgtaatagtgtccaccttccacaaatactcaggcaacgagggtgacaagttcaagctgaacaagacagagctcaaggagctactgaccagggagctgcctagcttcctggggagaaggacagacgaagctgcattccagaagctgatgaacaacttggacagcaacagggacaatgaagttgacttccaggagtactgtgtcttcctgtcctgcattgccatgatgtgcaatgaattctttgagggctgcccagataaggagccccggaagaagtgaagactcctcagatgaagtgttgggccagtgggggaatcttccatgttggctgtgagcatagtgccttactctggcttcttcatacatgtgcacagtgctgagcaagtttaataaagagttttgaaactatgtctgagagactggagattgtgggtgggtgggtgggctgagggagggtggtggcagagatggctggaagttgacctggagctttgtggggccaactag

SEQ ID NO: 553 - DNA, 431 bp, Rattus norvegicus
  ref <308>: DATABASE ACCESSION NUMBER: EMBL / AA800881
  ref <309>: DATABASE ENTRY DATE: 2000-03-03
aacgtggatctgggcttttattgctagaccagggacagagcacagtaagaggacaggctagaccaggagcatagtgacccatgtgactaggctagatgggtcagaagggtcagtccatggtccaggggagggaaagaccagagtcacccatcttggactggtagacagcgttgaacttttcattcagctcaggagtaaagtattccctccagttccccacaacacctttccggaggaacttgccctgactctggtctatgatctccttggataaaaggctgtagttgaccatgttactctgactcatgaaggagaagctgctgtgttccagtatgatctcctcttcctttggccccagggtgcgccccaggaattcacttaacttccgaatggttgagcgaggttcctgatgcagctcctcgtaggtgacg

SEQ ID NO: 554 - DNA, 576 bp, Rattus norvegicus
  ref <308>: DATABASE ACCESSION NUMBER: EMBL / AI103911
  ref <309>: DATABASE ENTRY DATE: 2000-03-03
tttggtggctactattgcccttgccatgggtcacactatgatgcttctggcaggatcaggaagggccctgcacctctcaacctggaagtacctacctatgagttcaccagtgatgatgtagttgttgtgggttagacacttggactcagggcctaggtttctttcggtcttcatgtcccctcagaagagttgagagtaagccttgtgtacttctaggttggttgatttaaaatatttaagaattgttaataactattggcaaacattaatgtgaagtaattgaattcactgttaaatattatcaagcattagcataataaaaccactgttgaacatcattaaattcagtcacagactggaaaggtgcaatgtctttgatagtgaattctaataaaacattacagattgttgtacaagatagttgtgaaatctataattggagttgtcattatctaaatttcttttcatatcttggacttgagaaaaggtggggacatcattttctacttcaaaatggatggggaaatcatttttgataagtaatatttttctgctttgatattaaacttttcacaa

SEQ ID NO: 555 - DNA, 500 bp, Rattus norvegicus
  ref <308>: DATABASE ACCESSION NUMBER: EMBL / X07686
  ref <309>: DATABASE ENTRY DATE: 1989-07-06
atggcaagaggcaagcgcaggaacccaagcaacagaaaccaagactacatggcaccatcggagcccaattctcccaccaaaacaaacatggaatatccaaacacaccagaaaagcaagatctagtttcaaaatcatatttgatcatgatgctggaggacttcaagaaagacgtgaagaactcccttagagaacaagtagaagactacagagaggaatcacaaaaatgcctgaaagaattccaggaaaacataattaaacaagtagaagcccatagagaggagtcacaaaaatccctgaaagaattccaggaaatcataaataaacaagtagaagcccatagagaggagtcacaaaaatccctgaaagaattccaggaaaacacaatcaaacagttgaaggaattaaaaatggaaatagaagcaatcaagaaagaacacatggaaacaaccctggatatagaaaaccaaaagaagagacaaggagctgtagatacaagctt

SEQ ID NO: 556 - DNA, 201 bp, Rattus norvegicus
  misc_feature (1)..(201): n=a, c, g or t
  ref <308>: DATABASE ACCESSION NUMBER: EMBL / AA685876
  ref <309>: DATABASE ENTRY DATE: 2000-03-08
agccgagcccggtnttgctagcctctntgggggtggggctgtttaccctgttcggcctggctctgggtacctacttggttcgaagatcccgccggccacaggtcactntccaggncccggatgagaagtacctgctgcnattnctggacaagacgacagtaagccacaacaccaggaggttccgctttgcccttcccaccg

SEQ ID NO: 557 - DNA, 302 bp, Rattus norvegicus
  misc_feature (1)..(302): n=a, c, g or t
  ref <308>: DATABASE ACCESSION NUMBER: EMBL / AA685903
  ref <309>: DATABASE ENTRY DATE: 2000-03-08
gtcaacttccgaactgatcggccagtttggtgtcggtttttattctgccttccttgtagcagataaggtcattgtcacgtcgaaacacaacaatgntacccagcacatctgggaatccgactctaatgaattctctgtgattgctgacccaagaggaaacacactaggtcgtggaacaacgattactcttgtcttaaaagaagaagcatctgattaccttgaattggatacaattaaaaatctcgtcagaaagtattctcagttcatcaactttccccatctatgtnttggagtagcaaaga

SEQ ID NO: 558 - DNA, 1624 bp, Rattus norvegicus
  ref <308>: DATABASE ACCESSION NUMBER: EMBL / AB012231
  ref <309>: DATABASE ENTRY DATE: 1999-09-17
gaagtccaagccacaatgatcctgccaagaatcctccagggtacctagaggacagttttgtaaaatccggagtcttcaacgtatcagagcttgtgagagtatccagaacacccataacccaggggactggagtcaacttcccaatcggagaaatccccagccaaccatactatcatgacatgaactctggcgtgaacctgcagaggtcgctgtcttctccaccgagcagcaaaagacccaaaactatatccatagatgaaaatatggagccaagtcctacaggagacttttacccctctccaaattcaccagctgctggaagtcgaacatggcatgagcgagatcaagatatgtcttctccaactacaatgaagaagcctgagaagccactgtttagctctacatctccacaggattcttccccaagattgagcacttttccccagcaccaccatcccggaatacctggagtcgcgcacagtgtcatctcaactcgaactccacctccaccctcaccgttgccatttccaacgcaagctatccttcctccagcaccatcaagttacttttctcatccaacaatcagatatcctcctcacctgaatcctcaggatactctgaagaactatgtaccttcttatgacccgtccagtcctcaaacgagccagcctaacagcagtggtcaagtagtagggaaagtgcctggccatttcacgcctgtcttggcaccctctccccatcccagtgcagtgcgacctgtgaccctgaccatgacagatactaaacccatcactacatccactgaagcctacacagcctcaggcacatctcaagccaatcgatatgtgggactaagcccaagagacccatccttcctgcatcagcaacagtcctggtacctgggctagcttggttccttttcaagtgtcaaataggacacccatcttaccggcaaatgtccaaaattatggtttgaacataattggagaacctttccttcaagcggagacaagcaactgaggggaaagaaacacaaccatagtgtaagaaaattaggggaaaaacacccaacaaaagaaaagaggaagactggacaacagggagaaaggagagaaactgaagaaagaagacgctagaccagcattgcagcacttccggtcactaattcccttaaggttgagactgtagtgacaggaaagggtcaatgacatctcaccgatgctagactgcagcccctgcaccgtagcctttgttccatgaagtccgctgggaaatagatgttctgtctctatgacaatatattttaactgactttctagatgccttaatatttgcatgataagctagttttcttggttagtattcttgttgtttacgcatggagtcactattcctggttatctcaacaacgaaggctaggaggcggcgtcagaggggctggggacagagccatgagccagccattttataagcactctgatttctaaaagttaaaaaaaattatatatatatatatataaaaatctctgtagcctttagttatccgtacagatttattaaattttggcccttaacccagccttttccagtgtgtaacccagtttgaaaatcttaaaaaaaaaaa

SEQ ID NO: 559 - DNA, 2424 bp, Homo sapiens
  misc_feature (1)..(2424): n=a, c, g or t
  ref <308>: DATABASE ACCESSION NUMBER: Refseq / NM_005596
  ref <309>: DATABASE ENTRY DATE: 2000-11-01
cctggaactctagcacgccgagtgaacttgaatctttggctatttaaggaggactgggtttgttgtgaagttgcggtgatccagcgcagagccccgtcctgattgatcgcatcgcggggctcagatgactgtaaaatgaatagatgaaattcttgcttctcgaagattttcttgggcatctcccggaaagtgcgttttaaggcgaagtcatgatgtattctcccatctgtctcactcaggatgaatttcacccattcatggaagcacttcttccacatgtccgtgcaattgcctatacttggttcaacctgcaggctcgaaaacgcaagtactttaaaaagcatgagaagcgaatgtcaaaggatgaagaaagagcagtcaaagatgagcttctcagtgaaaagcctgaaatcaaacagaagtgggcatccaggctccttgccaaactgcgcaaagatattcgccaggagtatcgagaggactttgtgctcaccgtgactggcaagaagcacccgtgctgtgtcttatccaatcccgaccagaagggtaagattaggagaatcgactgcctgcgacaggcagacaaagtctggcgtctggatctagtcatggtgatcctgttcaaaggcatccccttggaaagtaccgatggagagcggctcatgaaatccccacattgcacaaacccagcactttgtgtccagccacatcatatcacagtatcagttaaggagcttgatttgtttttggcatactacgtgcaggagcaagattctggacaatcaggaagtccaagccacaatgatcctgccaagaatcctccaggttaccttgaggatagttttgtaaaatctggagtcttcaatgtatcagaacttgtaagagtatccagaacgcccataacccagggaactggagtcaacttcccaattggagaaatcccaagccaaccatactatcatgacatgaactcgggggtcaatcttcagaggtctctgtcttctccaccaagcagcaaaagacccaaaactatatccatagangaaaatatggaaccaagtcctacaggagacttttacccctctccaagttcaccagctgctggaagtcgaacatggcacgaaagagatcaagatatgtcttctccgactactatgaagaagcctgaaaagccattgttcagctctgcatctccacaggattcttccccaagactgagcactttcccccagcaccaccatcccggaatacctggagttgcacacagtgtcatctcaactcgaactccacctccaccttcaccgttgccatttccaacacaagctatccttcctccagccccatcgagctacttttctcatccaacaatcagatatcctccccacctgaatcctcaggatactctgaagaactatgtaccttcttatgacccatccagtccacaaaccagccagtcctggtacctgggctagcttggttcctttccaagtgtcaaataggacacccatcttaccggccaatgtccaaaattacggtttgaacataattggagaacctttccttcaagcagaaacaagcaactgagggaaaaagaaacacaacaatagtttaagaaattttttttttaaataaaaaaaaggaaaagaggaagactggacaaaacaacacaaaggcagaaaggaaagaaactgaagaaagaagataatagaccagcaattgcagcacttacaatcactaattcccttaaggttaaactgtaatgacataaaaagggtcgatgatatttcactgatggtagatcgcagcccctgcaacgtagcctttgttacatgaagtccgctgggaaatagatgttctgtctctatgacaatatattttaactgactttctagatgccttaatatttgcatgataagctagttttattggtttagtattcttgttgtttacgcatggaatcactattcctggttatctcaccaacgaaggctaggaggcggcgtcagagatgctgggtgacagagccatgagccagccattttataagcactctgatttctaaaagttaaaaaaaatatatgaaatctctgtagcctttagttatcagtacagatttattaaatttcggcccttaacccagccttttccagtgtgtaacccagtttgaaatcttaaaaaaagaaaaaatgaaaaaaaaaggaaaaaaagaaaaaaggaaaaaaacagtttgaacacaaaggctctatggaagaaatgcctctatgtaggtgaagtgttctctctgcatgcaacagtaaaaattaatataatattttccccacaaaagaaacacttaacagagggcaagtgcaatttattaaatttatattcttaaagggggaattcatggattattaaggtccttcaggcccttggggactctta

SEQ ID NO: 560 - protein, 420 aa, Homo sapiens
  ref <308>: DATABASE ACCESSION NUMBER: Refseq / NP_005587
  ref <309>: DATABASE ENTRY DATE: 2000-11-01
MMYSPICLTQDEFHPFMEALLPHVRAIAYTWFNLQARKRKYFKKHEKRMSKDEERAVKDELLSEKPEIKQKWASRLLAKLRKDIRQEYREDFVLTVTGKKHPCCVLSNPDQKGKIRRIDCLRQADKVWRLDLVMVILFKGIPLESTDGERLMKSPHCTNPALCVQPHHITVSVKELDLFLAYYVQEQDSGQSGSPSHNDPAKNPPGYLEDSFVKSGVFNVSELVRVSRTPITQGTGVNFPIGEIPSQPYYHDMNSGVNLQRSLSSPPSSKRPKTISIDENMEPSPTGDFYPSPSSPAAGSRTWHERDQDMSSPTTMKKPEKPLFSSASPQDSSPRLSTFPQHHHPGIPGVAHSVISTRTPPPPSPLPFPTQAILPPAPSSYFSHPTIRYPPHLNPQDTLKNYVPSYDPSSPQTSQSWYLG

SEQ ID NO: 561 - DNA, 1010 bp, Rattus norvegicus
  ref <308>: DATABASE ACCESSION NUMBER: Refseq / NM_032617
  ref <309>: DATABASE ENTRY DATE: 2003-01-13
tcgggtgtttgtggtggggctgcggagtcgccgatcccgccggaagcgccaggacaatggggacccgggacgacgagtacgattacctattcaaagtggtgcttattggggactcaggtgtaggtaagagcaacctgctgtcacgcttcaccagaaacgagttcaacctagagagcaagagcaccattggagtggagtttgccactcgcagcattcaggtggacggcaagaccatcaaggctcagatctgggatactgctggccaggagcgctaccgtgccattacctctgcgtactaccgtggtgcagtgggtgcactgctggtatatgacattgccaagcacttgacatatgagaatgtggagcgctggctgaaggagctgcgggatcatgcagatagcaacattgttatcatgctggtgggcaacaagagcgacctgcgccatcttcgggctgtgcccactgacgaggcccgtgcctttgcagaaaagaacaacttgtccttcattgagacctcagccttggattccaccaatgtagaggaagcattcaagaacatcctcacagaaatctaccgtattgtgtcacagaagcaaattgctgaccgtgcagctcatgatgagtcccctggcaacaatgtggtggacatcagtgtgccacccaccaccgatggacagaaacccaataagctgcagtgctgccagaacctgtgactgccctgcacctccacccagcgtgcgtgcacgtcctcggtccttggccagcccctcaccagtgtcctcccggcccctcccttgtccctctaggacaggctgctcccaccctccaagtgagctccgcctgccagcccgatggcccaggaagagcaggagtccagtggcctctcctgtcctgcctgcttgagagaagctagaagcccccttgcttatgtacctgctcttggatattgtgggcatcttgacagggtagggaggttggtaggatggacaggaccagccagaggtgaggaa

SEQ ID NO: 562 - protein, 218 aa, Rattus norvegicus
  ref <308>: DATABASE ACCESSION NUMBER: Refseq / NP_116006
  ref <309>: DATABASE ENTRY DATE: 2003-01-13
MGTRDDEYDYLFKVVLIGDSGVGKSNLLSRFTRNEFNLESKSTIGVEFATRSIQVDGKTIKAQIWDTAGQERYRAITSAYYRGAVGALLVYDIAKHLTYENVERWLKELRDHADSNIVIMLVGNKSDLRHLRAVPTDEARAFAEKNNLSFIETSALDSTNVEEAFKNILTEIYRIVSQKQIADRAAHDESPGNNVVDISVPPTTDGQKPNKLQCCQNL

SEQ ID NO: 563 - DNA, 415 bp, Rattus norvegicus
  ref <308>: DATABASE ACCESSION NUMBER: EMBL / AA875633
  ref <309>: DATABASE ENTRY DATE: 2000-03-03
tgaggacacattgattccccctttaaaggctggtcaggagcaaaggcaacacctcccccaaatgatagctacaggctacttccttctccccaacgacacatcttccctgctttttagaattgcagctaattgattattttttttggggggggatggaaaccacaaaccttttatacaatacgaagctttgctttttattttttatttttaattttcctttatttttcttggtccccttccctcctccgattgaagacagataagctgaggagggtgggcagatgcaggattaggtcccctgtgctgatgggctatcactgtgggcagatacagtttcctgtgggctctagggaagctcctcgagttgctgtgttctggtgagcagccggaccaataaacctgcttttctaaaagg

SEQ ID NO: 564 - DNA, 2300 bp, Homo sapiens
aggatgaagtgaagctgccggccaaactgagcatcagcaaatcgctgaaagagtcggaggcgctgccagagaaggagggcgaggagctgggcgagggcgagcggcccgaggaggacgcagcggcgctggagctttcgtcggacgaggcggtggaggttgaggaggttattgaggagtcccgcgcagagcgtatcaagcgcagacactgcggcgcgtggacgacttcaagaaggccttctccaaggagaagatggagaagaccaaggtgcgtacccgcgagaacctggagaagacgcgcctcaagaccaaggaaaacctggagaagacgcggcacaccctggagaagcgcatgaacaagctgggcacgcgcctggtgcccgccgagcggcgcgagaaactgaagacgtcgcgggacaagttgcgcaaatccttcacgcccgaccacgtggtgtacgcgcgctccaagaccgcggtctacaaggtgccacccttcaccttccacgtcaagaagatccgcgagggccaggtggaagtgctcaaggccaccgagatggtggaggtgggcgccgacgacgacgagggcggcggagcgcggggaggccggcgacctgcggcgcgggagcagccccgacgtgcacgcgctgctggagatcaccgaggagtcggacgccgtgctggtggacaagagcgacagcgactgagccgcccccgctgccacccaccccattcctcgctccttccgaacttcctctttcgcattctctctcggctcgagctggctgagatttttctaaattgaaaacacgcccccctccccacacctccaggaactccactcccagtcttagagctgttaggacccgatggggaggcagcccccgcagtggacagcccccgcttggacacagtccgagtggaatgggaagggaatggtcaatccctgtcctggttgtccaagtcgggatctcagaggaaattgcagtgattccacggttaggcccccctgggggggctgccttcccctcagcctctccccacaccacccacccagctgctgtcattccgctcactgagctcttcttcattctcaccctgatccctgggggactcaaagccaaaactgcccaaagaggaaagattgaatcctaaaggggatccttgcccccatgggaggccccctactagaaggacgtgaaagcagcttttgggggaaactgaggcagtggggaagacagagcagaatgagccctcaccctggctgggggtccagcacaggctgtatctgcagagggtcccagaggaacgctggagccaagagaagccctgggaaggaggggtggggaacgacatgcatgtgagggatggcacactgatgtgtttatgcacctgtacacaggagcgcatggccatggctttggaaaggagaatggaaaaatagaagaaggtcggccgggcttggtggcttatgcctgtaaccccagcactttgggaggccgaggtgggcggatcacctgaggtcaggagttcgggaccagcctggcaaacaccccatctctactaagcgaaaacccatctctactaaaattacaaaaattagctgggcatgattgcgcatgcctgtaatcccagctactttggaggctgaggtggggagaattgcttgaacctgggaggtggaggttgcagtgagccaaggtcgcgacactgcactccagcctgggtgacagagtgagactccatctcaacagaaggaaaaaaaaggaaaataggagaaggtggaaatgggtgaagagagaagtcccctcactagctgcatgagaaatctatcttactgtggttctccatgggcagcaggaccatttttcagaatcaagagggaggacagtgtgagaaggcgatgatccaaagaagacagagaggtcagccccacccgatccctcaaatgggctcttggaggcacccccaggggcagcccatttctcaaagtccagaaaattagggtcccagaagggggcagcagcaggctgggagttaggagggagagcagggtgccggccctgccaccaagttgagagctggaggggaggtggggagagaacatcacagagcagccagccctggttcactcctggcagtttcttctcaagctccttccctaggagcatggtggcacgtgcctgtggtctcagctacttgggaggctgaggcgggaggatcgccagagcccaggagtttgaggctgcagtgagctatgagggtgcctctgtgctccatcctaggcaacagagtgagacgctgtt

SEQ ID NO: 565 - protein, 182 aa, Homo sapiens
MEKTKVRTRENLEKTRLKTKENLEKTRHTLEKRMNKLGTRLVPAERREKLKTSRDKLRKSFTPDHVVYARSKTAVYKVPPFTFHVKKIREGQVEVLKATEMVEVGADDDEGGGARGGRRPAAREQPRRARAAGDHRGVGRRAGGQERQRLSRPRCHPPHSSLLPNFLFRILSRLELAEIFLN

SEQ ID NO: 566 - DNA, 401 bp, Rattus norvegicus
  ref <308>: DATABASE ACCESSION NUMBER: EMBL / AA893611
  ref <309>: DATABASE ENTRY DATE: 2000-03-03
ggcacgaggcaaaaagtgtgaacatggctacgcttcatcattcccctccatgccgagcccccggctacagcactcaaagcccccacggaggttgagccgggcacagaaacacaaatacctgcagaaatgttatcttctgggtgagacttccagcccgcactccatgtcatgtgctccctcctttcaaactcgaaggtttccctctgggccactgctttgctccgggaagcctttctggataccttaccccaagctgttcggactttgtattctttaaataatttaactacccttaattacttaaaaaaaaaagctttatgattttcataacttattgccgattttaatgggttgttaatttcagtcctgtagttttattttatgtttagatagggctgggc

SEQ ID NO: 567 - DNA, 2313 bp, Homo sapiens
  ref <308>: DATABASE ACCESSION NUMBER: Refseq / NM_130439
  ref <309>: DATABASE ENTRY DATE: 2002-02-08
catcgcccgaggcgtccgccctgcaaatctgccagcccccgagaggggtttggaaccttagcacccaagtctaagtcaacttcatagtgtgaacatggctacgcctcttcattcccgtccatgccgagcccccgactgcagcattcaaagcccccacggaggttgagccgggcacagaaacacagcagcgggagcagcaacaccagcactgccaacagacgagctcatctgcgcctttgtttagaacgcttaaaagttctgattccactaggaccagactgcacccggcacacaacacttggtttgctcaacaaagccaaagcacacatcaagaaacttgaagaagctgaaagaaaaagccagcaccagctcgagaatttggaacgagaacagagatttttaaagtggcgactggaacagctgcagggtcctcaggagatggaacgaatacgaatggacagcattggatcaactatttcttcagatcgttctgattcagagcgagaggagattgaagtggatgttgaaagcacagagttctcccatggagaagtggacaatataagtaccaccagcatcagtgacattgatgaccacagcagcctgccgagtattgggagtgacgagggttactccagtgccagtgtcaaactttcattcacttcatagaacccagcatgacataacagtgcagggcaaaatattcactgggccaattcaatacaaacaatctcttaaattgggttcatgatgcagtctcctctttaaaacaaaacaaaacaaaactatacttgaacaaaagggtcagaggacctgtatttaagcaaatacttagcaaaaagtggggcagagcctcccaaggagaacaaatattcagaatattcatattggaaaaatcacaatttttaatggcagcagaaaacttgtgtgaaattttcttgatttgagttgattgagaagaggacattggagatgccatcctctttctcttttctagtttgctcatactacattgagtagacacatttaaggatggggttatgaacccttcctgagctttatggtcctaaaagcaaaataaaaactattcgaatgaaaagacaagaaaatcaggtattaatcttggatagctaataatgagctattaaaactcagcctgggacagtttatcatgaagcctgtggatgatcaatcctttattattattttttttttttgaaaaaagctcatttcatgctctgcaaaaggagagactcccatgaagccttttgaaagggatcatcatgcagctcaactttctgttggattccatgctaagcaagctaaccttatcctgcattgttagcactaggcacccagctgccacctctccatcctgctgcccttaggccacatgggagcagtccatgcatgacagcctctatcctacaaggcctatgagtatggattgggggggccaaaaggaaaaagctccatgtgcctctttgtctgcgtgggtcagaagagttgtgcacgcagattagcaggccaaggtctgagccacagcagcatttttatttcagattttgataactgtttatatgtgttgaaaaccaaaatgacatctttttaaagcttatccataaaaaaaaatagatgtcttttatagtggaaaaacacatggggaaaaaaatcatctattttgatgcagcatttgataatgataaaacacctcacacctcactctttatagtgcacaaaatgaatgaggtctgggctaggtagaaaaagggtcaatgctatttttgtttttagaatcattaccttttaccagcttttaaccatctgatatctatagtagacacactatcatagttaacatagttaagttcagcacttgtctcattttaatgtaaagatttgcttccattttcctacaggcagtctctctcttcctcacagtcccactgtgcaggtgctattgttactcttacgaatattttcagtaatgttattttcttctaagtgaaatttctagcctgcactttgatgtcatgtgttccctttgtctttcaaactccaaggttcccctgtggccctctcccttaccctgggaaggcctcttggagaccttacccctggctgtttggactttgtatactttaaataatttaactacccttaattacttaaaaaaaaaaaaaagctttatgattttcataacttattgctgattttaatggattgttaatttcagtcctgtagttttattttatgtttagatagggctgggcaaggaaaaagaaaataaagacaaccatatttagcagtgca

SEQ ID NO: 568 - protein, 182 aa, Homo sapiens
  ref <308>: DATABASE ACCESSION NUMBER: Refseq / NP_569157
  ref <309>: DATABASE ENTRY DATE: 2002-02-08
MPSPRLQHSKPPRRLSRAQKHSSGSSNTSTANRRAHLRLCLERLKVLIPLGPDCTRHTTLGLLNKAKAHIKKLEEAERKSQHQLENLEREQRFLKWRLEQLQGPQEMERIRMDSIGSTISSDRSDSEREEIEVDVESTEFSHGEVDNISTTSISDIDDHSSLPSIGSDEGYSSASVKLSFTS

SEQ ID NO: 569 - DNA, 520 bp, Rattus norvegicus
  ref <308>: DATABASE ACCESSION NUMBER: EMBL / AI639045
  ref <309>: DATABASE ENTRY DATE: 2000-03-04
tttgcttcacttgactaatttcattacccgccatcctacagtattattctgctttcttcatatggcttactcatttttatttcattgcatggtgcattgactttttactagagaattttactaggtatttgtcattcaagtttccatctgcttaatattggtataccgtgagggtcacttttctaatacttttactataatgtaccacctcagccctgtttaagtaatgtttttatctaatgtcaaatcttttccaactaactaaaagtaaacctatataaaagggttgttgtaaatgtgcatgtaaatagttgtgttaataactcattgttttacatttggtacatctgtgtctgcttatacacctagttttcccacttctgcttgtttgtttgttcagtctgtattaaaattagaattggaaaataaaacttagtttgtttcttctaactttttaaaatggtatcttaaagaactttttgttaagcttgcttacatgaaataaaggtttaaaagttaa

SEQ ID NO: 570 - DNA, 1729 bp, Rattus norvegicus
  ref <308>: DATABASE ACCESSION NUMBER: Refseq / NM_012880
  ref <309>: DATABASE ENTRY DATE: 2003-01-13
ggctcacaagcagctggccagttctggggaggcagctcagaggctctttctcaggcctctagctgggtctgtcctgtacttcaccagaggaaaaacgttcttgggagagcttgtcaggtgtggaacctcagccatggtggccttcttgttctgcaacctgctactggtggcctgtggctctgtcacctggaccatgtcagataccggagagtccggtgtcgacttagcagaccggcttgacctggttgagaagataggcgacacgcactccaaagacctggagatctggatggagctaggaaaacaacgggaggcggatgccagggagatgcacgcagtctgcagggtacagccctcagccatgctgcctcccgatcagccacagatcacaggcttggtcctcttccggcagctggggcccagctccagacttgaggcctccttcaatctggagggcttcccagccgagcagaacacctccaaccacgccatccacgtgcatgagttcggggacctgagccagggctgcgagtccaccggaccacactacaacccgctgggtgtgccgcacccacagcacccgggggacttcggcaacttcgtggtgcgcgatggccgcctttggaagcatcgaatgggcctggccacgtcactggccggaccgcactcgatcttgggccgcgctgtggtggtccacgctggcgaggacgacctgggtaaaggtggcaaccaggccagcgtgcagaacggcaacgcaggtcgccggctcgcctgctgcgtggtaggcaccagcaactcggaggcctgggagagccagacaaaggagcgcaagaagcggcggcgggagagcgagtgcaagaccacttaagcatcacccagggccgcctagcctagctgctgcgcgcatagatgcctccacacgcgccctctagacgcctccagtcatcctagaggtctctgggtgtcctagactgacgcttcccagacacctcaatcgcctctgtgcgccccacactcttccacataccccagacacctctgtatggctcagatgccttcaagaacctcctcggccacgtccacgagccccagatgttcccacgtgccctgggcactgttctcggagaccaggacacttttttgtaacctaggaatccttcacacctatgcactccacagaccaactccttcgtgctctaggtccacctcgaactactttatgccccaagacaatcccataagcccctagcatcccctttgaaacagtctttgagtttgctcccagagaattccccgcttacccccagaggtcgaatgtgcgcagataactctccttttactctgaggacatcccagtggaccttctagagaactcccttggggtgttctgaaatatcaccaccccacttccttctgcccccttttgttttctttctgtcccctagcacccgagacttctctcttccctagagacctcgtttgtcttccccttgttcctcctagggctctgggaccaccctgacacacacacacacacacacacacacacacacacacacacacacacacacacatccctaagattccatgttcctgatcacctcctgccgggcccctggttctgttttcatctgtttcccatatggtgcctgcaccccaaggagagcagctcctccgagagtatttgacaacctttatgctgctcattaaaaccacagcaattcaaaaa

SEQ ID NO: 571 - protein, 244 aa, Rattus norvegicus
  ref <308>: DATABASE ACCESSION NUMBER: Refseq / NP_037012
  ref <309>: DATABASE ENTRY DATE: 2003-01-13
MVAFLFCNLLLVACGSVTWTMSDTGESGVDLADRLDLVEKIGDTHSKDLEIWMELGKQREADAREMHAVCRVQPSAMLPPDQPQITGLVLFRQLGPSSRLEASFNLEGFPAEQNTSNHAIHVHEFGDLSQGCESTGPHYNPLGVPHPQHPGDFGNFVVRDGRLWKHRMGLATSLAGPHSILGRAVVVHAGEDDLGKGGNQASVQNGNAGRRLACCVVGTSNSEAWESQTKERKKRRRESECKTT

SEQ ID NO: 572 - DNA, 2364 bp, Rattus norvegicus
  ref <308>: DATABASE ACCESSION NUMBER: Refseq / NM_031337
  ref <309>: DATABASE ENTRY DATE: 2003-01-13
gcggcacctgcctgccgaggtacgtggcgcagcccccagtcagcagagcggacctcggggaacccaggcagcagcgatccgcctttgcccactcataccccaggcccagcagctcctccccagccctgagacgccggacgcgcctgcgaggggacgccggcggagggtcgcgaccccgggccgcctatatgggcgcccccggcgcagcctgtcgaggtgtgaacgcggtgctgtggcaatgccaaatgagttcacctctgcaaagctgagaagtgattgctcaaggacctccctgcaatggtacacccagacccagcacaagatgagaagacccagcttgttattaaaagacatcctcaagtgcatgttggttgtgtttggagtgtggctcctgtacatcctcaagttaaattacactgctgaagaatgtgacatgaaaaaactgaattatgtagaccctgcccgaataaagagagctcatagaaacactcaggaagtctttcagaaggaatgtcgtcctgggcacgcgaagaaaactatggatctgttatttaagggcaagtacagcatggacttggagcctttcgtgcagaagatccccacagccagtgaagctgagctcaagtatgacccgccttttggattccggaagttctccagtaaagtccagagcctcttggatatgctgcctgagcacgactttcctgaacacttgagagccaagcactgcaagcgctgtgtggttattgggaacgggggcatccttcacggactagagctgggccacgcactcaaccagttcgatgtggtaataaggttaaacagcgcaccaattgagggttattctgaacatgttggaaataaaactactataaggatgacttacccagagggtgctccactgtcggacgctgaatactacgctaatgacttgttcgttgctgttttatttaagagtgttgatttcaaatggcttcaagcaatggtgaaaaatgaaagcctgccattttggattcgtctcttcttttggaagcaggtggcagaaaaaatcccactccagccaaagcatttcaggattttgaacccagttatcatcaaagaaactgccttcgacatccttcagtactcagagcctcagtcaagattctggggccatgataagaatatccccacgatcggcatcattgccattgtcttggccacgcatctgtgtgatgaagttagcctggcaggctttggatatgacctcagtcaaccaaggacccctctgcactactttgacagtcagtgcatgggcgccatgaactggcaagtcatgcacaacgtgaccacagagacccagttcctccagaagctcatcaaggagggcgtggtgcaggacctcagcgggggcatccactgagaactttgaacaccgcagacctcacttagcaatgcagctgagagctgtggtgagcagcctccccagggagtttaccctgcagctgctttggcctacagctagtgtttttaaactcagttttaaaagaaaaggaaagaacaacagcaacaacaaaagttcagccctttacacctctttgtcctatttatttgaagtcagtgttgggttttgcacaattttgtaagttaattttaagaatggggatggaaagacttttcaaagagaatcgtatggtttattgtattttaaagaagtaatttaatttgcaaaaactgtacacatgtactctccccaggtgttgaggtgggaggagaggggcttctgcaccttcgatgatggcctcgatacctgactgcgggttctgcagctctgtttggtagcactgctggcagggaaacttcctgcctcctggatgaaggaagggtttactcatcatcactggcagctgcaggaagtcgggggcctgataaacaagttcataacccctttctgctagtccgtctgccagaagactcagaggacccaagcagggcagctgttccacaggcgagccactgtcagctgagtaccgtgatgctgccccaggatgggagaagccatgtcgtcctacactgtcagggcacttttcagcttctggagaagtgtctgttctctctgccctcccaaagcacttggtgttatttaaggcgtgaggctgtctgtctgagatggttcatcagaattgtgacagccatggggagcaagacctctgcagatgaccacattgctaaagcactggagtgaaccccccctgttgtaacttaagacccatcctgaagtgccctgaagtgcccaccaaccaatgtgaaaggagaatgaggaaggggagggaaaagaacagaaagaaagaaagaaaaataataaaagcttttgaggagcccctg

SEQ ID NO: 573 - protein, 359 aa, Rattus norvegicus
  ref <308>: DATABASE ACCESSION NUMBER: Refseq / NP_112627
  ref <309>: DATABASE ENTRY DATE: 2003-01-13
MRRPSLLLKDILKCMLVVFGVWLLYILKLNYTAEECDMKKLNYVDPARIKRAHRNTQEVFQKECRPGHAKKTMDLLFKGKYSMDLEPFVQKIPTASEAELKYDPPFGFRKFSSKVQSLLDMLPEHDFPEHLRAKHCKRCVVIGNGGILHGLELGHALNQFDVVIRLNSAPIEGYSEHVGNKTTIRMTYPEGAPLSDAEYYANDLFVAVLFKSVDFKWLQAMVKNESLPFWIRLFFWKQVAEKIPLQPKHFRILNPVIIKETAFDILQYSEPQSRFWGHDKNIPTIGIIAIVLATHLCDEVSLAGFGYDLSQPRTPLHYFDSQCMGAMNWQVMHNVTTETQFLQKLIKEGVVQDLSGGIH

SEQ ID NO: 574 - DNA, 2359 bp, Homo sapiens
  ref <308>: DATABASE ACCESSION NUMBER: Refseq / NM_003896
  ref <309>: DATABASE ENTRY DATE: 2003-02-13
ctgagcgggggagcggcggcccccagctgaatgggcgcgagagcggcgctgggggcgggtgggggcgcggggtaccgggctggcggccggccggcgccccctcattagtatgcggacgaaggcggcgggctgcgcggagcggcgtcccctgcagccgcggaccgaggcagcggcggcacctgccggccgagcaatgccaagtgagtacacctatgtgaaactgagaagtgattgctcgaggccttccctgcaatggtacacccgagctcaaagcaagatgagaaggcccagcttgttattaaaagacatcctcaaatgtacattgcttgtgtttggagtgtggatcctttatatcctcaagttaaattatactactgaagaatgtgacatgaaaaaaatgcattatgtggaccctgaccgtgtaaagagagctcagaaatatgctcagcaagtcttgcagaaggaatgtcgtcccaagtttgccaagacatcaatggcgctgttatttgagcacaggtatagcgtggacttactcccttttgtgcagaaggcccccaaagacagtgaagctgagtccaagtacgatcctccttttgggttccggaagttctccagtaaagtccagaccctcttggaactcttgccagagcacgacctccctgaacacttgaaagccaagacctgtcggcgctgtgtggttattggaagcggaggaatactgcacggattagaactgggccacaccctgaaccagttcgatgttgtgataaggttaaacagtgcaccagttgagggatattcagaacatgttggaaataaaactactataaggatgacttatccagagggcgcaccactgtctgaccttgaatattattccaatgacttatttgttgctgttttatttaagagtgttgatttcaactggcttcaagcaatggtaaaaaaggaaaccctgccattctgggtacgactcttcttttggaagcaggtggcagaaaaaatcccactgcagccaaaacatttcaggattttgaatccagttatcatcaaagagactgcctttgacatccttcagtactcagagcctcagtcaaggttctggggccgagataagaacgtccccacaatcggtgtcattgccgttgtcttagccacacatctgtgcgatgaagtcagtttggcgggttttggatatgacctcaatcaacccagaacacctttgcactacttcgacagtcaatgcatggctgctatgaactttcagaccatgcataatgtgacaacggaaaccaagttcctcttaaagctggtcaaagagggagtggtgaaagatctcagtggaggcattgatcgtgaattttgaacacagaaaacctcagttgaaaatgcaactctaactctgagagctgtttttgacagccttcttgatgtatttctccatcctgcagatactttgaagtgcagctcatgtttttaacttttaatttaaaaacacaaaaaaaattttagctcttcccactttttttttcctatttatttgaggtcagtgtttgtttttgcacaccattttgtaaatgaaacttaagaattgaattggaaagacttctcaaagagaattgtatgtaacgatgttgtattgatttttaagaaagtaatttaatttgtaaaacttctgctcgtttacactgcacattgaatacaggtaactaattggaaggagaggggaggtcactcttttgatggtggccctgaacctcattctggttccctgctgcgctgcttggtgtgacccacggaggatccactcccaggatgacgtgctccgtagctctgctgctgatactgggtctgcgatgcagcggcgtgaggcctgggctggttggagaaggtcacaacccttctctgttggtctgccttctgctgaaagactcgagaaccaaccagggaagctgtcctggaggtccctggtcggagagggacatagaatctgtgacctctgacaactgtgaagccaccctgggctacagaaaccacagtcttcccagcaattattacaattcttgaattccttggggattttttactgccctttcaaagcacttaagtgttagatctaacgtgttccagtgtctgtctgaggtgacttaaaaaatcagaacaaaacttctattatccagagtcatgggagagtacaccctttccaggaataatgttttgggaaacactgaaatgaaatcttcccagtattataaattgtgtatttaaaaaaaagaaacttttctgaatgcctacctggcggtgtataccaggcagtgtgccagtttaaaaagatgaaaaagaataaaaacttttgagg

SEQ ID NO: 575 - protein, 362 aa, Homo sapiens
  ref <308>: DATABASE ACCESSION NUMBER: Refseq / NP_003887
  ref <309>: DATABASE ENTRY DATE: 2003-02-13
MRRPSLLLKDILKCTLLVFGVWILYILKLNYTTEECDMKKMHYVDPDRVKRAQKYAQQVLQKECRPKFAKTSMALLFEHRYSVDLLPFVQKAPKDSEAESKYDPPFGFRKFSSKVQTLLELLPEHDLPEHLKAKTCRRCVVIGSGGILHGLELGHTLNQFDVVIRLNSAPVEGYSEHVGNKTTIRMTYPEGAPLSDLEYYSNDLFVAVLFKSVDFNWLQAMVKKETLPFWVRLFFWKQVAEKIPLQPKHFRILNPVIIKETAFDILQYSEPQSRFWGRDKNVPTIGVIAVVLATHLCDEVSLAGFGYDLNQPRTPLHYFDSQCMAAMNFQTMHNVTTETKFLLKLVKEGVVKDLSGGIDREF

SEQ ID NO: 576 - DNA, 3133 bp, Rattus norvegicus
  ref <308>: DATABASE ACCESSION NUMBER: Refseq / NM_017031
  ref <309>: DATABASE ENTRY DATE: 2002-04-04
gaattcgcgcacgagagcacatgctggatggactctggttccgccctttgtgcagacaaaagtgactgggtggccaggctttgcttactgtctgagttaatgaagcttgtttgataaggttttctttcaaaaaaaaattacatataaaggatttatcaaaagccctcatgaatatttcatgagttgatacattcggctgaatggattcagtgagtctcagtgtgtaacttgcacacaagccccatccacaaggaggctggtgacagaggaagcactttggcgcattttcagaggcaaaggcagcctgataaagctcctgtgacaggctgacttgccattctcccagtatgctgctcttgctctgaagtgctccaggattggaaccatcacggcttcccaaattagcctaggacgagtgtgcggacccagcagccttttaacctgcggcagtgcctttgctatgttcaagactgttgttgtggatggtgaaagctagcgcgccacacgagacatgacagcaaaaaattcttccaaagaacttccagcttctgaatctgaggtttgcataaagactttcaaggagcagatgcgcttggaacttgagcttccaaagctaccaggaaacagacctacatctcccaaaatttctccacgcagttcaccaaggaattcaccatgctttttcagaaagttgctggtgaataaaagcatccgacagcggcgtcgcttcactgtggctcatacatgctttgatgtggaaaatggcccttctccaggtcggagcccactggaccctcaagccagctcttcttcaggactggtacttcatgccgccttccctgggcacagccaacgcagagagtcttttctctacagatccgacagcgactatgacttgtcaccaaaagcgatgtcaaggaactcctcacttcccagcgaacaacacggcgatgacctgattgtcactccttttgcccaggttcttgccagcttgcgaatcgtaagaaacaatttcaccctgctgacaaaccttcacggagcaccgaacaagaggtcgccagcggctagtcaggctccagtcaccagagtcagcctgcaagaagaatcatatcagaaactagcaatggagacgctggaggaactagactggtgcctagaccagctagagaccatccagacctaccgctctgtcagcgagatggcttcaaacaagttcaaaaggatgctgaaccgggagctgacacacctctcagagatgagcagatcagggaaccaagtgtctgaatacatttcgaacacgttcttagacaagcagaacgatgtggaaatcccatctcccacccagaaggacagggagaagaagaagaagcagcagctcatgacccagataagtggagtgaagaaactgatgcacagctcaagcctgaacaacacaagcatctcacgctttggagtcaacacggaaaatgaggatcatctagccaaggagctggaagacctgaacaaatggggccttaacatcttcaacgtggctgggtactcccataatcggcccctcacatgcatcatgtacgccattttccaggaaagagaccttctaaagacgtttaaaatctcctccgacaccttcgtaacctacatgatgactttagaagaccattaccattctgatgtggcgtatcacaacagcctgcacgctgctgacgtggcccagtcaacgcacgttctcctctctacgccagcactggatgctgtcttcacagacctggaaatcctggctgccatttttgcagctgccatccatgatgttgatcatcctggagtctccaatcagtttctcatcaatacaaattccgaacttgctttgatgtataatgacgaatctgtgctggaaaaccatcacctcgctgtgggattcaagctccttcaagaggaacattgcgacatctttcagaatcttaccaagaagcaacgccagacactcaggaaaatggtgattgacatggtgttagcaactgatatgtccaagcacatgagcctcctggctgaccttaaaacgatggtagaaaccaaaaaggtgacgagctccggtgttctcctcctggacaactatactgaccggatacaggttcttcgcaacatggtacattgtgcagacctgagcaaccctaccaagtccttggagttgtatcggcaatggactgatcgcatcatggaggagtttttccaacagggagacaaagaacgggagaggggaatggagattagcccaatgtgtgataaacacacagcttctgtggaaaagtcccaggttggtttcattgactacattgtccatccattgtgggagacctgggcagacctggttcagcctgatgctcaagacattttggacacactagaagataacaggaactggtaccagagtatgattccccagagcccctctccaccactggacgagaggagcagggactgccaaggccttatggagaagtttcagttcgaactgacccttgaagaagaggattctgaaggaccggaaaaggagggagaaggccccaactatttcagcagcacaaagacactttgtgtgatcgatccagagaacagggattctctggaagagactgacatagacattgccacagaagacaagtctctgatcgacacataatctccctctgtgtggaggtgaacattctatccttgacgagcatgccagctgagtggtagggcccacctaccagagccaaggcctgcacaaaacaaaggccacctggctttgcagttacttgagtttggagccagaatgcaaggccgtgaagcaaatagcagttccgtgctgccttgccttgccggcgagcttggcgagacccgcagctgtagtagaagccagttcccagcacagctaaatggcttgaaaacagaggacagaaagctgagagattgctctgcaataggtgttgaggggctgtcccgacaggtgactgaactcactaacaacttcatctataaatctcacccatcctgttgtctgccaacctgtgtgccttttttgtaaaatgttttcgtgtctttgaaatgcctgttgaatatctagagtttagtacctccttctacaaactttttt

SEQ ID NO: 577 - protein, 721 aa, Rattus norvegicus
  ref <308>: DATABASE ACCESSION NUMBER: Refseq / NP_058727
  ref <309>: DATABASE ENTRY DATE: 2002-04-04
MTAKNSSKELPASESEVCIKTFKEQMRLELELPKLPGNRPTSPKISPRSSPRNSPCFFRKLLVNKSIRQRRRFTVAHTCFDVENGPSPGRSPLDPQASSSSGLVLHAAFPGHSQRRESFLYRSDSDYDLSPKAMSRNSSLPSEQHGDDLIVTPFAQVLASLRIVRNNFTLLTNLHGAPNKRSPAASQAPVTRVSLQEESYQKLAMETLEELDWCLDQLETIQTYRSVSEMASNKFKRMLNRELTHLSEMSRSGNQVSEYISNTFLDKQNDVEIPSPTQKDREKKKKQQLMTQISGVKKLMHSSSLNNTSISRFGVNTENEDHLAKELEDLNKWGLNIFNVAGYSHNRPLTCIMYAIFQERDLLKTFKISSDTFVTYMMTLEDHYHSDVAYHNSLHAADVAQSTHVLLSTPALDAVFTDLEILAAIFAAAIHDVDHPGVSNQFLINTNSELALMYNDESVLENHHLAVGFKLLQEEHCDIFQNLTKKQRQTLRKMVIDMVLATDMSKHMSLLADLKTMVETKKVTSSGVLLLDNYTDRIQVLRNMVHCADLSNPTKSLELYRQWTDRIMEEFFQQGDKERERGMEISPMCDKHTASVEKSQVGFIDYIVHPLWETWADLVQPDAQDILDTLEDNRNWYQSMIPQSPSPPLDERSRDCQGLMEKFQFELTLEEEDSEGPEKEGEGPNYFSSTKTLCVIDPENRDSLEETDIDIATEDKSLIDT

SEQ ID NO: 578 - DNA, 879 bp, Rattus norvegicus
  ref <308>: DATABASE ACCESSION NUMBER: EMBL / S75019
  ref <309>: DATABASE ENTRY DATE: 2000-07-12
agcttggttcttccctccgctctgtttgccgccgtgggaacagccggccagaggtgtaccactgtgaggcgactgtttttgcacgaaagcatccatgatgaagttgtagacagactgaaaaatgactactcacagatccgtgtcgggaacccctgggaccccaatatcctctatggaccgctccacaccaaacaggcggtgagcatgtttgtgcaagccgtggaagaagcaaagaaagaaggaggcacggtggtctatgggggcaaggtcatggaccaccctggcaattatgtggaacccaccattgtgactggtcttgtccatgatgcgcccattgttcacaaggagacttttgccccaattctctatgtcttcaaattcaagaatgaagaagaggtctttgaatggaacaataaagtaaaacaggaactttcgagtagtatctttaccaaggatctgggcagaatcttccgctggcttggacctaagggttcagactgtggcattgtgaacgtcaatattcctaccagtggggctgagatcggcggtgcgtttggaggcgagaagcacacgggcagtggcagggaatctggcagcgatgcctggaagcagtacatgcggagatctacgtgtaccatcaactacagcacggccctccctctggctcaaggtatcaagtttcagtgatactggttggtcacttagccattcctgtgactgctctgaagacgcccaagaggactctgactttcccggaataaatgatcgatttgagtacagcagtgcctactctccagtgatcaaacccctgactaaatcaagatatatccatttatcaagaattgaaaattaaatatttacaacctagctacatttagc

SEQ ID NO: 579 - DNA, 1142 bp, Rattus norvegicus
  ref <308>: DATABASE ACCESSION NUMBER: EMBL / U72660
  ref <309>: DATABASE ENTRY DATE: 2000-03-04
ctgggcggcccgggcggccgcaccatggatcccggcaccgaggagtacgagctcaacggcgacctgcgccctggctctcccggttcccccgacgcctcgccaccccgctggggtttgaggaaccggcccatcaatgtaaaccattacgccaacaagaagagcgccgcggagagcatgctggacatcgcactgctcatggccaacgcgtcgcagctcaaggccgtggtggagcagggcaatgagttcgccttcttcgtgcccctcgtggtgctcatctccatctctctcgtgctgcagatcggagtgggcgtgctgctcatcttcctggtcaagtatgacctcaacaacccagccaagcacgccaagctggacttccttaacaacctggccacggggctggttttcatcatcgtggtggtcaacatcttcattacggcctttggagtccagaagcctgtcatggacgtggcaccccggcagtaggatgcccagagaccttgaaggtatctgacctgcagcccagctgtccagacccctgcaactgctgtatccccaaggcatccctctcctgttcacagcccaaggtggcctccgctggaccatggtcaaggatggacttccgtccacctgtgactgctgcgtgggcggccacccgaggcgtgtgggaactggatgcaaagccatgaagatcagaactggacagttccaccgaaacccacgcccagaggatgatcactgcccgcccaaggacatgcaggaaatccatgattggactcgatgaggggccagaactgatctctgtctcaggacattccagaaggaccaggatatgcccctccctttgctgatacaccagtgaccctacttctcatggagcatgcacaggtcaccctggagactgctccctttgttgtttcctgacccagggaccttggacagtcatcagtacctgctggctccagcctcagtgcctgggcttggcagtgtctcttggcatcgagaggcagccatgcctgtgggggctgcaggtcatcctggtaccttctaccagtagtgacttgggaagagccccaccccccaacccaggggctcaggccccaattttctaatcaggaatgacaataaagcttatgtcttccccc

SEQ ID NO: 580 - DNA, 1221 bp, Homo sapiens
  misc_feature (1)..(1221): n=a, c, g or t
  ref <308>: DATABASE ACCESSION NUMBER: Refseq / NM_004148
  ref <309>: DATABASE ENTRY DATE: 2000-11-01
gcggcctgggcggccgcaccatggactcgggaaccgaggagtacgagctcaacggcggcctgcctccgggcacacccggctccccggacgcctcgccggcccgctggggctggaggcacgggcccatcaacgtgaaccattacgccagcaagaagagcgcagccgagagcatgctggacatcgcgctgctgatggccaacgcgtcccagctgaaggccgtcgtggaacagggccccagcttcgccttctatgtgcccctggtggtcctcatctccatctcccttgtgctgcagatcggcgtgggggtgctgctcatcttccttgtcaagtacgaccttaacaacccggacaagcacgccaagctggacttcctcaacaacctggccacgggcctggtgttcatcatcgtggtagtcaacatcttcatcacggccttcggggtccagaagcccttgatggacatggcaccccagcagtaggacacccaggaccctggatgctgcctgccctgcaactcagctgcccgaccccaggagtcgccatacctgtgaggtgtccacctccctgcacatggcactacccagactgccagagcccaggctggcctcatctgcaccatgtccccggaccagcccttgctctgactgcggccaagcaccacgcaggaggccactcttgtctctcancagctgttcccaggaggcagctccctcctggcacatgggggctggcacaatagcccagagggtcagaactggacagctgcagagacctgtgcccagagaagggtctcgacccactcaaggacacacagcaggtccgtggatgggctggatgagtgaccagggccagcctctgtctcaggacattccagaaggacaaggagatgtctctccctctcccaaagcaccagcgtccctgcctcccgtgggccctgtccgggttgcccctggtgaccccagcctctgtccacttcctaacccagggaccctgcacagccagaactgcctttggccctacggatggccactggctctggtctaaagtgcctgggcttggtggccatcaagagggagccagtcaggcctgtgagggccgtagaccttgtatataccctgcaccagcagtgaccgggcagagcccaaccccctccacgggggtcccagcacccacttttctaatcatgaatgaacaataaagcccacgctctttgtcaggcaa

SEQ ID NO: 581 - protein, 152 aa, Homo sapiens
  ref <308>: DATABASE ACCESSION NUMBER: Refseq / NP_004139
  ref <309>: DATABASE ENTRY DATE: 2000-11-01
MDSGTEEYELNGGLPPGTPGSPDASPARWGWRHGPINVNHYASKKSAAESMLDIALLMANASQLKAVVEQGPSFAFYVPLVVLISISLVLQIGVGVLLIFLVKYDLNNPDKHAKLDFLNNLATGLVFIIVVVNIFITAFGVQKPLMDMAPQQ

SEQ ID NO: 582 - DNA, 489 bp, Rattus norvegicus
  ref <308>: DATABASE ACCESSION NUMBER: EMBL / AI102868
  ref <309>: DATABASE ENTRY DATE: 2000-03-03
tacgtcatgggcatgatcctggaatggatcagtaacaatggtgggtccgcagccatggagaagctcagctccgtcaaatcccaaatgatttatgagattattgataattctcaaggattttatgtgtgtccggtggagcgccagaatagaagcaggatgaacattccgtttcgcattggtaacagcaaaggggatgaagctctggagaagcgatttcttttaaagctgcttcatgagaaggatctaggagttccatgattaacttttcttgccacaagtagaagaaatggttgtttctttgcttttcggttagaccgttaaacaaaactcagttacacccccacccccaaactgtgatcgcatggctgtttttgtagtttaaccagggcaatctgtacattccagatctttgctgaggtcttttctggttgttcatgtgttagtgttttcgattgacgatatgaagaacattaaagtcctgagtcatct

SEQ ID NO: 583 - DNA, 356 bp, Rattus norvegicus
  ref <308>: DATABASE ACCESSION NUMBER: EMBL / H31456
  ref <309>: DATABASE ENTRY DATE: 2000-03-04
tttgacaccatctgaaccacaaaaaatcacagttgagctaggtcccttccaaaggaaagggcagtcccagagaagttgggtgacacgaccatgccaagtgtagtagcctgtatgcctagaaatggatctgctggtgggctagacatgccccaaagtgtccttcctgtgtgctgttctgatgacgtatacctgaaggaagacatggttaaaaactaaacttcaaaaataaataaaaactcaacctaatcctgcagtatatttaacttgaagttttggatggtgtttttgaagataaaattgtgtgggttattatatgtaaatcagtatttatgaataagtaaaagtgtatgtagact

SEQ ID NO: 584 - DNA, 1458 bp, Rattus norvegicus
  ref <308>: DATABASE ACCESSION NUMBER: Refseq / NM_052809
  ref <309>: DATABASE ENTRY DATE: 2002-05-21
gagggtttaggctggtctccggtgacctcctagtcctaaatcttgatacccttgcaagagctttgagcgtgtggggtcccgggcgttcggggtcccgggtgtgtgcggtttgtatagcctgaagccggggtcctccgcgctcgcgtcctccgcagctggactgaagagacgcgtcccagccctgcggggatggaacggaccgagctgctgaagccccggaccctggccgacctcatccgaatcttgcatgagctcttcgccggggacgaagtcaatgtggaggaggtgcaggctgtgctggaagcctacgagagcaatcctgccgagtgggctttgtatgccaaattcgatcaatacaggtatacccgaaaccttgtggatcaaggaaatgggaagtttaatctgatgattctgtgctggggtgaagggcatggcagcagtattcacgatcacacggactcccactgctttttgaagctgctgcaaggaaatctaaaggagacattgtttgactggcctgacaagaaatccaacgagatgatcaagaagtctgaaagaactttgagggaaaatcagtgtgcctacattaatgattctattggcttacatcgagtagagaacgtcagccacacagagcctgctgtgagccttcacttgtacagtccacctttcgatacatgccatgcctttgaccaacgaacagggcataaaaacaaagtcaccatgacattccacagcaaatttggaatcagaactccatttacaacttcaggttcactggagaacaactaagacctgccaagcctttcaaagttttgcttctgggtcgttggaatgttttaccttggataagagaggccacccatcatttgctgtccagttatacattttaataagtccatgctcagtgtgtatactaaggaagcaaaccatcccctgagctatgcaggagaaaaatcccactaaagaaaaagtcacttgatttttaatagccaaatcaccttgctcccagttcttctgtcttctaactccatggaaattctattgggagttctcagtggggttttttttcaaccttaggaaagcacttctggtctctgaactctaataatcaataagtaaaaatgaagaaaccacaagctatcacatgtctgttttcatacctggaagtctaagtgtggaaatctttaatttactttgtatgttcttaatgtttgacaagaatttttttaaatcttggttttcagttttttcaaccctgtttgacaaattcctatgctgtggagactagggatgcagatagcagtttggtgtttggtagtgaacagcagtggggccagaaatgtgcatgtatccagacctcctgcaaataaaaactgaaactcatgtgtaatgtgtgccaccaccttaagctgccaccaaaattgccaaacgactttaataaaactggatttgaga

SEQ ID NO: 585 - protein, 200 aa, Rattus norvegicus
  ref <308>: DATABASE ACCESSION NUMBER: Refseq / NP_434696
  ref <309>: DATABASE ENTRY DATE: 2002-05-21
MERTELLKPRTLADLIRILHELFAGDEVNVEEVQAVLEAYESNPAEWALYAKFDQYRYTRNLVDQGNGKFNLMILCWGEGHGSSIHDHTDSHCFLKLLQGNLKETLFDWPDKKSNEMIKKSERTLRENQCAYINDSIGLHRVENVSHTEPAVSLHLYSPPFDTCHAFDQRTGHKNKVTMTFHSKFGIRTPFTTSGSLENN

SEQ ID NO: 586 - DNA, 1556 bp, Homo sapiens
  ref <308>: DATABASE ACCESSION NUMBER: Refseq / NM_001801
  ref <309>: DATABASE ENTRY DATE: 2002-11-05
cggtcagatttgtgtgtgcaccgcgtctccagcgatcccggatccactgcgctgccaggggcctgggggtgggtctcttgctgtctctgcgacgacatccttacgtttcggcactctaatgctgggtttgtgcgtgtgtgtctgcttagcggtctagcgggctgttaggctccctcgcccccagctccttggctcgctcagctcctccaccgcagcccagcagtgagacgcgcgcgcagccagctccccacgagatggaacagaccgaagtgctgaagccacggaccctggctgatctgatccgcatcctgcaccagctctttgccggcgatgaggtcaatgtagaggaggtgcaggccatcatggaagcctacgagagcgaccccatcgagtgggcaatgtacgccaagttcgaccagtacaggtatacccgaaatcttgtggatcaaggaaatggaaaatttaatctgatgattctctgttggggtgaaggacatggcagcagtattcatgatcataccaactcccactgctttctgaagatgctacagggaaatctaaaggagacattatttgcctggcctgacaaaaaatccaatgagatggtcaagaagtctgaaagagtcttgagggaaaaccagtgtgcctacatcaatgattccattggcttacatcgagtagagaacatcagccatacggaacctgctgtgagccttcacttgtacagtccaccttttgatacatgccatgcctttgatcaaagaacaggacataaaaacaaagtcacaatgacattccatagtaaatttggaatcagaactccaaatgcaacttcgggctcgctggagaacaactaaggggcaccaaaccctctgaggttttactttaaggttcgctgtatgtttgccttggacaaaaaggctacctaccacgtgctatccagtaatatacttaaataagccaatacttagatctactgtaaggcagatgctaattataaggcattaagtaagcaaatagtgccctcagctactgcagaagaaaagtcccactgaggaaaagaaagtcttgtgatttttaaaggcaagttttcaagtgctctcatagttctatcctctaattccattaaatccatactaggagcgtcagtgagggttttcatagcttttggaaatactttggtctctgaactgtaattagcaagaagtaaaaacagaaacgtcaaacgtcaaatgtttgctttgttacctggaggactaaatgtagatgtctttagtatactttgtatgttcttaaatattggaagataattttgtgaatctgtagattttattttttcagtcttaccttacaaatttcttttctatgaataatagaggaactcacggcactctgccacttgttaatgaaaggaagtgcagaggatttagaaaagtacatgatccccagaccacaacaaaccaaaacataaactcatgtctgtgtcccatggtcatagtcaaagattttgtactgctaaaattaccaaataatttaaataaagtggatttgaacac

SEQ ID NO: 587 - protein, 200 aa, Homo sapiens
  ref <308>: DATABASE ACCESSION NUMBER: Refseq / NP_001792
  ref <309>: DATABASE ENTRY DATE: 2002-11-05
MEQTEVLKPRTLADLIRILHQLFAGDEVNVEEVQAIMEAYESDPIEWAMYAKFDQYRYTRNLVDQGNGKFNLMILCWGEGHGSSIHDHTNSHCFLKMLQGNLKETLFAWPDKKSNEMVKKSERVLRENQCAYINDSIGLHRVENISHTEPAVSLHLYSPPFDTCHAFDQRTGHKNKVTMTFHSKFGIRTPNATSGSLENN

SEQ ID NO: 588 - DNA, 281 bp, Rattus norvegicus
  ref <308>: DATABASE ACCESSION NUMBER: EMBL / AA893105
  ref <309>: DATABASE ENTRY DATE: 2000-03-03
atgtagaggtgagcacgccatcctcagagcaccattcggatgctaaaccgtggtttctcaccttaactatattaaccttgcatgatgtcgcttgcttcccgaggcacctgaaagcatccatctggatcacttgtttacgtctcaaacactcgtctagactctgagttcgtagagtcatcgcgttgagactctatcttttatattatttcttagtgctttttgctcactgaaatttctaaagatggtttttgcctttgaagagggggacggggagagagagt

SEQ ID NO: 589 - DNA, 1723 bp, Rattus norvegicus
  ref <308>: DATABASE ACCESSION NUMBER: Refseq / NM_031063
  ref <309>: DATABASE ENTRY DATE: 2002-11-05
gaattccatggagaagaccgggagctactgccggagtttcggctcacctgggcgctggccggggcaggagtctcaggagccatgttgtcagaagtcctgctggtgtctgctccagggaaagtcattctccatggagaacatgctgtggtccatggcaaggtagctctggcggtggccttgaacttgagaacatttctcgtgctgcgaccgcagagcaatgggaaagtgagcctcaatttaccaaacgtcggtattaagcaggtctgggatgtggccacacttcagctgctggacacaggctttcttgagcaaggcgatgtcccggcacccaccttggagcaactggagaagctgaagaaggtggcgggcctcccccgagactgtgtaggcaacgaaggcctgtctctgcttgcctttctgtacctgtacctggctatctgccggaaacagaggacactcccaagcctggacatcatggtgtggtcggaactgccccctggggcgggcttgggctccagtgcagcctactcggtgtgtgtggcagccgccctcctgactgcctgtgaggaggtcaccaacccgctcaaggacaggggctccattggcagttggcccgaggaggacctgaagtcaattaacaagtgggcctacgagggggagagagtgatccatgggaacccctctggcgtggacaattccgtcagcacctggggaggagccctgcgctaccagcaagggaagatgtcatccttgaagaggctcccagctctgcagatcctgctcaccaacaccaaggtcccacgaagcaccaaggccctcgtggctggcgtcagaagcaggctaatcaagttccctgagatcatggccccgctcctgacatcaattgacgcaatctccctggagtgtgagcgcgtgctgggagagatggcggccgcaccagtcccagaacagtaccttgtcctagaagagctaatggacatgaaccagcaccatctgaatgcccttggtgtgggccacgcctccctggaccagctctgtcaggtaacagcagcacatggactgcacagcaagctgactggcgcaggcggcggcggctgtggcatcaccctcctgaagccaggtctagagcgagcaaaagtggaggccgccaagcaggccctgaccggctgcgggtttgactgctgggagaccagcattggagcgcctggggtctccatgcactcagccacctccatagaggaccctgtccgacaagccctgggcctctgacatgtcatcctgccaagaagcttccacgtatctggggctggagttggcccctgtgctggccactaacacatttcctgctggtagtgccttgtagactctgagaggcaccacctccatggcccatctgtatcctggcactgctgaagccagacaggcatcagttgccgggtcttctgagacagcaggctgacacagtaggccttccccctgggtgattctgcctgggcctggcctctgtcggcctcacacaaactctccggctcctagccacgcaacccttctgtcctcagatgccggcccctttggaaccgcctagccagtggctcatgtctcctgtcctctctcggggatcatcggctgaggcaaggcatgccgactgctttatccccgtgtgtacctgtggacaagctgcccatggtggggcgagggaagggggaataaaatgagctcgtac

SEQ ID NO: 590 - protein, 395 aa, Rattus norvegicus
  ref <308>: DATABASE ACCESSION NUMBER: Refseq / NP_112325
  ref <309>: DATABASE ENTRY DATE: 2002-11-05
MLSEVLLVSAPGKVILHGEHAVVHGKVALAVALNLRTFLVLRPQSNGKVSLNLPNVGIKQVWDVATLQLLDTGFLEQGDVPAPTLEQLEKLKKVAGLPRDCVGNEGLSLLAFLYLYLAICRKQRTLPSLDIMVWSELPPGAGLGSSAAYSVCVAAALLTACEEVTNPLKDRGSIGSWPEEDLKSINKWAYEGERVIHGNPSGVDNSVSTWGGALRYQQGKMSSLKRLPALQILLTNTKVPRSTKALVAGVRSRLIKFPEIMAPLLTSIDAISLECERVLGEMAAAPVPEQYLVLEELMDMNQHHLNALGVGHASLDQLCQVTAAHGLHSKLTGAGGGGCGITLLKPGLERAKVEAAKQALTGCGFDCWETSIGAPGVSMHSATSIEDPVRQALGL

SEQ ID NO: 591 - DNA, 1952 bp, Homo sapiens
  ref <308>: DATABASE ACCESSION NUMBER: Refseq / NM_000431
  ref <309>: DATABASE ENTRY DATE: 2002-11-05
tggggagctgctccggcttcggcgcggaggggcggcggccggggaggcggcggcggcggcaggattcccaggagccatgttgtcagaagtcctactggtgtctgctccggggaaagtcatccttcatggagaacatgccgtggtacatggcaaggtagcactggctgtatccttgaacttgagaacattcctccggcttcaaccccacagcaatgggaaagtggacctcagcttacccaacattggtatcaagcgggcctgggatgtggccaggcttcagtcactggacacaagctttctggagcaaggtgatgtcacaacacccacctcagagcaagtggagaagctaaaggaggttgcaggcttgcctgacgactgtgctgtcaccgagcgcctggctgtgctggcctttctttacttatacctgtccatctgccggaagcagagggccctgccgagcctggatatcgtagtgtggtcggagctgccccccggggcgggcttgggctccagcgccgcctactcggtgtgtctggcagcagccctcctgactgtgtgcgaggagatcccaaacccgctgaaggacggggattgcgtcaacaggtggaccaaggaggatttggagctaattaacaagtgggccttccaaggggagagaatgattcacgggaacccctccggagtggacaatgctgtcagcacctggggaggagccctccgataccatcaagggaagatttcatccttaaagaggtcgccagctctccagatcctgctgaccaacaccaaagtccctcgcaataccagggcccttgtggctggcgtcagaaacaggctgctcaagttcccagagatcgtggcccccctcctgacctcaatagatgccatctccctggagtgtgagcgcgtgctgggagagatgggggaagccccagccccggagcagtacctcgtgctggaagagctcattgacatgaaccagcaccatctgaatgccctcggcgtgggccacgcctctctggaccagctctgccaggtgaccagggcccgcggacttcacagcaagctgactggcgcaggcggtggtggctgtggcatcacactcctcaagccagggctggagcagccagaagtggaggccacgaagcaggccctgaccagctgtggctttgactgcttggaaaccagcatcggtgcccccggcgtctccatccactcagccacctccctggacagccgagtccagcaagccctggatggcctctgagaggagcccacgacactgcagccccacccagatgcccctttctggattattctgggggctgcagttcgactctgtgctggccagcgagcgcccagctcctgacactgctggagaggccccagccgcttggcgatgccagccaagctctgcagtcccagcggtgggacctagggaggcatggtctgccctctgcatcctctggagccagccgagcaggaggcctaggagggtcctctgagactccagacctgaggcgagaagggctgcttccctgaagctcccacagtcccatctgcttcaggcccccgccttggcctgtgttcttcctggccgcctgggtccaatgctcaggtgctggggcctggttcccggagaagtgtgccttctctctcccttttcagggacggccccctgtctctcagggccaggcctctccctcctccaggaagccttcccctaccccttgtcgcccctccctcccagagcacctgctgtctgggtggctcactcagcacttggcccttctacctagcgggatggggctcccccaggggctgtcccggaggcggtgggcctggttaaataaggcagtgtggccttggtttatatgcactttcttccgatctgtacctgagaggtttgtggaaaagatggcaaatggggaataaaaagattttgtgtcaac

SEQ ID NO: 592 - protein, 396 aa, Homo sapiens
  ref <308>: DATABASE ACCESSION NUMBER: Refseq / NP_000422
  ref <309>: DATABASE ENTRY DATE: 2002-11-05
MLSEVLLVSAPGKVILHGEHAVVHGKVALAVSLNLRTFLRLQPHSNGKVDLSLPNIGIKRAWDVARLQSLDTSFLEQGDVTTPTSEQVEKLKEVAGLPDDCAVTERLAVLAFLYLYLSICRKQRALPSLDIVVWSELPPGAGLGSSAAYSVCLAAALLTVCEEIPNPLKDGDCVNRWTKEDLELINKWAFQGERMIHGNPSGVDNAVSTWGGALRYHQGKISSLKRSPALQILLTNTKVPRNTRALVAGVRNRLLKFPEIVAPLLTSIDAISLECERVLGEMGEAPAPEQYLVLEELIDMNQHHLNALGVGHASLDQLCQVTRARGLHSKLTGAGGGGCGITLLKPGLEQPEVEATKQALTSCGFDCLETSIGAPGVSIHSATSLDSRVQQALDGL

SEQ ID NO: 593 - DNA, 441 bp, Rattus norvegicus
  misc_feature (1)..(441): n=a, c, g or t
  ref <308>: DATABASE ACCESSION NUMBER: EMBL / AA859990
  ref <309>: DATABASE ENTRY DATE: 2000-03-03
gcttttctcttgcttctgggacctagtccctctctctctttgccccggctctgctggccaagtcgtgggtcttccctntaacccctcattgcatgatatgttcagtgagccctctccagtcattgccactcactgctaaccacacggtacattccagcattaccctctggtggggctcttcagaaagccagtgtccaccctcctccacaacctcgttctgccatctttctcttaccatctggtttagaatgaggcaggattccctttcccatttgttaacacattgaacacacgtgtagaaggagacagtaccatcaaccattctccctgcctccttaactttgtactaggctggcctggacctgtaccagctcggctatcttcatctgtttcatattatttattattttaattttctattaaattattggaataaagttg

SEQ ID NO: 594 - DNA, 759 bp, Homo sapiens
  ref <308>: DATABASE ACCESSION NUMBER: EMBL / BE265139
  ref <309>: DATABASE ENTRY DATE: 2000-07-14
tccacgggcggctactcttcctcaaggatgtcctgggggacgagatctgctgctggtctttctacgggcagggccgcaaaatcgccgaggtgtgctgcacctccattgtctatgctacggagaagaagcagaccaaggtggaatttccagaggcccggatcttcgaggagaccctgaacatcctcatctacgagactccccggggcccagacccagccctcctggaggccacagggggagcagctggagctggtggggctggccgcggggaggatgaagagaaccgagagcaccgtgtccgcaggatccatgtccggcgccatatcacccacgacgagcgtcctcatggccaacaaattgtcttcaaggactgacctctgaccctccccctgccttcctcttgccttgggacccagtccctctctctttccctccccttcccagacttttgccccggctctgctggccaagtcgtgggtcctcctctgtcccttcattgcatggcacagctcactttggcccttctccacccatcccaaccccatgtgctaacaacatggtacattccggccccaccactcagagccttccgaagccaacactttgtccccaacctggcctgcgtctttcctctccagctggttaagagggattagaatccccttctccttttttagtgcttcgtccatggcaagtgtggcggccttcctgaattcacacagtctgagcgactccgggtctggggggtatcgggccttc

SEQ ID NO: 595 - DNA, 5896 bp, Rattus norvegicus
  ref <308>: DATABASE ACCESSION NUMBER: Refseq / NM_013180
  ref <309>: DATABASE ENTRY DATE: 2003-01-14
cgttgctgtcgggtgcagcgcgcaggaatgcagcccgcctgactcaccagcgcctccttcctacctgcgccgcccgtccataaagcactgctggtcccgcccgccgccgcccgacaagctgtccggccgggctcgcccgcgcactcagctcgacccaacgcagcccaagtccgaggtagtcccactcaggaggaggaagaggaggatggcagggctatgttccagcccgtgggtgaagctgctactggcagtagtgctgagtgccggtctccctggaaacatggccaaccgctgtaagaaggctcaggtgaagagctgtacggagtgcatccgagtggacaagagctgtgcctactgcacagacgagctgttcaaggagcgacgctgcaacacccaggcggacgttctggctgcaggctgccggggagagagcgtgttggtcatggagagcagccttgagatcacagagaacatccagattgacaccagcctgcaccgcagccaggtatctccccaaggcctgcaagtgcggctgcggccgggtgaggagcgcaactttgtgttcaaggtgtttgagcccctggagagccccgtggatctgtatatcctcatggacttttccaactccatgtctgatgatctggacaacctcaagcagatggggcagaacctggccaagatcctgcgccagctcaccagtgactacactattggattcggaaagtttgtggacaaagtcagtgtccctcagacggacatgaggcccgagaagctgaaggagccgtggcccaacagcgaccccccattctccttcaagaatgttatcagcttaacagagaatgtggaagaattctgggacaaactgcaaggagaacgcatctcaggcaacctggacgctcctgaaggaggcttcgacgccatcctgcagacagccgtgtgcacaagggacattggctggagagcggacagcacccacctgctggtgttctccaccgagtctgccttccactatgaggctgatggtgccaacgtgctggccggcatcatgaaccgcaatgatgagaagtgccacctggatgccacaggcgcctacacccagtataagacccaggactacccatctgtgcccacactggttcgcctgcttgccaaacacaacattatccccatctttgccgtcaccaactactcttacagttactacgagaagctccataaatatttccctgtctcctctctgggagtcctgcaggaagattcatccaacatcgtggagctgctggaggaggctttctatcgaattcgctccaacctggacatccgggctctggacagcccgagaggcctgaggacagaggtcacctccgataccctccagaagacagagactgggtcctttcacatcaagcggggggaagtgggcacatacaatgtgcatcttcgggcagtggaggacatagatgggacacacgtgtgccagctggccaaagaagaccaaagaggtaacatccacctgaaaccctccttctccgatggcctccggatggacgcgagcgtcatctgtgacatgtgcgcctgcgagctgcaaaaggaagttcagtcagctcgctgtcactacagaggagacttcatgtgtggacactgtgtgtgcaacgagggctggagtggcaaaacctgcaattgctccacgggttccctgagtgacacgcagccctgcctgcgtgagggtgaggacaaaccatgctcgggccatggcgagtgccagtgcggacgttgtgtgtgctacggtgaaggccgctacgagggtcacttctgcgagtatgacaacttccagtgtccccgcacctctggattcctttgcaatgaccggggacgctgctccatgggagagtgtgtgtgtgagcctggttggaccggccgcagctgtgactgtcccctcagcaatgccacctgtatcgatagcaatgggggcatctgcaatggactaggcttctgtgagtgtggccgttgtcactgcaaccagcggtcttcgctctacacggacaccacctgtgagatcaactactcggcgatacgcctgggcctctgtgaggacctccgctcctgtgtacagtgccaggcctggggcactggggagaagaaagggcgcacgtgtgaggaatgcaactttaaggtcaagatggtagacgagcttaagaaagcggaagaggtggtggagtactgctccttccgggacgaggatgacgactgcacttacagctacaccgtggagggcgacggcagccctgggcccaacagcaccgtcctggtccacaagaagaaagactgcctcccggctccttcttggtggctcattcccctgctcatcttcctcctgttgctcctggtgttgcttctgctgctctgctggaaatactgtgcctgctgcaaagcctgcctgggacttcttccttgctgcaaccaaggtcacatggtgggctttaaggaagatcactatatgctgcgggagaacctgatggcctctgaccacctggacacgcccatgctgagaagtgggaacctcaagggacgagacacagtccgctggaagatcaccaacaatgtgcaacggcctggctttgccacccatgctgccagcatcagccccacagagctcgtaccctatgggctatccctgcgccttggccgcctctgcactgagaacctcatgaagcctggcacccgagagtgtgaccagctacgccaggaggtggaggaaaatctgaatgaggtatacagacaagtcaacggcgtacacaagctccagcagacgaagttccgacagcaacccaacgctgggaaaaagcaagaccacaccattgtggacacagtgttgctggcgccccgctctgccaagcagtcgctgctgaagctgacagagaagcaggtggagcaggggtccttccatgaactcaaggtggcccctggttactacaccctcacagcagagcaggatgcccggggcatggtggagttccaggagggggtagagctggtggacgtgcgtgtgcccctcttcatccggcctgaggatgatgatgagaaacagctgctggtggaggccattgatgtccccgtgggcactgccacccttggtcgacgcctggtaaacatcaccatcattaaggagcaagctagcgggatagtgtcctttgagcagcctgaatactcagtgagtcgtggagaccaggtggcccgcatccctgtcatccggcacatcctggacaacggcaagtcccaggtctcctatagcacacaggataatacagcacatggacaccgggattatgtccctgtggaaggggagctgttgttctaccccggagagacctggaaggaactgcaggtgaagctcctggagctgcaggaagtcgactccctccttcgtggccgccaggtccgacgcttccaagttcaactcagcaaccccaagtttggagcccgcctgggccagcccaacacagccactgttatcatcggggaacaagatgaaacggacagaagtctcataaatgagatatccgcatcgccgccactaccccgtggagacctgggtgccccgcagaaccccaatgccaaggctgccggatccaggaagatccatttcaactggctgccccctcctggcaagccaatggggtatagggtgaaatactgggtccagggcgactctgagtccgaagcccacctgctggacagcaaggtgccctcagtggagctcaccaacctgtatccctattgcgactacgaaatgaaggtgtgcgcctacggggcacacggggaggggccctatagctcactggtgtcctgccgcacccaccaggaagtgcccagtgagccaggaaggctggctttcaatgtagtttcttctacggtgacccagctgagctgggcagaaccagctgaaaccaacggggagatcacagcctatgaggtctgctatggactggtcaacgaggacaaccgacccattggacctatgaagaaggtgcttgtggacaaccccaagaaccggatgctgctcattgagaatcttcgagagtcccagccataccgatacacggtgaaggcgcgaaacggggcaggatggggacccgagagagaggctatcatcaacctggccacacagcccaagcggcccatgtccattcctatcatcccagacatccccatagtggacgcccagggtggagaagactacgaaaacttcctcatgtacagtgacgacgttctgcgctccccagccagcagccagaggcccagcgtttcagatgacactgagcacctggtgaatggccggatggactttgcctatccaggcagtgccaactccctgcataggatgactgctgccaacgtggcctatggcacacatctaagcccacaccagacccaccgaatgctgagcacgtcttctacccttacccgggactaccactctctgacgcgcacagaccactctcagtcaggcacacttccccgggactactccactctcacttccctttcctcccaaggcctccctcctatctgggaagatgggaggagcaggcttccgctgtcctggacccttgggtcctggagccgggctcagatgaagggtgtgcccgcatccaggggctcaccagactctataatcctggccgggcagtcagcagcgccctcctggggtacagattcccgtggggctatgggtgtgcccgacacacccactcggctggtgttctccgccctggggcccacatctctgaaggtgagctggcaggagccacagtgtgatcgagcactgctgggctacagcgtggaataccagctactcaacggcggcgagatgcatcggctcaacatccctaaccctggccaaacctctgtggtggtagaggatctcctgcctaaccactcctatgtgttccgggtacgggcacaaagccaggagggctggggccgggagcgagagggtgtcatcaccatcgagtcccaggtgcacccgcagagccctctctgccccctgccaggctccgccttcaccttgagcacccccagcgccccaggccccctggtgttcactgccctaagcccagactctctgcagctgagctgggagcgcccaagaaggcccaacggagatatccttggctacctggtgacctgtgagatggcccaaggaggaggaccagccagaaccttccgggtggatggggacaaccctgagagccggctgacggttcctggcctcagtgagaacgttccttacaagttcaaggtgcaggcccggacaacagagggctttgggcccgagcgtgagggtatcatcaccatcgagtctcaggatggaggccccttcccacagctgggcagccattctgggcttttccagaacccactgcaaagtgagtacagcactgtcaccagcactcacagcactaccaccaccgagcccttccttatagatggactaaccctggggacccagcgcctggaagcagggggctccctcacccggcatgtgacccaggaatttgtgagccggaccctgaccaccagtggctctctcagcactcatatggaccaacagttcttccaaacctgaatcccccaggaacctgggcccctccttgcctcctcgccctggcgccttcttcctctgctgttgtacccacctgcatgctgatcacagagccagcacctgtagtcagagagcgggggtaggtgctgtctgggaggcatgaagtgggtagaggtgacacaagacctctgactgcatcctgccctgggtccaaacccacatgtaaccaaaaagctggagccgacacaaggacccagcctttgttctgcacttaataaaagactttgctcc

SEQ ID NO: 596 - protein, 1807 aa, Rattus norvegicus
  ref <308>: DATABASE ACCESSION NUMBER: Refseq / NP_037312
  ref <309>: DATABASE ENTRY DATE: 2003-01-14
MAGLCSSPWVKLLLAVVLSAGLPGNMANRCKKAQVKSCTECIRVDKSCAYCTDELFKERRCNTQADVLAAGCRGESVLVMESSLEITENIQIDTSLHRSQVSPQGLQVRLRPGEERNFVFKVFEPLESPVDLYILMDFSNSMSDDLDNLKQMGQNLAKILRQLTSDYTIGFGKFVDKVSVPQTDMRPEKLKEPWPNSDPPFSFKNVISLTENVEEFWDKLQGERISGNLDAPEGGFDAILQTAVCTRDIGWRADSTHLLVFSTESAFHYEADGANVLAGIMNRNDEKCHLDATGAYTQYKTQDYPSVPTLVRLLAKHNIIPIFAVTNYSYSYYEKLHKYFPVSSLGVLQEDSSNIVELLEEAFYRIRSNLDIRALDSPRGLRTEVTSDTLQKTETGSFHIKRGEVGTYNVHLRAVEDIDGTHVCQLAKEDQRGNIHLKPSFSDGLRMDASVICDMCACELQKEVQSARCHYRGDFMCGHCVCNEGWSGKTCNCSTGSLSDTQPCLREGEDKPCSGHGECQCGRCVCYGEGRYEGHFCEYDNFQCPRTSGFLCNDRGRCSMGECVCEPGWTGRSCDCPLSNATCIDSNGGICNGLGFCECGRCHCNQRSSLYTDTTCEINYSAIRLGLCEDLRSCVQCQAWGTGEKKGRTCEECNFKVKMVDELKKAEEVVEYCSFRDEDDDCTYSYTVEGDGSPGPNSTVLVHKKKDCLPAPSWWLIPLLIFLLLLLVLLLLLCWKYCACCKACLGLLPCCNQGHMVGFKEDHYMLRENLMASDHLDTPMLRSGNLKGRDTVRWKITNNVQRPGFATHAASISPTELVPYGLSLRLGRLCTENLMKPGTRECDQLRQEVEENLNEVYRQVNGVHKLQQTKFRQQPNAGKKQDHTIVDTVLLAPRSAKQSLLKLTEKQVEQGSFHELKVAPGYYTLTAEQDARGMVEFQEGVELVDVRVPLFIRPEDDDEKQLLVEAIDVPVGTATLGRRLVNITIIKEQASGIVSFEQPEYSVSRGDQVARIPVIRHILDNGKSQVSYSTQDNTAHGHRDYVPVEGELLFYPGETWKELQVKLLELQEVDSLLRGRQVRRFQVQLSNPKFGARLGQPNTATVIIGEQDETDRSLINEISASPPLPRGDLGAPQNPNAKAAGSRKIHFNWLPPPGKPMGYRVKYWVQGDSESEAHLLDSKVPSVELTNLYPYCDYEMKVCAYGAHGEGPYSSLVSCRTHQEVPSEPGRLAFNVVSSTVTQLSWAEPAETNGEITAYEVCYGLVNEDNRPIGPMKKVLVDNPKNRMLLIENLRESQPYRYTVKARNGAGWGPEREAIINLATQPKRPMSIPIIPDIPIVDAQGGEDYENFLMYSDDVLRSPASSQRPSVSDDTEHLVNGRMDFAYPGSANSLHRMTAANVAYGTHLSPHQTHRMLSTSSTLTRDYHSLTRTDHSQSGTLPRDYSTLTSLSSQGLPPIWEDGRSRLPLSWTLGSWSRAQMKGVPASRGSPDSIILAGQSAAPSWGTDSRGAMGVPDTPTRLVFSALGPTSLKVSWQEPQCDRALLGYSVEYQLLNGGEMHRLNIPNPGQTSVVVEDLLPNHSYVFRVRAQSQEGWGREREGVITIESQVHPQSPLCPLPGSAFTLSTPSAPGPLVFTALSPDSLQLSWERPRRPNGDILGYLVTCEMAQGGGPARTFRVDGDNPESRLTVPGLSENVPYKFKVQARTTEGFGPEREGIITIESQDGGPFPQLGSHSGLFQNPLQSEYSTVTSTHSTTTTEPFLIDGLTLGTQRLEAGGSLTRHVTQEFVSRTLTTSGSLSTHMDQQFFQT

SEQ ID NO: 597 - DNA, 5994 bp, Homo sapiens
  ref <308>: DATABASE ACCESSION NUMBER: Refseq / NM_000213
  ref <309>: DATABASE ENTRY DATE: 2002-11-05
gcgctgcccgcctcgtccccaccccccaaccccccgcgcccgccctcggacagtccctgctcgcccgcgcgctgcagccccatctcctagcggcagcccaggcgcggagggagcgagtccgccccgaggtaggtccaggacgggcgcacagcagcagccgaggctggccgggagagggaggaagaggatggcagggccacgccccagcccatgggccaggctgctcctggcagccttgatcagcgtcagcctctctgggaccttggcaaaccgctgcaagaaggccccagtgaagagctgcacggagtgtgtccgtgtggataaggactgcgcctactgcacagacgagatgttcagggaccggcgctgcaacacccaggcggagctgctggccgcgggctgccagcgggagagcatcgtggtcatggagagcagcttccaaatcacagaggagacccagattgacaccaccctgcggcgcagccagatgtccccccaaggcctgcgggtccgtctgcggcccggtgaggagcggcattttgagctggaggtgtttgagccactggagagccccgtggacctgtacatcctcatggacttctccaactccatgtccgatgatctggacaacctcaagaagatggggcagaacctggctcgggtcctgagccagctcaccagcgactacactattggatttggcaagtttgtggacaaagtcagcgtcccgcagacggacatgaggcctgagaagctgaaggagccctggcccaacagtgacccccccttctccttcaagaacgtcatcagcctgacagaagatgtggatgagttccggaataaactgcagggagagcggatctcaggcaacctggatgctcctgagggcggcttcgatgccatcctgcagacagctgtgtgcacgagggacattggctggcgcccggacagcacccacctgctggtcttctccaccgagtcagccttccactatgaggctgatggcgccaacgtgctggctggcatcatgagccgcaacgatgaacggtgccacctggacaccacgggcacctacacccagtacaggacacaggactacccgtcggtgcccaccctggtgcgcctgctcgccaagcacaacatcatccccatctttgctgtcaccaactactcctatagctactacgagaagcttcacacctatttccctgtctcctcactgggggtgctgcaggaggactcgtccaacatcgtggagctgctggaggaggccttcaatcggatccgctccaacctggacatccgggccctagacagcccccgaggccttcggacagaggtcacctccaagatgttccagaagacgaggactgggtcctttcacatccggcggggggaagtgggtatataccaggtgcagctgcgggcccttgagcacgtggatgggacgcacgtgtgccagctgccggaggaccagaagggcaacatccatctgaaaccttccttctccgacggcctcaagatggacgcgggcatcatctgtgatgtgtgcacctgcgagctgcaaaaagaggtgcggtcagctcgctgcagcttcaacggagacttcgtgtgcggacagtgtgtgtgcagcgagggctggagtggccagacctgcaactgctccaccggctctctgagtgacattcagccctgcctgcgggagggcgaggacaagccgtgctccggccgtggggagtgccagtgcgggcactgtgtgtgctacggcgaaggccgctacgagggtcagttctgcgagtatgacaacttccagtgtccccgcacttccgggttcctgtgcaatgaccgaggacgctgctccatgggccagtgtgtgtgtgagcctggttggacaggcccaagctgtgactgtcccctcagcaatgccacctgcatcgacagcaatgggggcatctgtaatggacgtggccactgtgagtgtggccgctgccactgccaccagcagtcgctctacacggacaccatctgcgagatcaactactcggcgatccacccgggcctctgcgaggacctacgctcctgcgtgcagtgccaggcgtggggcaccggcgagaagaaggggcgcacgtgtgaggaatgcaacttcaaggtcaagatggtggacgagcttaagagagccgaggaggtggtggtgcgctgctccttccgggacgaggatgacgactgcacctacagctacaccatggaaggtgacggcgcccctgggcccaacagcactgtcctggtgcacaagaagaaggactgccctccgggctccttctggtggctcatccccctgctcctcctcctcctgccgctcctggccctgctactgctgctatgctggaagtactgtgcctgctgcaaggcctgcctggcacttctcccgtgctgcaaccgaggtcacatggtgggctttaaggaagaccactacatgctgcgggagaacctgatggcctctgaccacttggacacgcccatgctgcgcagcgggaacctcaagggccgtgacgtggtccgctggaaggtcaccaacaacatgcagcggcctggctttgccactcatgccgccagcatcaaccccacagagctggtgccctacgggctgtccttgcgcctggcccgcctttgcaccgagaacctgctgaagcctgacactcgggagtgcgcccagctgcgccaggaggtggaggagaacctgaacgaggtctacaggcagatctccggtgtacacaagctccagcagaccaagttccggcagcagcccaatgccgggaaaaagcaagaccacaccattgtggacacagtgctgatggcgccccgctcggccaagccggccctgctgaagcttacagagaagcaggtggaacagagggccttccacgacctcaaggtggcccccggctactacaccctcactgcagaccaggacgcccggggcatggtggagttccaggagggcgtggagctggtggacgtacgggtgcccctctttatccggcctgaggatgacgacgagaagcagctgctggtggaggccatcgacgtgcccgcaggcactgccaccctcggccgccgcctggtaaacatcaccatcatcaaggagcaagccagagacgtggtgtcctttgagcagcctgagttctcggtcagccgcggggaccaggtggcccgcatccctgtcatccggcgtgtcctggacggcgggaagtcccaggtctcctaccgcacacaggatggcaccgcgcagggcaaccgggactacatccccgtggagggtgagctgctgttccagcctggggaggcctggaaagagctgcaggtgaagctcctggagctgcaagaagttgactccctcctgcggggccgccaggtccgccgtttccacgtccagctcagcaaccctaagtttggggcccacctgggccagccccactccaccaccatcatcatcagggacccagatgaactggaccggagcttcacgagtcagatgttgtcatcacagccaccccctcacggcgacctgggcgccccgcagaaccccaatgctaaggccgctgggtccaggaagatccatttcaactggctgcccccttctggcaagccaatggggtacagggtaaagtactggattcagggcgactccgaatccgaagcccacctgctcgacagcaaggtgccctcagtggagctcaccaacctgtacccgtattgcgactatgagatgaaggtgtgcgcctacggggctcagggcgagggaccctacagctccctggtgtcctgccgcacccaccaggaagtgcccagcgagccagggcgtctggccttcaatgtcgtctcctccacggtgacccagctgagctgggctgagccggctgagaccaacggtgagatcacagcctacgaggtctgctatggcctggtcaacgatgacaaccgacctattgggcccatgaagaaagtgctggttgacaaccctaagaaccggatgctgcttattgagaaccttcgggagtcccagccctaccgctacacggtgaaggcgcgcaacggggccggctgggggcctgagcgggaggccatcatcaacctggccacccagcccaagaggcccatgtccatccccatcatccctgacatccctatcgtggacgcccagagcggggaggactacgacagcttccttatgtacagcgatgacgttctacgctctccatcgggcagccagaggcccagcgtctccgatgacactggctgcggctggaagttcgagcccctgctgggggaggagctggacctgcggcgcgtcacgtggcggctgcccccggagctcatcccgcgcctgtcggccagcagcgggcgctcctccgacgccgaggcccccacggccccccggacgacggcggcgcgggcgggaagggcggcagccgtgccccgcagtgcgacacccgggccccccggagagcacctggtgaatggccggatggactttgccttcccgggcagcaccaactccctgcacaggatgaccacgaccagtgctgctgcctatggcacccacctgagcccacacgtgccccaccgcgtgctaagcacatcctccaccctcacacgggactacaactcactgacccgctcagaacactcacactcgaccacactgcccagggactactccaccctcacctccgtctcctcccacgactctcgcctgactgctggtgtgcccgacacgcccacccgcctggtgttctctgccctggggcccacatctctcagagtgagctggcaggagccgcggtgcgagcggccgctgcagggctacagtgtggagtaccagctgctgaacggcggtgagctgcatcggctcaacatccccaaccctgcccagacctcggtggtggtggaagacctcctgcccaaccactcctacgtgttccgcgtgcgggcccagagccaggaaggctggggccgagagcgtgagggtgtcatcaccattgaatcccaggtgcacccgcagagcccactgtgtcccctgccaggctccgccttcactttgagcactcccagtgccccaggcccgctggtgttcactgccctgagcccagactcgctgcagctgagctgggagcggccacggaggcccaatggggatatcgtcggctacctggtgacctgtgagatggcccaaggaggagggccagccaccgcattccgggtggatggagacagccccgagagccggctgaccgtgccgggcctcagcgagaacgtgccctacaagttcaaggtgcaggccaggaccactgagggcttcgggccagagcgcgagggcatcatcaccatagagtcccaggatggaggacccttcccgcagctgggcagccgtgccgggctcttccagcacccgctgcaaagcgagtacagcagcatcaccaccacccacaccagcgccaccgagcccttcctagtggatgggctgaccctgggggcccagcacctggaggcaggcggctccctcacccggcatgtgacccaggagtttgtgagccggacactgaccaccagcggaacccttagcacccacatggaccaacagttcttccaaacttgaccgcaccctgccccacccccgccatgtcccactaggcgtcctcccgactcctctcccggagcctcctcagctactccatccttgcacccctgggggcccagcccacccgcatgcacagagcaggggctaggtgtctcctgggaggcatgaagggggcaaggtccgtcctctgtgggcccaaacctatttgtaaccaaagagctgggagcagcacaaggacccagcctttgttctgcacttaataaatggttttgctactgctaaaaaaaaaaaaaaaaaaaaaaaaaaaaaaaaaaaaaaaaaaaaaaaaaaaaaaaaaaaaaaaaaaaaaaaaaaaa

SEQ ID NO: 598 - protein, 1822 aa, Homo sapiens
  ref <308>: DATABASE ACCESSION NUMBER: Refseq / NP_000204
  ref <309>: DATABASE ENTRY DATE: 2002-11-05
MAGPRPSPWARLLLAALISVSLSGTLANRCKKAPVKSCTECVRVDKDCAYCTDEMFRDRRCNTQAELLAAGCQRESIVVMESSFQITEETQIDTTLRRSQMSPQGLRVRLRPGEERHFELEVFEPLESPVDLYILMDFSNSMSDDLDNLKKMGQNLARVLSQLTSDYTIGFGKFVDKVSVPQTDMRPEKLKEPWPNSDPPFSFKNVISLTEDVDEFRNKLQGERISGNLDAPEGGFDAILQTAVCTRDIGWRPDSTHLLVFSTESAFHYEADGANVLAGIMSRNDERCHLDTTGTYTQYRTQDYPSVPTLVRLLAKHNIIPIFAVTNYSYSYYEKLHTYFPVSSLGVLQEDSSNIVELLEEAFNRIRSNLDIRALDSPRGLRTEVTSKMFQKTRTGSFHIRRGEVGIYQVQLRALEHVDGTHVCQLPEDQKGNIHLKPSFSDGLKMDAGIICDVCTCELQKEVRSARCSFNGDFVCGQCVCSEGWSGQTCNCSTGSLSDIQPCLREGEDKPCSGRGECQCGHCVCYGEGRYEGQFCEYDNFQCPRTSGFLCNDRGRCSMGQCVCEPGWTGPSCDCPLSNATCIDSNGGICNGRGHCECGRCHCHQQSLYTDTICEINYSAIHPGLCEDLRSCVQCQAWGTGEKKGRTCEECNFKVKMVDELKRAEEVVVRCSFRDEDDDCTYSYTMEGDGAPGPNSTVLVHKKKDCPPGSFWWLIPLLLLLLPLLALLLLLCWKYCACCKACLALLPCCNRGHMVGFKEDHYMLRENLMASDHLDTPMLRSGNLKGRDVVRWKVTNNMQRPGFATHAASINPTELVPYGLSLRLARLCTENLLKPDTRECAQLRQEVEENLNEVYRQISGVHKLQQTKFRQQPNAGKKQDHTIVDTVLMAPRSAKPALLKLTEKQVEQRAFHDLKVAPGYYTLTADQDARGMVEFQEGVELVDVRVPLFIRPEDDDEKQLLVEAIDVPAGTATLGRRLVNITIIKEQARDVVSFEQPEFSVSRGDQVARIPVIRRVLDGGKSQVSYRTQDGTAQGNRDYIPVEGELLFQPGEAWKELQVKLLELQEVDSLLRGRQVRRFHVQLSNPKFGAHLGQPHSTTIIIRDPDELDRSFTSQMLSSQPPPHGDLGAPQNPNAKAAGSRKIHFNWLPPSGKPMGYRVKYWIQGDSESEAHLLDSKVPSVELTNLYPYCDYEMKVCAYGAQGEGPYSSLVSCRTHQEVPSEPGRLAFNVVSSTVTQLSWAEPAETNGEITAYEVCYGLVNDDNRPIGPMKKVLVDNPKNRMLLIENLRESQPYRYTVKARNGAGWGPEREAIINLATQPKRPMSIPIIPDIPIVDAQSGEDYDSFLMYSDDVLRSPSGSQRPSVSDDTGCGWKFEPLLGEELDLRRVTWRLPPELIPRLSASSGRSSDAEAPTAPRTTAARAGRAAAVPRSATPGPPGEHLVNGRMDFAFPGSTNSLHRMTTTSAAAYGTHLSPHVPHRVLSTSSTLTRDYNSLTRSEHSHSTTLPRDYSTLTSVSSHDSRLTAGVPDTPTRLVFSALGPTSLRVSWQEPRCERPLQGYSVEYQLLNGGELHRLNIPNPAQTSVVVEDLLPNHSYVFRVRAQSQEGWGREREGVITIESQVHPQSPLCPLPGSAFTLSTPSAPGPLVFTALSPDSLQLSWERPRRPNGDIVGYLVTCEMAQGGGPATAFRVDGDSPESRLTVPGLSENVPYKFKVQARTTEGFGPEREGIITIESQDGGPFPQLGSRAGLFQHPLQSEYSSITTTHTSATEPFLVDGLTLGAQHLEAGGSLTRHVTQEFVSRTLTTSGTLSTHMDQQFFQT

SEQ ID NO: 599 - DNA, 3933 bp, Rattus norvegicus
  ref <308>: DATABASE ACCESSION NUMBER: EMBL / L05541
  ref <309>: DATABASE ENTRY DATE: 2000-03-04
taagcttatttctgctgataaggataaagacatcgttacagcaagtactcacatctccaggcaacacgtgaagggccaggctgcaggcttcatctatagtatgatcaacacccccacgtccctcccagtccccaacgttgcatcttagccacagctgctcatactggatggggagggtgctggtggggttgggggaggactcgacgaggctccgcctctctgagggactattgacagttaaaggttgctgacaggaggagtgtccttgagtggggagctgatatgttgcccatgctccagtaaatagctctaaactcatgaaagcaaccataactatttcagtgggtcacaaaagacataaatgtacgcgaaagtaggggggcttactgggaacaaaaagttttagcgggtaagaaggagatagtaacaaaggagggtgactgtgaccaaaagccattatgtgcacgtatggaaattttcgcttcccctcccgtatatatttgctgaatctgtggccggacgaatggatacagcaaccacttttcacagatgctctccagagaagtgcctccaatccggtgtggaggagaaccatcaaaacatcctggggaggtgtgcggcggtcccgagccccgccctcaagtggcaggctgtccccctcgtcacgtgttggcggctagccaatcatccagggtgggcgggggaaaactatggaatggtgagtttatccccgtgcactttcttgacggactttaggttaattcgtgtgacctcatgtcgcaaagcggagccgatcctgagcagcgccagcaggcttcagaggcggacgccatggcagcgaccttccgggcgagcggtaattactgggcggcctggacccgctgcaggccttgtggcaccgaaagcgtttaaccctttaactcccctctggcagcctttagcttctagaaacactgcgcggacctagcgtccctgaacttgggcctgctaaggcattagagccattggggaagagggagacagggaattttgctgactgatccttgactgactgtcccccagaacaccagcatattcgctacaacccgctccaggatgagtgggtgttagtgtcagcccatcgcatgaagcggccctggcaaggacaagtggagccccagcttctgaagacggtcccccgccatgacccactcaaccctctgtgtcccggggccacacgagctaatggggaggtaagcccgaatacacagccaccaagtggaataggaggaaatagtttttccttattactgctcttcgcccacaagagggagcagtgcacccccttttgagtcagttcccagcaagcaattttgaaccttagaaagggcctttcgcccccccccccgcagcctgtgtaccccttgaattgggtcagatggttgtatttctagcctattcttgtcagtaggtgaatcccccctatgatggcaccttcttatttgacaatgacttcccggctctgcagcccgatgctccggatccaggtaccctcaatttaaccactgttggggagaagggagactggatctgaccggggaacctgtgttgcagagtgtaatacttctttattccaggacccagtgaccaccctctcttccgagtggaggccgccagaggagtttggtaactatgggtttccccgcttataacctccagccagggctgaagactaagacctgggcttgggccctgcccttagcacccaacccctatccctttgtcattcttccctcaccacctagtaaggtcatgtgcttccacccctggtcggatgtgacgctgccactcatgtctgtccctgagatccgagctgtcatcgatgcatgggcctcagtcacagaggaactgggcgcccagtacccttgggtgcaggtctgtgagggggcggtgtaactttggtctgggggagtagcagtattgcttccacagggtatggcgaggaggggttggcttgatgactgtgtgactgctgagtccttctccttttacccaatagatctttgaaaacaaaggagccatgatgggttgctctaacccccatccccactgccaggcaagtatgtggtaggctgtaatggctttcttggctgagtgtactgactgcggacaggggatagggcaaaagaaatacattgataatttggaggcttagagctagtggactcgcctgctgtttcttctttgtcctcgccccttgacaggtttgggctagcaatttcctgccagatattgcccagcgtgaagagcgatcccagcagacttatcacaaccagcatggaaagcctttattattggaatatggccaccaagagctcctcaggaaggtgggagagagctaggccctgtgtccgcagggagtccctggccctttaccctcccagggagaccttcgggaaagggggataggacatcagcagccatctaaaggaatccattggtgacttagagtagggtgctagcacaagtggagagactcgaattcttttgcttgcctgccactcacccccttcccccgtcacacacttcacttccattctgtgtgtccaggaacgtctggtcctaaccagtgagtactggatagttctggtccccttctgggcagtgtggcctttccagacattactgctgccccgacggcacgtgcagcggctacctgagctgacccctgctgagcgtgatggtgagtctcccgggtaggaccgggggactgggtgctgagtagaatagccctgacgggaccagcatctattccccggggtgaaaatcgggctctgattccagatctagcctccaccatgaagaagctcttgaccaagtatgacaacctgtttgagacgtcctttccttactccatgggctggcacggtaaagcttttggtgttggagtagttccaacagtatttctgggctcctagattctggcttagggaactacaaccctacgaggtctcaaagcacttgttggctttaaaacaacagtccagagcaggggtgctggggctcagagaggagagacctggtgacactgttactgattgctctaatgcttgagctccctggtgggaaataccaggagatgtaataacgggcacctggcctagtttaggggaggggctagactgaaggctggcaaagagcctcccatatcgtctgtcttcttcttgtcaggggctcccatgggattaaagactggagccacctgtgaccactggcagctccatgctcactattaccccccactcctgcgatcggctactgttcggaaattcatggttggctatgaaatgcttgcccaggcccagcgtgacctcactcccgaacaggtcagggttcacgccctgggtcgtaacatcctctcccctcatttcctcacgggatctcaggatcttggcagtcaccaccccaaccagcctcataaaaatcttcacattcctagaactcagtccctgctcagctccaccccctggtgactccagctatcccgaactactcttcccatcccataagccctcctcagtatttctcgggccctgaactcctcatgcaattccaagtgactctttctctccccaattgcttcttgtccccttacaggctgcagaaagattaagggtgctccctgaggtacactattgcctgacgcagaaagacaaggaaacagcagccaccgcttgactgtgaccacagcagggcattgaatctttgtacccgacagacctgggacctggagttcgggcagatgtgacatcaataaaactgtgtctcatgttctaaccttgttttctgacaccagaggagtgtggacttttacattctggagtctgggtaaggctaagtgtgattccaaacactctttgcctacagattttcaaaagttcgatgcacgaattc

SEQ ID NO: 600 - DNA, 2683 bp, Rattus norvegicus
  ref <308>: DATABASE ACCESSION NUMBER: Refseq / NM_012776
  ref <309>: DATABASE ENTRY DATE: 2003-01-14
gaattcgggcgggcgacgagcgaggaccgggcggggcggcggcggcgccgaggccgacaagccgcgcgggccgggccgggccgagcgagcgggagcggagcggagcctcgggcggcgggaggaacagcgccgccgccgccaagatggccgacctggaggcggtactggccgatgtgagctacctgatggccatggagaagagcaaggccacgccggccgcgcgcgccagcaagaagatcctgctgccagagcccagcatccgcagcgtcatgcagaagtatctagaggatcgaggagaagtgacctttgaaaagatcttctcacagaagttaggatacctgcttttccgggacttctacctgaaccatctggaagaggccaagcccttggtggagttctatgaagagatcgagaaatatgagaagctggagacggaggaggaacgtgtggtccgcagccgggagatctttgactcctacatcatgaaagaactgctggcctgctcacatcccttttcaaagaatgccacggagcatgtccagggccacctggtgaagaagcaggtacctccagatctcttccagccatacattgaggagatttgtcagaacctccgaggggatgtgttccacaaattcattgagagtgacaagttcacacggttctgccagtggaagaatgtagagctcaacatccacctgaccatgaatgacttcagtgtgcatcgaatcatcgggcgtgggggcttcggtgaggtctatgggtgccggaaagcagacacaggcaagatgtacgccatgaagtgtctggacaagaaacgcatcaagatgaagcagggagagaccctggctctgaacgagcggatcatgctttccctcgtcagcactggggactgccccttcatcgtgtgcatgtcatatgcattccacacaccagacaagctcagtttcatcctggatctcatgaacggtggggacctgcactaccacttgtctcagcatggagtcttctctgaagccgacatgcgcttctacgcagctgagatcatcctgggccttgaacacatgcacaatcgctttgtagtctacagggacctaaagccagccaacattctcctggatgagcatggccatgtgagaatctcagacctgggcctagcctgtgacttctccaagaagaagcctcatgccagtgtgggcacacacgggtacatggccccggaagtcctacagaagggcgtggcctatgacagcagtgccgactggttctccctgggctgcatgctcttcaagttgttgcggggacacagccccttccggcagcacaagaccaaagacaagcatgagattgaccgcatgacattgacaatggctgttgagctgcctgactccttctcccctgaactccgatccctgctggaaggtttgctgcagagggatgtcaatcggagactaggctgtctgggccgtggggctcaagagataaaagaaagccccttcttccgttccctggactggcagatggtcttcttacagaagtaccctcctccactgatccccccacgcggggaggtgaatgcagcggacgcctttgacattggctcctttgatgaggaggacacaaaaggaatcaagttactggacagtgaccaggaactgtaccgcaacttccctctcaccatctctgagcggtggcaacaggaggtggcagagactgtctttgataccatcaatgctgagacagaccggctggaggcacggaagaaagccaaaaacaaacagctgggccacgaggaggactacgccctgggtaaggactgcatcatgcatggctacatgtccaagatgggcaaccccttcctgacccagtggcagcggcgatacttctacctgttccccaaccggcttgagtggaggggtgaagacgaggctccgcagagcctcctgaccatggaagagatccagtcggtggaagagacacagatcaaggaacgcaagtgtctcctgcttaagatccgaggtggcaagcagtttgtcctgcagtgtgatagtgaccctgagctggtgcaatggaaaaaagagctgcgcgatgcttaccgtgaggcccagcagctggtgcagcgagtgcccaagatgaagaacaagccacgctcacctgtggtggagctgagcaaggtgccactgattcagcgtggcagtgccaacggcctctgattcacccatctgctgcccgcctgcccacccgccttttataaacctctaatttattttgttgaatttttattatttgttttcgcaaagcggaaaaggttttattttgtaattattgtgatttcctgtggccccagccaggcccagccccagggaggggcctgcttgcctcagctcctgctgccaccaacccagccactgtctagcacccctgccccgcccccaccgcatgcccctagggtccttgctcccagtatcttcctactgggaagaggagcaaccctcagcagccctcttgcccctccatggggtgaagccacagtcggtgggtgtgtcacttcaggctctgtgggctacactcagcctgaggcccagctgggtggcccagcacccctaccctaggaaggtgcaacacagggatactacttgaactttcctatcatagctcccatgccacagagggacccgaattc

SEQ ID NO: 601 - protein, 689 aa, Rattus norvegicus
  ref <308>: DATABASE ACCESSION NUMBER: Refseq / NP_036908
  ref <309>: DATABASE ENTRY DATE: 2003-01-14
MADLEAVLADVSYLMAMEKSKATPAARASKKILLPEPSIRSVMQKYLEDRGEVTFEKIFSQKLGYLLFRDFYLNHLEEAKPLVEFYEEIEKYEKLETEEERVVRSREIFDSYIMKELLACSHPFSKNATEHVQGHLVKKQVPPDLFQPYIEEICQNLRGDVFHKFIESDKFTRFCQWKNVELNIHLTMNDFSVHRIIGRGGFGEVYGCRKADTGKMYAMKCLDKKRIKMKQGETLALNERIMLSLVSTGDCPFIVCMSYAFHTPDKLSFILDLMNGGDLHYHLSQHGVFSEADMRFYAAEIILGLEHMHNRFVVYRDLKPANILLDEHGHVRISDLGLACDFSKKKPHASVGTHGYMAPEVLQKGVAYDSSADWFSLGCMLFKLLRGHSPFRQHKTKDKHEIDRMTLTMAVELPDSFSPELRSLLEGLLQRDVNRRLGCLGRGAQEIKESPFFRSLDWQMVFLQKYPPPLIPPRGEVNAADAFDIGSFDEEDTKGIKLLDSDQELYRNFPLTISERWQQEVAETVFDTINAETDRLEARKKAKNKQLGHEEDYALGKDCIMHGYMSKMGNPFLTQWQRRYFYLFPNRLEWRGEDEAPQSLLTMEEIQSVEETQIKERKCLLLKIRGGKQFVLQCDSDPELVQWKKELRDAYREAQQLVQRVPKMKNKPRSPVVELSKVPLIQRGSANGL

SEQ ID NO: 602 - DNA, 480 bp, Rattus norvegicus
  ref <308>: DATABASE ACCESSION NUMBER: EMBL / AA891884
  ref <309>: DATABASE ENTRY DATE: 2000-03-03
agcaacagttccaggattcaaaatcttcccatttatcatacctgtgcttgcagaataaagtgttgtgtaaagctgggtctcactgtgtcaactggcctgaaaccatgtagcccaggatggcctaggactccacacacagcaaccctagcttcaccttttgaaggctgtggctcccagtcacatttctttatgcactgaatcaggcaaatgctaccagccacttttcctccagcaacacaggcctctcatctcaggaaggagtggagactagatagaaggacaagtaaccagacatgtttgagtaagccgcaggccatacatgttgcagatacatactccttacaagccaattcgcaaaggttccaagacttgtattttaggagctgttctcaaccagtaatgagatgggatagaaagaggatccaccttcagacctcagtcttcctggatgggaactggggggaaaatgcttcttgtacc

SEQ ID NO: 603 - DNA, 1950 bp, Rattus norvegicus
  ref <308>: DATABASE ACCESSION NUMBER: Refseq / NM_031623
  ref <309>: DATABASE ENTRY DATE: 2003-01-13
gctggaccccagcctttcttcgctttcgcctcgcggtcgatgactccctagaccccctggcctacgatcatgaccacgtccctgcaagatgggcagagcgccgcgggccgggcgggcgcccaggactccccgctggcagtgcaggtgtgccgcgttgcccagggcaagggagacgcccaggacccggctcaggtccccggactgcacgcgctgtccccggcctcagatgcgacccgccgcggtgccatggacaggagaaaagcgaaagatctggaagttcaggaaacgccttccattcctaaccccttccctgagctctgctgttctccacttacatcggtgctgtcagcaggcctcttccccagatcaaattcaaggaagaaacaggtgattaaagtttacagcgaggatgagaccagcagagcgttagaggtgcccagtgacgtcacagcccgtgatgtctgccagctgttgatcctgaagaaccactatgtcgacgacaatagctggaccctttttgagcacctgtctcacacaggcgtagaaaggacagtggaggaccatgagctgctgactgaagtgctgtctcattgggtgatggaagaagataataagctgtatcttagaaagaattatgccaaatatgaattttttaagaacccaatgtatttctttccagagcacatggtgtcttttgcaactgaaatgaacggtgacagatcccttacacagatcccgcaggtgtttttaagctcaaacacatatcctgaaatccatggcttcctgcatgcaaaggaacaggggaagaagtcttggaaaaaagcttacttttttctcagaagatctggtttatatttttctactaaaggcacatccaaggaaccacggcacttgcagtttttcagtgaattcagcactagtaatgtttacatgtcactggcaggcaaaaaaaagcatggagcgccgactccctatggattctgctttaagcctaccaaagcaggagggccccgggacctgaaaatgctgtgtgcagaagaagaccaaagcaggatgtgctgggtgaccgccattagattgctcaagtatggcatgcagctctaccagaattatatgcatccatcccaagctagaagcgcctgcagttctcagagcgtatcacccatgagaagcgtatcagagaattccctagtagcaatggacttctcaggtcagaagaccagagtcatagacaaccccactgaagccctttcggttgccgttgaggaaggactcgcttggaggaaaaaaggatgtttacgcctggggaatcatgggagtcccactgcgccctctcagagctctgctgtgaacatggctctccaccggtcccagccatggtttcaccacagaatttctagagatgaagctcagcagttgattacccggcaggggcctgtggatggagttttcttggtacgggatagtcagagtaaccccagaacttttgtactgtcaatgagtcacggacaaaagataaaacactttcaaattatacccgtggaagatgatggtgaggtgttccacaccctggatgatggccatacgaagttcacagatctcatccagctcgtggagttctaccagctcaacaagggggtccttccttgcaagctgaagcattactgtgctaggatggctgtttagccaaactgtctgtgactcgttaaactatggaagatggaggatgcaaagaagaatgattagagagagagagagagagagagagagagagagagagagagagagagagagaggagatcacaaggctggaaacaaatcatggtgaaaagaagattcacctgtgggttacaaaaaaataggtcacgtattgcaaattagtgaagacttggattcgtattactctcgttactttaaatttattagttaaaattaaaccttattaaaaaa

SEQ ID NO: 604 - protein, 538 aa, Rattus norvegicus
  ref <308>: DATABASE ACCESSION NUMBER: Refseq / NP_113811
  ref <309>: DATABASE ENTRY DATE: 2003-01-13
MTTSLQDGQSAAGRAGAQDSPLAVQVCRVAQGKGDAQDPAQVPGLHALSPASDATRRGAMDRRKAKDLEVQETPSIPNPFPELCCSPLTSVLSAGLFPRSNSRKKQVIKVYSEDETSRALEVPSDVTARDVCQLLILKNHYVDDNSWTLFEHLSHTGVERTVEDHELLTEVLSHWVMEEDNKLYLRKNYAKYEFFKNPMYFFPEHMVSFATEMNGDRSLTQIPQVFLSSNTYPEIHGFLHAKEQGKKSWKKAYFFLRRSGLYFSTKGTSKEPRHLQFFSEFSTSNVYMSLAGKKKHGAPTPYGFCFKPTKAGGPRDLKMLCAEEDQSRMCWVTAIRLLKYGMQLYQNYMHPSQARSACSSQSVSPMRSVSENSLVAMDFSGQKTRVIDNPTEALSVAVEEGLAWRKKGCLRLGNHGSPTAPSQSSAVNMALHRSQPWFHHRISRDEAQQLITRQGPVDGVFLVRDSQSNPRTFVLSMSHGQKIKHFQIIPVEDDGEVFHTLDDGHTKFTDLIQLVEFYQLNKGVLPCKLKHYCARMAV

SEQ ID NO: 605 - DNA, 2376 bp, Homo sapiens
  ref <308>: DATABASE ACCESSION NUMBER: Refseq / NM_004490
  ref <309>: DATABASE ENTRY DATE: 2000-11-01
cggatgagggtcagggctgcgcggacccctatcccgcctgcgtcctcccggcaagcccagcgggagcgcccgctcggctgggtccccgcctccagcgcgccggggccgcccagaccctgggctcagcctcgcgccccggtgcccacctgaggaggcggcggtcccggcctcgcgtcccggatgggacggcgcgggagcaatgccagtggccccgagcgccccgggccacgcgcggggccggccagccgctctcgcgccctccccgccccctccgcgccttgcctcgccgcccgcgcgccccacccaccggccgctcctcccctctccccaccctcctcctccgccccctcccctcccccgccgcctcgcagatagctcggccgcgcgtctcagccgccggggccccgagcgcaggcggcgaggccaccacacctgcagagcgctcgggctgcctaggcggcacctcgcctcccgccgcgcaaaccccttctccccacgcgccgagtctcccatgacgcccgagccccccggccggcgacaatgaccacttccctgcaagatgggcagagcgccgcgagcagggcggctgcccgggattcgccgctggccgcccaggtgtgtggcgctgcccaggggaggggcgacgcccacgacctggcgccggccccctggctgcacgcgcgagcgctcctgccccttccggacgggacccgcggctgtgctgcagacaggagaaaaaagaaagatcttgatgttccggaaatgccatctattccaaacccttttcctgagctatgctgttctccaattacatctgtgttgtcagcagacctatttcccaaagcaaattcaaggaaaaaacaggtgattaaagtatacagtgaagatgaaaccagcagggctttagatgtacccagtgacataacggctcgagatgtttgtcagctgttgatcctgaagaatcattacattgatgaccacagctggaccctttttgagcacctgcctcacataggtgtagaaagaacaatagaagaccacgaactggtgattgaagtgctatccaactgggggatagaagaagaaaacaaactatactttagaaaaaattatgccaaatatgagttctttaaaaacccaatgtatttttttccagagcatatggtatcttttgcaactgaaaccaatggtgaaatatcccccacacagattttgcagatgtttctgagttcaagcacatatcctgaaattcatggtttcttacatgcgaaagaacagggaaagaagtcttggaaaaaaatttacttttttctaagaagatctggtttatatttttctactaaaggaacatcaaaggaaccgcggcatttgcagtttttcagcgaatttggcaatagtgatatttatgtgtcactggcaggcaaaaaaaaacatggagcaccgactaactatggattctgctttaagcctaacaaagcgggagggccccgagacctgaaaatgctctgtgcagaagaagagcagagtaggacgtgctgggtgaccgcgattagattgcttaagtatggcatgcagctgtaccagaattatatgcatccatatcaaggtagaagtggctgcagttcacagagcatatcacctatgagaagtatatcagagaattccctggtagcaatggacttctcaggccagaaaagcagagttatagaaaatcccactgaagccctttcagttgcggttgaagaaggactcgcttggaggaaaaaaggatgtttacgcctgggcactcacggtagccccactgcctcttcacagagctctgccacaaacatggctatccaccggtcccagccatggtttcaccacaaaatttctagagatgaggctcagcgattgattattcagcaaggacttgtggatggagttttcttggtacgggatagtcagagtaaccccaaaactttcgtactgtcaatgagtcatggacaaaaaataaagcactttcaaattataccagtagaagatgacggtgaaatgttccacacactggatgatggccacacaagatttacagatctaatacagctggtggagttctatcaactcaataagggcgttcttccttgcaagttgaaacattattgtgctaggattgctctctagacaagccagaagtgacttattaaactattgaaggaaaaggactcaagaaaaataataaaagaccataaataagggcgaaaacattatcatgtgaaaagaatgtatttcacctgcaagttacaaaaaaatagtttgtgcattgcaaataagcaaagacttggattgactttacattcatcatttaaaattcattagttaaaattaaaccttagg

SEQ ID NO: 606 - protein, 540 aa, Homo sapiens
  ref <308>: DATABASE ACCESSION NUMBER: Refseq / NP_004481
  ref <309>: DATABASE ENTRY DATE: 2000-11-01
MTTSLQDGQSAASRAAARDSPLAAQVCGAAQGRGDAHDLAPAPWLHARALLPLPDGTRGCAADRRKKKDLDVPEMPSIPNPFPELCCSPITSVLSADLFPKANSRKKQVIKVYSEDETSRALDVPSDITARDVCQLLILKNHYIDDHSWTLFEHLPHIGVERTIEDHELVIEVLSNWGIEEENKLYFRKNYAKYEFFKNPMYFFPEHMVSFATETNGEISPTQILQMFLSSSTYPEIHGFLHAKEQGKKSWKKIYFFLRRSGLYFSTKGTSKEPRHLQFFSEFGNSDIYVSLAGKKKHGAPTNYGFCFKPNKAGGPRDLKMLCAEEEQSRTCWVTAIRLLKYGMQLYQNYMHPYQGRSGCSSQSISPMRSISENSLVAMDFSGQKSRVIENPTEALSVAVEEGLAWRKKGCLRLGTHGSPTASSQSSATNMAIHRSQPWFHHKISRDEAQRLIIQQGLVDGVFLVRDSQSNPKTFVLSMSHGQKIKHFQIIPVEDDGEMFHTLDDGHTRFTDLIQLVEFYQLNKGVLPCKLKHYCARIAL

SEQ ID NO: 607 - DNA, 3360 bp, Rattus norvegicus
  ref <308>: DATABASE ACCESSION NUMBER: Refseq / NM_031614
  ref <309>: DATABASE ENTRY DATE: 2003-01-13
gccttgcagcggcgcgggcaaacggagaggccgcgggaggcgcgaagccggcagaaggcgagggagagcggagggcggccatggtccagccctgaagccaaacaaaaaaggcctacttcgaaagctgtcaacaatgaatgactctaaagatgcccctaagtcctatgacttcgacctgatcatcattggaggaggctcgggaggcctggcggcagctaaggaggcagccaaatttgacaagaaggtgatggtcttggacttcgtcacaccaactcctctcggaacgaatgggggtctcgggggaacgtgtgtgaacgtgggctgcatacctaaaaaactgatgcaccaggcggctctgttaggacaagctctgaaagactcacgcaactatggctggaaactcgaggacacagttaagcatgactgggagaaaatgacagaatctgtgcagaatcatatcggctcgctgaactggggctaccgagtagctctccgggagaagaaggtcgtctatgagaatgcttacgggaaattcattggtcctcacaaaattatggcaacaaataacaaaggtaaagaaaaagtttactcagcagagcggttcctcattgccaccggtgaaaggccacgctacctgggcatccctggagacaaagagtactgcatcagcagtgacgatcttttctccttgccttactgcccggggaagaccctagtggttggcgcgtcctatgtcgccttggaatgtgcaggattcctggctggtatcggcctcgacgtcactgtaatggtgcggtccattctccttagaggatttgaccaggacatggccaacaaaattggtgaacacatggaagagcatggtatcaagtttatcaggcagttcgtgccgacgaaaattgaacagattgaagcagggacaccaggccgactcaaggtgaccgctaaatccacaaacagtgaggagaccatagaagacgaatttaacacagtgttgcttgcagtaggaagagattcttgtacaagaactattggcttagagaccgtgggcgtgaagatcaatgaaaagaccgggaagatacctgtcacggatgaggagcagaccaatgtgccttacatctacgccattggtgacattctggaggggaagctggagctgacccccgtggccatccaggcggggagattgctggctcagaggctgtatggcggctccactgtcaaatgtgactatgacaatgtcccaacgactgtgtttactcctttggagtatggctgctgtggcctctctgaagaaaaagctgtagagaaatttggggaagaaaatattgaagtttatcacagtttcttctggccattggaatggacagttccatcccgggataacaacaaatgttatgcaaaagtcatctgtaaccttaaagacaacgaacgtgtcgtgggcttccacgtactgggtccaaatgctggagaggtgacgcaggctttgcagccactcaagtgcgggctgaccaagcagcagctggacagcaccattggcatccacccggtctgtgcagagatatttacaacgctgtcggtgactaagcgttctgggggagacatcctccagtctggctgctgaggttaagccccagtgtggatgctgttgccaagactacagaccattgcttgcttccttgtccacacccaggtgaagttcaggaaggctcttgggttcttggcaccaattcaaggtgctatcctaaggccaccaggtccctgggatcttgtgggtaggaggtggcaggtagaagaaggctgcagcatcgcactggggtcaccatgacggactcagactgacattcggcagagcatcacggtgcgtccatgaagtcactagcctcaagcccaagtggtgggcagtgacagaaagctgtcgatctgttgggttcaacctttccctgtagactgttttagtctcgccttcaagctatgtaatgtcaattctgttttttcttttctccatggggttaatgatactagaggtagggaatgttagcaatcagtttttgtcatggctggactatccacagcacggtcgttactgtgtggaagggggtcagatggcttatgagagccaaaccagtttatcctgagaaagacgaattaccctgtggctaaaatacactgtttttactaacctgtgtagcattgtcccctttaataagtttaggtcttctgtccaaactgagaaaaaccatggtcactttggcaaatttccggcagtgtgtgtccctgccgctgcttagcaagggcggcggtgacttggctaatctactcagactcattgcatggctcttgggtatcatggagtattccagcatagagcctgaccagcagtaaatgtctctcctggtacagttactgtctgctggactaagtgcgctgagatggttctcaatggagaatgcttaatttgcttttaacctcttgtttttgtgaggtgggtttagttttaagcttatgtcccataagaactccattcacaggcaagcagctctttccgcacacagcatatgcatcttctgaggtaatggctttataaggaagctgttcataacataagttattattattattgaacacaggtggatgtgaaggattttttttcattgaagaaccaaatggtttttcttttttctgttcagtgagcccacagagaccctggcaggaacagcattgctggcagcattgctgctgggcttttccagtgtagttcttgctcctaggtcacgtgacagcgaacacgatgcctgaggaccgcgcagacaggtttcccaccgcacagccgcccaaggtcccgccatggtccggtagctccttttcttgtcctcccctctgcccatctccacctgcagtactgagtggcgtttcccagtaccctttggggccacctcagggaacgggtttgcctggtattcagccagcggcacccaccctgccccacgaggctccctcagatccgccccacatccgtgtgttgaagaggagaaaggaccagggaaccaaaggagtggactgttgagttttatttatttattttttgtttttttttctcctaagtctgccagtctctgagatcagaacgacagtgtagggtagccgcctaatcatgttgtgattctattggtgggatgaaatgttccgcccccatggaaggagtacactcgtcgtttatgttctgtaatcgcacaatgtactgtaacccaaattccaattccatgtatttttattacagtttctctgggaaaaaaaaatgtgaaacaataaaaaggtgttgattcacgaaaaaaaaaaaaaaaaaaaaaaaaaaaaaaa

SEQ ID NO: 608 - protein, 498 aa, Rattus norvegicus
  misc_feature (1)..(498): Xaa=Unknown amino acid
  ref <308>: DATABASE ACCESSION NUMBER: Refseq / NP_113802
  ref <309>: DATABASE ENTRY DATE: 2003-01-13
MNDSKDAPKSYDFDLIIIGGGSGGLAAAKEAAKFDKKVMVLDFVTPTPLGTNGGLGGTCVNVGCIPKKLMHQAALLGQALKDSRNYGWKLEDTVKHDWEKMTESVQNHIGSLNWGYRVALREKKVVYENAYGKFIGPHKIMATNNKGKEKVYSAERFLIATGERPRYLGIPGDKEYCISSDDLFSLPYCPGKTLVVGASYVALECAGFLAGIGLDVTVMVRSILLRGFDQDMANKIGEHMEEHGIKFIRQFVPTKIEQIEAGTPGRLKVTAKSTNSEETIEDEFNTVLLAVGRDSCTRTIGLETVGVKINEKTGKIPVTDEEQTNVPYIYAIGDILEGKLELTPVAIQAGRLLAQRLYGGSTVKCDYDNVPTTVFTPLEYGCCGLSEEKAVEKFGEENIEVYHSFFWPLEWTVPSRDNNKCYAKVICNLKDNERVVGFHVLGPNAGEVTQALQPLKCGLTKQQLDSTIGIHPVCAEIFTTLSVTKRSGGDILQSGCXG

SEQ ID NO: 609 - DNA, 2180 bp, Rattus norvegicus
  ref <308>: DATABASE ACCESSION NUMBER: Refseq / NM_053824
  ref <309>: DATABASE ENTRY DATE: 2003-01-13
gggttcttccttcatatgccagctagagagccttgcctccctggagctcatagtccaggctgtgttctggggacctgaggggtgtggtcagggcacagagactctctcagagcactgggagtgggattcctgctgtaagggaagggatgtcataggtcagttgaccaatgaccagacctaaacatggctcccagccttaggcatgcggagcctaggagtcccttcaaccctggcctgtgatttttccagctcagatgacaaagacatctaggcccagtgtcttgagaatccctatagtcaaggattagagtcctcctcagtgagtcagctcccccagtcagtaccctcacaagatatcaaccgaattcggtttttttttttttttttttttaaatatgtaaggctttcaatttattacagatcacccaagaacataatgatatacatgtagtcagaaaacacgatgtagaaatcatagtgagttgtccagacatagtcagtagattattctttctggcatgctccagtgtcaagacctcaataaagagcactaaaatccttccatacaattaagtatcagcgatgtaccatattgcagaaaggggtggctgagcaacagtttgttgatactataagacttccatgctcaacagtcgtagcgttgcactcagcacagctctggtttccatatacaaattttccatctcgtaggggagcgcggctagtgccgctgccgcttccaccgcagtaactgccagatcttccaacatcacgttcagctttgtccgtcaacctgtctgacatgtcgggacccgtgccaagcagggccagagtttacacagatgttaacacacacagaccccgagagtactgggactatgaatcacatgtggtggaatggggaaatcaagatgactaccagcttgttcgaaaattaggcaggggcaaatacagtgaagtgtttgaggccatcaatatcacaaataatgaaaaagttgttgttaaaattctcaagccagtaaaaaagaagaaaattaagcgtgaaataaagattttggagaatttaagaggtgggcccaacatcatcacacttgcagacattgtgaaagaccctgtgtctcgaacccctgccttggtttttgaacatgtaaacaacacagacttcaagcaattgtaccagacgttaacagactatgacattcgattttacatgtatgaaattctgaaagccctggattattgtcacagcatggggattatgcacagagacgtgaaaccgcataatgtcatgattgatcatgagcacagaaagcttcggctaatagattggggtttagcagagttttaccatcctggccaagagtataatgtccgagttgcttcccgatatttcaaaggtccagagctacttgtagattatcagatgtacgattatagtttggatatgtggagcttgggttgtatgctggcaagtatgatcttccggaaggagccatttttccatggacatgacaattatgatcagttggtgaggatagccaaggttctgggaacggaagatttatatgactatattgacaagtacaacattgaattagatccacgtttcaacgatatcttgggcagacactcccgtaagcgatgggaacgctttgtccacagtgaaaaccagcaccttgtcagccccgaggccttggattttctggacaagctgctgcgatacgaccaccagtctcggctcactgcaagagaggccatggagcacccttacttctacactgtcgtgaaggaccaggctcgaatgagttcggctggcatggcagggggcagcacacctgtcagtagcgccaatatgatgtcagggatttcttcagtgccaaccccttcacccctgggacctctggcaggctcacccgtgattgctgctgccaactcacttgggatacccgtaccagctgccgctggcgctcagcagtaatgaccccatctgtcttctgatgcctgggcagaggtgggacgtccaccctctccttaatgcagcttgcgcctggttgggaggggtgagaacacttcagaagcaccgtgtctgaaccgttgcttgtggatttagtagttgagtcataaaaaaaattataggctgattttctttcttttttttttttttttttttaaaaaaaccg

SEQ ID NO: 610 - protein, 391 aa, Rattus norvegicus
  ref <308>: DATABASE ACCESSION NUMBER: Refseq / NP_446276
  ref <309>: DATABASE ENTRY DATE: 2003-01-13
MSGPVPSRARVYTDVNTHRPREYWDYESHVVEWGNQDDYQLVRKLGRGKYSEVFEAINITNNEKVVVKILKPVKKKKIKREIKILENLRGGPNIITLADIVKDPVSRTPALVFEHVNNTDFKQLYQTLTDYDIRFYMYEILKALDYCHSMGIMHRDVKPHNVMIDHEHRKLRLIDWGLAEFYHPGQEYNVRVASRYFKGPELLVDYQMYDYSLDMWSLGCMLASMIFRKEPFFHGHDNYDQLVRIAKVLGTEDLYDYIDKYNIELDPRFNDILGRHSRKRWERFVHSENQHLVSPEALDFLDKLLRYDHQSRLTAREAMEHPYFYTVVKDQARMSSAGMAGGSTPVSSANMMSGISSVPTPSPLGPLAGSPVIAAANSLGIPVPAAAGAQQ

SEQ ID NO: 611 - DNA, 450 bp, Rattus norvegicus
  ref <308>: DATABASE ACCESSION NUMBER: EMBL / AA892666
  ref <309>: DATABASE ENTRY DATE: 2000-03-03
acgaccagctctgttctctgtcatcactaaggtctgctcctggtagagaagtggtcctctggactctcctgacttcataggctccacctctccgtcctggctccattgtgtctgttttcttcaagccttcctttccttgacagaactgttttcctgccttctcttttacctcagactacccccgcagaagttttaaccaggtcttgagctatgagaattcaggttccccttctgtgcccctacctcagtctgcctaagcattcctagggccactgaaggacaagcagggttttgggccctgtcctgtcagagccttcttctccggagctgcagagatggctgagcagtgaagagcagaggaccagagtccacccatgccaggctcgaggggagcaagcaccctcttctagcctccggggacacctccacacgtacacatccacaacggtt

SEQ ID NO: 612 - DNA, 1932 bp, Homo sapiens
  ref <308>: DATABASE ACCESSION NUMBER: Refseq / NM_138801
  ref <309>: DATABASE ENTRY DATE: 2002-12-23
cctctagcttagcgagcgctggagtttgaagagcgggcagtggctgcacacgccaaactttccctatggcttcggtgaccagggccgtgtttggagagctgccctcgggaggagggacagtggagaagttccagctgcagtcagacctcttgagagtggacatcatctcctggggctgcacgatcacagccctagaggtcaaagacaggcaggggagagcctcggacgtggtgcttggcttcgccgagttggaaggatacctccaaaagcagccatactttggagcagttattgggagggtggccaaccgaatcgccaaaggaaccttcaaggtggatgggaaggagtatcacctggccattaacaaggaacccaacagtctgcatggaggagtcagagggtttgataaagtgctctggacccctcgggtgctgtcaaatggcgtccagttctcgcgcatcagtccagatggtgaagaaggctaccccggagagttaaaagtctgggtgacatacaccctggatggcggagagctcatagtcaactacagagcacaagccagtcaggccacaccagtcaacctgaccaaccattcttacttcaacctggcaggccaggcttccccaaatataaatgaccatgaagtcaccatagaagcggatacttatttgcctgtggatgaaaccctgattcctacaggagaagttgccccagtgcaaggcactgcattcgacctgagaaagccagtggagcttggaaaacacctgcaggacttccatctcaatggttttgaccacaatttctgtctgaagggatctaaagaaaagcatttttgtgcaagggtgcatcatgctgcaagcgggcgggtactagaagtatacaccacccagcccggggtccagttttacacgggcaacttcctggatggcacattaaagggcaagaatggagctgtctatcccaagcactccggtttctgcctggagactcagaactggcctgatgcagtcaatcagccccgcttccctcctgtgctgctgaggcctggtgaggagtatgaccacaccacctggttcaagttttctgtggcttaaggaagtgtgaagatatgatccagtccagggctaggctcagccacctgtctcctgtccagaaaaaaggtgaagattaagaagctttcagaatgattctatggattaaaatcatacaaatggtggctgttctgagaatcagtctgggtattgatttccttttccagtgactggctccaggccatgtctaatgaccagctcgattccctgtgcagttcagagagcaagtgaacccaaccaacaatgtcgtcatctaagccctgaccctagccagggactcccatgctgctgttggctccatctctccacactgcctctttcttttcaactttttgcccttcctttctttaaagctattctcacattgcttttatttcctcctccttcacctccaaccactgtcagcagcactctggagttttcaaatgtcacattagcctcaccctgcatgctaggagatggacctgtctctatacagcagtagatgattgataagtgaggaaactgaggcttacagaggttgaagaccaacaagctaataaataaaaagttgaggccgggcacggtggctcacgcctgtaatcccagcactttggaaggccgaggcaggcggatcacgaggtcaggagatcgagaccatcctggctaacacggtgaaaccccgtctctacataaaaaattagctgggtgtggtagcacgcacccgtagttccagctacttgggaggctgaagcaggagaatcgcttgaacctgggaggtggaggttgcagtgagccgagatcatgccactgcactgggcaacagagcaaaactcgatctcaaaaaaaaaaaaaaaaaaaa

SEQ ID NO: 613 - protein, 342 aa, Homo sapiens
  ref <308>: DATABASE ACCESSION NUMBER: Refseq / NP_620156
  ref <309>: DATABASE ENTRY DATE: 2002-12-23
MASVTRAVFGELPSGGGTVEKFQLQSDLLRVDIISWGCTITALEVKDRQGRASDVVLGFAELEGYLQKQPYFGAVIGRVANRIAKGTFKVDGKEYHLAINKEPNSLHGGVRGFDKVLWTPRVLSNGVQFSRISPDGEEGYPGELKVWVTYTLDGGELIVNYRAQASQATPVNLTNHSYFNLAGQASPNINDHEVTIEADTYLPVDETLIPTGEVAPVQGTAFDLRKPVELGKHLQDFHLNGFDHNFCLKGSKEKHFCARVHHAASGRVLEVYTTQPGVQFYTGNFLDGTLKGKNGAVYPKHSGFCLETQNWPDAVNQPRFPPVLLRPGEEYDHTTWFKFSVA

SEQ ID NO: 614 - DNA, 1492 bp, Rattus norvegicus
  ref <308>: DATABASE ACCESSION NUMBER: Refseq / NM_017051
  ref <309>: DATABASE ENTRY DATE: 2002-11-05
gagcagacgcgcggctgctagcgaacggccgtgttctgaggagagcagcggtcgtgggcgcctcagcaatgttgtgtcgggcggcgtgcagcgcgggcagaagactgggccccgcggccagtaccgcgggctcccggcacaagcacagcctccctgacctgccttacgactatggcgcgctggagccgcacattaacgcgcagatcatgcagctgcaccacagcaagcaccacgcgacctacgtgaacaatctgaacgtcaccgaggagaagtaccacgaggcgctggccaagggagatgttacaactcaggttgctcttcagcctgcactgaagttcaatggcgggggccatatcaatcacagcattttctggacaaacctgagccctaagggtggtggagaacccaaaggagagttgctggaggctatcaagcgtgactttgggtcttttgagaagtttaaggagaaactgacagctgtgtctgtgggagtccaaggttcaggctggggctggcttggcttcaataaggagcaaggtcgcttacagattgccgcctgctctaatcaggacccactgcaaggaaccacaggccttattccactgctggggattgatgtgtgggagcacgcttactatcttcagtataaaaacgtcagacctgactatctgaaagccatttggaatgtaatcaactgggagaatgttagccaaagatacatagtttgcaagaagtgaagcccttccgccagctgtgtgtcaggcccgtggtgggtgttttgtagtagtgtagagcattgcagcactgtggctgagctgttgtaatcttcattgatgcctatccacatatgtgtaagcatacagttatgataatttcttaattaaatgtattgttaggcactgtttgagaacagtacatacttggtgtgagctgctcttgattgaacattttcattagaggcttgaattgcttggacgctgtcactgtcatcataaggccatcaaagatattccatctctgtgttggggcctgtggggaggctgtaatcctgttctactgcagttaggaaaaaaatgagttaccccccccccccagaattgttgaataataaaatagagaactgaatagttctcttttgtgttaaaaattgctatttttcataagtaatcctttgtttagcggatatcacctagtggtctttatttatggccacagtttcacagaaacatcattttttcacttgaaacgtgtaactaggctaaggatggatggagtggtagacctttgcctgtcttatgtgaggccctgggctctacctcactactgaacaaatcaacagacccaagctaggctcctgactgacaactgttaattcggagaggagtgacattgtgcctctgggtttttttataggctgagatgcaaaaactgttaccttgtctattaaaaccgactgtgtattgtatgaaagtgctcaagatggacaaagtat

SEQ ID NO: 615 - protein, 222 aa, Rattus norvegicus
  ref <308>: DATABASE ACCESSION NUMBER: Refseq / NP_058747
  ref <309>: DATABASE ENTRY DATE: 2002-11-05
MLCRAACSAGRRLGPAASTAGSRHKHSLPDLPYDYGALEPHINAQIMQLHHSKHHATYVNNLNVTEEKYHEALAKGDVTTQVALQPALKFNGGGHINHSIFWTNLSPKGGGEPKGELLEAIKRDFGSFEKFKEKLTAVSVGVQGSGWGWLGFNKEQGRLQIAACSNQDPLQGTTGLIPLLGIDVWEHAYYLQYKNVRPDYLKAIWNVINWENVSQRYIVCKK

SEQ ID NO: 616 - DNA, 1764 bp, Rattus norvegicus
  ref <308>: DATABASE ACCESSION NUMBER: Refseq / NM_012507
  ref <309>: DATABASE ENTRY DATE: 2003-01-13
gccttaatcggccacctgccgcgttccactgcctctttacatctcggatttcggggcggctccctcccccatctttccctgcttctttgcaccccgctttttctgcgtttgcctcgaattttggagccgtctggttttgcacccctttttgttttgcttttaggcggtgtgtggggtgaaggtgccttggactcccttcctctggttatctttccctgttttgacagcccccctttctatcgcagtcgggggacctagcctcggtgcacctccgccgcactgccagcagaccacagcgcgtggctgtgcaccccggaatttgcaacagctgcatatctgtgatcggagtctccctcgcctcgctcccgcgctcattcggtgcgtggagggcttcagcgcgcaacgccccggcttctccgcagcccccagcagcgcgccgggactcgccccgtgcctccaagatggtcatccaaaaagagaagaaaagctgcgggcaggtggttgaggagtggaaggagttcgtgtggaatcctcggacgcaccagttcatggggcgcaccgggaccagctgggccttcatcctcctcttctacctcgtcttctatggtttcctcacggccatgttcaccctcaccatgtgggtaatgctgcagaccgtctctgaccatacccccaagtaccaggatcgactggccacaccaggcttgatgattcgacccaagactgagaaccttgatgtcattgtcaacattagcgacactgaaagctgggatcagcatgttcagaagctcaacaagttcttggagccttacaacgactccatccaagctcaaaagaatgatgtctgccgtcctgggcgatattatgagcaacccgataatggggttctgaactatccaaaacgtgcctgccagttcaaccggacccagctgggcaattgctctggcattggggaccctactcactatggttacagcaccgggcagccctgtgtcttcatcaaaatgaaccgggtcatcaacttctatgcaggggcaaaccagagcatgaacgttacctgtgttgggaagaaagatgaagatgctgagaatcttggacacttcatcatgttccctgccaatggcaacatcgacctgatgtattttccctactatggcaaaaagttccatgtaaactatacacagcccttggtggctgtgaagttcctgaatgtgacccccaatgtggaggtgaatgtagaatgccgaattaacgctgccaatattgccacggatgacgagcgggacaagtttgctgcccgcgtggccttcaagcttcgaatcaacaaagcctgaggctccccaccccctctcacccataccctcctgtggatgcttctggaatgtccttgaccctgcctgatccctccctcacccgccccaaaggtattttttataacagagctatgacttgtctgagcctcacacccttgcctcaacttctctacctagcctgacgtccacacgatttccaacatcttccaaccgtagcttagccagagacagagaggagtaggagttttctagttcaggagctggagttgttaccgggcgacagatgacttacccagcatgcacaagggcctctgcactgatggagttgttctagtctgagttgatgaatgagatgcccttacagctcctgtttcagtttctactcccatcccccgagagttatagagaagcggtcccatccacccggcctctgccgccacatatcccacgc

SEQ ID NO: 617 - protein, 290 aa, Rattus norvegicus
  ref <308>: DATABASE ACCESSION NUMBER: Refseq / NP_036639
  ref <309>: DATABASE ENTRY DATE: 2003-01-13
MVIQKEKKSCGQVVEEWKEFVWNPRTHQFMGRTGTSWAFILLFYLVFYGFLTAMFTLTMWVMLQTVSDHTPKYQDRLATPGLMIRPKTENLDVIVNISDTESWDQHVQKLNKFLEPYNDSIQAQKNDVCRPGRYYEQPDNGVLNYPKRACQFNRTQLGNCSGIGDPTHYGYSTGQPCVFIKMNRVINFYAGANQSMNVTCVGKKDEDAENLGHFIMFPANGNIDLMYFPYYGKKFHVNYTQPLVAVKFLNVTPNVEVNVECRINAANIATDDERDKFAARVAFKLRINKA

SEQ ID NO: 618 - DNA, 721 bp, Rattus norvegicus
  ref <308>: DATABASE ACCESSION NUMBER: EMBL / AA800665
  ref <309>: DATABASE ENTRY DATE: 2000-03-03
aaagcacaaaaattgagacaagacatatacatttgtacatggaggaaaataataccagagagtttacaaaacccttgtggctgtcattaccatttggtggctctaggactaaatgggctgacagcatgagggtagcctcaggagggccccagttcccagaggcaggaggctggccagcttggcgagtgcttacaacactcacaaaacacagggtccaggttctcacagtggcttcctaagtgccactgcagtgacacctgtggagcaccccaagatgagtggataggaacctagactccactgagggtgtgggaagaaccctcagaaagaaggctcagcagtcctgcctgcaggacatagttcaggactgatttcctccaaaccaccctaagagttgtaagaggtgagtattgctgaagatgggcaggggccagggtaaggcggaggggcagagtcccttgggaggagagaagccacaacaaacaggtcagcagacacctaccctctcagaagactgctagaggctgggcaggacttgattgacttgtcctcagtccctccccatccccaagtcccaaccaaccccactcactatacattcagaagtctgaagaggggctaaggaaggccccgaggacacaaggtgcggtcacaccatgaagtccaagcaggcacagggtcctgaactatcgtgaacacctgaaagacccccgaagataat

SEQ ID NO: 619 - DNA, 4862 bp, Rattus norvegicus
  ref <308>: DATABASE ACCESSION NUMBER: Refseq / NM_053623
  ref <309>: DATABASE ENTRY DATE: 2003-01-13
gccgaggctcgcccctccttgcaaggctgctccagagctagcgggcacgcgagctcctctccgggagcttccttccccgaaaggccgggacccagtggcggactcgtggtgagcgaggcagcaccttcgatcccaggagattgacctgttcttaaaagtgaaagaagaaatctaagaaaaacgctatggcaaagagaataaaagctaagcccacttcagacaaacccggaagtccatatcgctctgtcacgcacttcgactcactagctgtcatagacatccctggagcagatactctggataaattatttgaccatgctgtagccaagtttgggaagaaggacagcctggggacccgggagatcctgagcgaagaaaatgaaatgcagccaaatggaaaggtttttaagaagttaattcttgggaattataaatggataaactatcttgaagtgaactgccgagtgaataactttggaagtggcctcactgcactgggactgaaaccaaagaacaccattgccattttctgtgagaccagggcggagtggatgattgcagcgcagacctgctttaagtacaactttccgcttgtgactttatatgctacccttggcaaagaagctgtcgttcatggattaaatgagtctgaggcttcctatctgattactagtgttgaacttctggaaagcaaactgaaggcggcattattagatatcaattgtgttaaacatatcatttatgtggataacaagactatcaatagagcggagtaccccgaggggcttgagattcacagcatgcagtcagtagaggagctgggatccaagccagaaaactcaagcattcctccaagtagaccaactccttcggacatggccattgtcatgtacaccagtggctctactggccgccccaagggagtgatgatgcaccatagcaatctgatagctgggatgacaggccagtgtgagcgcatacctggattaggaccaaaggacacatatattggctacttacctttggctcatgtgctggaactgacagcagagatctcctgctttacctacggctgtaggattggatattcgtcaccactcacactgtctgaccagtccagcaaaatcaagaagggaagcaagggtgattgtactgtactgaaacctacacttatggcggccgttccggaaatcatggatagaatttacaagaatgttatgagcaaggttcaagagatgaattatattcagaagactctatttaaaattgggtatgattataaattagagcaaatcaagaaaggatatgatgcccctctttgtaatctgatactgtttaagaaggtgaaggctcttctaggaggaaatgtccgcatgatgctgtccggcggtgccccactgtccccccagacacaccgattcatgaatgtctgcttctgctgccccattggtcagggctatgggctgacagaatcatgcggtgctggaacagttactgaagttaccgactacactactggaagagttggcgctcctcttatttgctgtgaaattaaactgaaggactggcaggaaggtggttatacagttcatgataagccaaaccccagaggtgaaattgtgattggaggccagaatatctccatgggatattttaaaaatgaagagaaaacagcagaagattattctgtggatgaaaatggacaaaggtggttttgcactggtgatattggagaattccaccctgatggatgcttacagattatcgatcgtaagaaagatctggtgaagctgcaagccggagagtacgtgtctcttgggaaagtcgaagccgcactgaagaattgtccactgatcgacaacatctgtgcttttgccaaaagtgaccagtcttatgtgatcagttttgtggttcccaaccagaaaaagttgactcttttggcacaacagaagggggtagaaggatcttgggttgatatttgcaataatcctgccatggaagctgaaatactgaaagaaattcgagaagctgcaaatgccatgaaattggaacgatttgaaattccaatcaaagttcgattgagcccagagccatggacccctgaaactggtttggtaacagatgccttcaagctgaaaaggaaggaactgaagaaccattatcttaaagacattgagcggatgtatgggggcaaataaaaggcaactgtctacttcacatttgcacaggaggtggcctgatggtttttttagttctagagtttaagcctttgttgatctctctgttaaaatgtaaggtgaatcttctaaagacatgaaacaaaaaaacaaccaaaagtggttacaataaattgcatagtcctagagaagctgaaattgaagacatttccctttagctgtgttattaagtttagagcaaaaattctgttttagaatattagccttagctacacttgtttttctaaagatactccatgctaaagtaaacaaattggacttggactaggtgtagttgaagaaatctacagcttccagtgtctatgtcttcctagttcagaagtttctatcgtaatcattaggacaaaattacgtattaacactactcaaagccgaagttccaccaggctttgaaatcctcttccaaccatttctcttgaagggaaaaaaatcagttgtaataaatggattcagtatcttagaaggtattattttaagctcataattgccatgtaggtgagacatagaatcattataatattgtgaataattacagtgcctgaagttaaaactaaaacaacacacacataccaaaaatatctcataatgtatttgaagggaggctgaattgctcctttggatgtctaagaacttaaatcagcaactgtaattattgaaatgtcttcagaaaaatgtccactttgtaaaagtgacctttctgtgtgtgatctagtcaaaggctgagaccaaggggaacatgttagaaagtcaatcagaattcaataagatacattgcttttctgttagaaagttcatggcatcctaagcattcagaattaggatcctggcatagcactgagcctgggaaagagatttagcctctttaactttgataccagggcttgattttaaaatgtgcttgtattaaattacatttgtaatttatggtctgtttgctgttgctgattgattcttgatcagtagtgtgcatttcagagagcctttcattttgctttaatttcagcaaagcgggttatgataaatgacttcctcgaatcttgttcaaacctacgggtgattaagtgtcttggatgagtctgaggaagttaaagggaagaaaacactgttaacacttttcctgtttgtgaagagtttagaaactggaaatgctagatttgggagaagggcagagttacttgattaaggactgtctgtgcagtaacttgggagtgtgagtttctttttaaatcttcagctaaaatctggaattatatattcttgatagatattcgcacttgaaccatagttactgtatgtaaaaagcaaaaattcttaatactgttattctttgcacttttttcatagtcattttatacacacacacacacacatgcatgtgtatgtgtgtgtgtatatataatatatatatgttgcttacattgtgttgtacagatgtgggccaccactacaacaaaatgagttctttgtgctctaaaatatttataaagaaattatttaaatgttatgtatatggtggtaatattgagaaaaaaaatcatctggtattctgagcaacagcgaaggtttttgtaaaagtttcttttcagtgttgtgcaaactaaaatttgaggcaagttttccctgaagttctatgtgagtattctcatgcttcccatcttgcctttgaagtgtgaaaagacatcaagtagactactagtcagcttctacctactcctagtgcactgtttatccgtttttttttaaaggcttttccaatatatgtatcccatttggaatggtgattttaaaatgtgagtgcatgcagactatcttacttaagatacttgcaccccacccacagccatctcccaaagctggaacactgccaactaggtccttaagaatcacgcattgaatacaaggtcgggtgctgctaattcttcatgaaaatcctaacacacacgttaagggaccagggagatgccactgccctctgacttttcatcaaaaaaaaaatatatatatacatgtttatgtaaacagaactattttccatattcatagtgactttttaagtatttgagcctaaaggttttgatctccattttatacctatttaaatcgttcacaatttcatgtcagccatcaattaaagctgtgcttactgttgattgtgtgtgcatttctaaggtgaacgctcctaattttttgctttaattacatgaaagggtcttatttctttgatatttgtgctcttttttttaatgtagactgaaggtatgattgtgtgacttttaagaaatgaaataccgatgaatgatccatagagtccaaagtgagggagaatgctgtttctttgttcatagagactgactagtaatctttgcctatattttcctggtagcagatgacaaatgtttctacagtgacaagctgagaagaggttaaaggttaaagattgtgtggcattcgggaactggagagatacgttttaattttgaatgtagttacaaattttatattcatatttgtactttctgttaatgcacgattgtagaattgttctgtagattttttgtgtttactcttgaaaggctttgtttgttcttctttttaagtttgcacttgaatcttataaaataaatc

SEQ ID NO: 620 - protein, 670 aa, Rattus norvegicus
  ref <308>: DATABASE ACCESSION NUMBER: Refseq / NP_446075
  ref <309>: DATABASE ENTRY DATE: 2003-01-13
MAKRIKAKPTSDKPGSPYRSVTHFDSLAVIDIPGADTLDKLFDHAVAKFGKKDSLGTREILSEENEMQPNGKVFKKLILGNYKWINYLEVNCRVNNFGSGLTALGLKPKNTIAIFCETRAEWMIAAQTCFKYNFPLVTLYATLGKEAVVHGLNESEASYLITSVELLESKLKAALLDINCVKHIIYVDNKTINRAEYPEGLEIHSMQSVEELGSKPENSSIPPSRPTPSDMAIVMYTSGSTGRPKGVMMHHSNLIAGMTGQCERIPGLGPKDTYIGYLPLAHVLELTAEISCFTYGCRIGYSSPLTLSDQSSKIKKGSKGDCTVLKPTLMAAVPEIMDRIYKNVMSKVQEMNYIQKTLFKIGYDYKLEQIKKGYDAPLCNLILFKKVKALLGGNVRMMLSGGAPLSPQTHRFMNVCFCCPIGQGYGLTESCGAGTVTEVTDYTTGRVGAPLICCEIKLKDWQEGGYTVHDKPNPRGEIVIGGQNISMGYFKNEEKTAEDYSVDENGQRWFCTGDIGEFHPDGCLQIIDRKKDLVKLQAGEYVSLGKVEAALKNCPLIDNICAFAKSDQSYVISFVVPNQKKLTLLAQQKGVEGSWVDICNNPAMEAEILKEIREAANAMKLERFEIPIKVRLSPEPWTPETGLVTDAFKLKRKELKNHYLKDIERMYGGK

SEQ ID NO: 621 - DNA, 5356 bp, Homo sapiens
  ref <308>: DATABASE ACCESSION NUMBER: Refseq / NM_022977
  ref <309>: DATABASE ENTRY DATE: 2001-02-06
cgggattcggctggctctgccacaccaccgcgcgcccccgctccgcccgcccctccgggcgcgtcttttccgggctcgcgctgagtcccgcctccgccggctgtccgggtgcgcgcgcgccgctgcggctttttctctggcctccgccgcgcgctcctcctcgtcccagcgctagcgggcacgcggttcctttttgcgagctttccgagtgccaggcgccggccggctgcgaagacgcggtgggccgcccctccgattgaaatcacagaagatattcgtgttcttcttaagagaaaaagaggacattttagctttctcagttgaaggcgtactttattgtcggcttccaaagattactaacttttatctgtatcactaagattgaactgccttggctgtactgctattcttactgctgcttctattattgccttcttcagcacaataaggctttcaaaagccaaagaataacaagaaataagcaccattttagaagcctttccactatgaaacttaagctaaatgtgctcaccattattttgctgcctgtccacttgttaataacaatatacagtgcccttatatttattccatggtattttcttaccaatgccaagaagaaaaacgctatggcaaagagaataaaagctaagcccacttcagacaaacctggaagtccatatcgctctgtcacacacttcgactcactagctgtaatagacatccctggagcagatactctggataaattatttgaccatgctgtatccaagtttgggaagaaggacagccttgggaccagggaaatcctaagtgaagaaaatgaaatgcagccaaatggaaaagtttttaagaagttaattcttgggaattataaatggatgaactatcttgaagtgaatcgcagagtgaataactttggtagtggactcactgcactgggactaaaaccaaagaacaccattgccatcttctgtgagaccagggccgaatggatgattgcagcacagacctgctttaagtacaactttcctcttgtgactttatatgccacacttggcaaagaagcagtagttcatgggctaaatgaatctgaggcttcctatctgattaccagtgttgaacttctggaaagtaaacttaagactgcattgttagatatcagttgtgttaaacatatcatttatgtggacaataaggctatcaataaagcagagtaccctgaaggatttgagattcacagcatgcaatcagtagaagagttgggatctaacccagaaaacttgggcattcctccaagtagaccaacgccttcagacatggccattgttatgtatactagtggttctactggccgacctaagggagtgatgatgcatcatagcaatttgatagctggaatgacaggccagtgtgaaagaatacctggactgggaccgaaggacacatatattggctacttgcctttggctcatgtgctagaactgacagcagagatatcttgctttacctatggctgcaggattggatattcttctccgcttacactctctgaccagtccagcaaaattaaaaaaggaagcaaaggagactgtactgtactgaagcccacacttatggctgctgttccggaaatcatggatagaatttataagaatgttatgagcaaagtccaagagatgaattatattcagaaaactctgttcaagatagggtatgattacaaattggaacagatcaaaaagggatatgatgcacctctttgcaatctgttactgtttaaaaaggtcaaggccctgctgggagggaatgtccgcatgatgctgtctggaggggccccgctatctcctcagacacaccgattcatgaatgtctgcttctgctgcccaattggccagggttatggactgacagaatcatgtggtgctgggacagttactgaagtaactgactatactactggcagagttggagcacctcttatttgctgtgaaattaagctaaaagactggcaagaaggcggttatacaattaatgacaagccaaaccccagaggtgaaatcgtaattggtggacagaacatctccatgggatattttaaaaatgaagagaaaacagcagaagattattctgtggatgaaaatggacaaaggtggttttgcactggtgatattggagaattccatcccgatggatgtttacagattatagatcgtaagaaagatctagtgaagttacaagcaggagagtatgtatctcttgggaaagtagaagctgcactgaagaattgtccacttattgacaacatctgtgcttttgccaaaagtgatcagtcctatgtgatcagttttgtggttcctaaccagaaaaggttgacacttttggcacaacagaaaggggtagaaggaacttgggttgatatctgcaataatcctgctatggaagctgaaatactgaaagaaattcgagaagctgcaaatgccatgaaattggagcgatttgaaattccaatcaaggttcgattaagcccagagccatggacccctgaaactggtttggtaactgatgctttcaaactgaaaaggaaggagctgaggaaccattacctcaaagacattgaacgaatgtatgggggcaaataaaatgttgttgtcttattgacagttgtgcaggaggtagcctggtggttttcaacctctagaattttaagcctttgttgaactgttagaatgtaaggtatatcattctaaagatagagtaaaaagaaaacaaaaccaaaagttattaaaattgttgtccggtttactttaacttagttttgcatagttctagtgcagctgaaattgaaaagttatttccctttagctgtgttattatagagcagaaattctgtttttaaaaattagcctaagatatacttgtttttgtaaagaaaaatatttaatgttgaacaaaataaattggagttggagtagaatgtagtttgaggaaatttgcagcttccaatgcctcttgtcttcctatttcagaagtttaaatattaagcatgacagaaaatatgtattaacactactcaaagcaaaagtgctgcagggctttaaaattctcttccaaccatttatcttgaaggaaaaattcaatagtaatataatacacaaaatcaaataataccttagaaggtattaagattataattgttgcataggttagatatagagtcattgtaatgttgtgaataattacagtgcctaaaataagaatagaacaacatatacaacaccaaaaaatatctagtaatatatttaaagggaaattgagctgctttttttgaaactttgagatctaaaaataactgtaattatttgaatgactaagaggaaagtacattttttgaaatgctgaaaattgcctttctgtgtttattcaaactgaaaagctgagaccaagagcaaggaaggtaaaaagttaacaggcaaacattttctcttagaaaaggtgataaaatcataagtatttggaattagaacccttgcacagcactgaacctgggaaagagatttaaactctgaatttatctttgataacagggattgattttaaaatgtacatgtattaaattacatttgtaatttaaggtctgtttgctgttgctgattttattcttgatcagtagtttgcatttcagaaagcctttcattttgctttaagtttagcaaagcggggttataatgaatgacttccccaatatcttgcttgaacttacagtgattaacttggatgagttttgggaagttaaagggaagaaaacactgttatcattttttcctgtttgggaagagcttagaaactggaaatactagatttgggagaagggcagagttacttgataagggacttgatgtttgtgcagtaacttgggagtgtggtttctttttgaatctttaattaaaacctgggattatatatccctgataaatattcacacttgaaccatagttactgtaaaatgcaaaaaatcttaatactgttattctttgcactttttcttaatcattttttatatatatgcatatatatatgtgtgtgtgtgtgttgcttatgttgttttgtacagatgtgggccaccattgcaacaaaatacattctttttgctctaaaatatttatgaagaaaatacttaaatgttatgtatatggtggtaataagggaaaaatcaagtattataaacaagaatgaaggtttttgtaaagatttctgttcagcgttttgcaaggtaaaattttaggcaagttttccctgaagttatgtgtatgtgagtattctcattcttcccaacttgcctttgaagagtgaaataccattattatcaagtagactactgttcagcttttattccttccctggttgtttatcccttaggaatgagtttcttagactttcccaatatgtgattttttttcccatttagaatggtgattttaaatgtgtgagtgcatgtactatcttatctcagatatttgcacccccaatctgcccccaactcccaaaagctagaacactgccaactgatctgttataggtcctttagaaacacataattaacacttaaggttgggtgctgctaattctttgcaaaaatccaaatattgttaagggaccagggagatgccactaccccttgattttccatctaaaaatatacatgtttatgtaaacaaatctttccatatccatagtgacttttcaagtatttaagcctaaagattttgatctcacatttttatacctgtttaaattgctcacagttattacatacacatcagccatcaactaaagttgtactttaaaaatttactacaatatgtacatttctaagtcaaacacttgtgacttttgctttaattccatgaatgttcctgcctccttgatatttgtatttattctttttttctctagagtagaggtataattgtgtgatatttcagaaatacagataaatgattcaaaaagtcacagttaaggagaatcatgtttctttgatcatgaataactgattagtaagtcttgcctatattttcctgatagcatatgacaaatgtttctaaggtaacaagatgagaacagataaagattgtgtggtgttttggatttggagagaaatattttaatttttaaatgcagttacaaattataatgtattcatatttgtactttctgttaaaatgcatgattgcagaattgtttagattttgtgtttattcttgatgaaaagctttgtttgttcttgtttttaagtttgcactcaaatcttaagaaataaatccacccatgttatcaaaaaaaaaaaaaaaaaaaa

SEQ ID NO: 622 - protein, 711 aa, Homo sapiens
  ref <308>: DATABASE ACCESSION NUMBER: Refseq / NP_075266
  ref <309>: DATABASE ENTRY DATE: 2001-02-06
MKLKLNVLTIILLPVHLLITIYSALIFIPWYFLTNAKKKNAMAKRIKAKPTSDKPGSPYRSVTHFDSLAVIDIPGADTLDKLFDHAVSKFGKKDSLGTREILSEENEMQPNGKVFKKLILGNYKWMNYLEVNRRVNNFGSGLTALGLKPKNTIAIFCETRAEWMIAAQTCFKYNFPLVTLYATLGKEAVVHGLNESEASYLITSVELLESKLKTALLDISCVKHIIYVDNKAINKAEYPEGFEIHSMQSVEELGSNPENLGIPPSRPTPSDMAIVMYTSGSTGRPKGVMMHHSNLIAGMTGQCERIPGLGPKDTYIGYLPLAHVLELTAEISCFTYGCRIGYSSPLTLSDQSSKIKKGSKGDCTVLKPTLMAAVPEIMDRIYKNVMSKVQEMNYIQKTLFKIGYDYKLEQIKKGYDAPLCNLLLFKKVKALLGGNVRMMLSGGAPLSPQTHRFMNVCFCCPIGQGYGLTESCGAGTVTEVTDYTTGRVGAPLICCEIKLKDWQEGGYTINDKPNPRGEIVIGGQNISMGYFKNEEKTAEDYSVDENGQRWFCTGDIGEFHPDGCLQIIDRKKDLVKLQAGEYVSLGKVEAALKNCPLIDNICAFAKSDQSYVISFVVPNQKRLTLLAQQKGVEGTWVDICNNPAMEAEILKEIREAANAMKLERFEIPIKVRLSPEPWTPETGLVTDAFKLKRKELRNHYLKDIERMYGGK

SEQ ID NO: 623 - DNA, 1831 bp, Rattus norvegicus
  ref <308>: DATABASE ACCESSION NUMBER: Refseq / NM_053656
  ref <309>: DATABASE ENTRY DATE: 2003-01-23
gccgctgcacagccccggcttcccgcgggggcggccatggtccggcgcttggcccggggctgctggtccgcgttctgggactacgagacgcctaaggtgatcgtggtgcggaatcggcgcctgggattcgtgcaccgcatggtgcagcttctcatcctgctttacttcgtgtggtacgtcttcatcgtgcagaaaagctaccaggacagcgagaccggaccggagagctccatcatcaccaaagtcaaggggatcaccatgtcggaagacaaagtgtgggacgtggaggaatacgtaaagcccccggaggggggcagtgtagtcagcatcatcaccaggatcgaggttaccccttcccagaccttgggaacatgcccagagagcatgagggttcacagctctacctgccattcagacgacgactgtattgccggacagctggacatgcaaggcaatgggattcgcacagggcactgtgtaccctattaccatggggactccaagacctgcgaggtgtcagcctggtgcccggtggaggatggaacttctgacaaccattttctgggtaaaatggccccaaatttcaccatcctcatcaagaacagcatccactaccccaagttcaagttctcaaagggcaacattgcaagccagaagagtgactacctcaagcattgcacatttgatcaggactctgacccatactgtcccatcttcaggctgggtttcattgttgagaaggcaggagagaacttcacagaactggcacacaagggcggtgtcattggagtcatcatcaactggaactgtgacctggacttgtctgaatcagagtgcaaccccaaatattctttccggaggctcgaccccaagtatgaccctgcctcctcaggctacaacttcaggtttgccaagtattacaagataaacggcactaccaccactcgaactctcatcaaagcctatgggattcgaatcgatgttatcgtgcatggacaggcagggaaattcagtctcattcccaccatcatcaatctggccactgctctgacctccatcggggtgggctccttcctgtgtgactggattttgttaacgttcatgaacaaaaacaagctctacagccataagaagttcgacaaggtgcgtactccaaagcatccctcaagtagatggcctgtgacccttgcccttgtcttgggccagatccctcccccacctagtcactactcccaggatcagccacccagccctccatcaggtgaaggaccaactttgggagaaggggcagagctaccactggctgtccagtctcctcggccttgctccatctctgctctgactgagcaggtggtggacacacttggccagcatatgggacaaagacctcctgtccctgagccttcccaacaggactccacatccacggaccccaaaggtttggcccaactttgatctcatcctcactaaactacagacctggacctgggaaggcagagacagctttggctgctaaggcagtcctagagaagatctgcgctcttcagtaaccatgtccatgtgactgggaaacagaaacctgtgcaagaggacaggcgtcttgctttagcccaagcttacattcttcctctccctaaggcctctggggagaagtgggttccctgccatctcctttcccaacagaactcctcataggacctttccctgctcacctcttgtactctcatacagtattcagggaccccaagttaggggctatgctcctgttgtataatttcaagcccccctttagaagttgcagcatgctgagttcaataaaccagtgatgagc

SEQ ID NO: 624 - protein, 472 aa, Rattus norvegicus
  ref <308>: DATABASE ACCESSION NUMBER: Refseq / NP_446108
  ref <309>: DATABASE ENTRY DATE: 2003-01-23
MVRRLARGCWSAFWDYETPKVIVVRNRRLGFVHRMVQLLILLYFVWYVFIVQKSYQDSETGPESSIITKVKGITMSEDKVWDVEEYVKPPEGGSVVSIITRIEVTPSQTLGTCPESMRVHSSTCHSDDDCIAGQLDMQGNGIRTGHCVPYYHGDSKTCEVSAWCPVEDGTSDNHFLGKMAPNFTILIKNSIHYPKFKFSKGNIASQKSDYLKHCTFDQDSDPYCPIFRLGFIVEKAGENFTELAHKGGVIGVIINWNCDLDLSESECNPKYSFRRLDPKYDPASSGYNFRFAKYYKINGTTTTRTLIKAYGIRIDVIVHGQAGKFSLIPTIINLATALTSIGVGSFLCDWILLTFMNKNKLYSHKKFDKVRTPKHPSSRWPVTLALVLGQIPPPPSHYSQDQPPSPPSGEGPTLGEGAELPLAVQSPRPCSISALTEQVVDTLGQHMGQRPPVPEPSQQDSTSTDPKGLAQL

SEQ ID NO: 625 - DNA, 1344 bp, Homo sapiens
  ref <308>: DATABASE ACCESSION NUMBER: Refseq / NM_016318
  ref <309>: DATABASE ENTRY DATE: 2003-02-19
atggccgccgcccagcccaagtaccccgccggggcgaccgcccggcgcctggcccggggctgctggtccgccctctgggactacgagacgcccaaggtgatcgtggtgaggaaccggcgcctgggggtcctgtaccgcgccgtgcagctgctcatcctgctctacttcgtgtggtacgtattcatcgtgcagaaaagctaccaggagagcgagacgggccccgagagctccatcatcaccaaggtcaaggggatcaccacgtccgagcacaaagtgtgggacgtggaggagtacgtgaagccccccgagagcataagggtccacaacgccacctgcctctccgacgccgactgcgtggctggggagctggacatgctgggaaacggcctgaggactgggcgctgtgtgccctattaccaggggccctccaagacctgcgaggtgttcggctggtgcccggtggaagatggggcctctgtcagccaatttctgggtacgatggccccaaatttcaccatcctcatcaagaacagcatccactaccccaaattccacttctccaagggcaacatcgccgaccgcacagacgggtacctgaagcgctgcacgttccacgaggcctccgacctctactgccccatcttcaagctgggctttatcgtggagaaggctggggagagcttcacagagctcgcacacaagggtggtgtcatcggggtcattatcaactgggactgtgacctggacctgcctgcatcggagtgcaaccccaagtactccttccggaggcttgaccccaagcacgtgcctgcctcgtcaggctacaacttcaggtttgccaaatactacaagatcaatggcaccaccacccgcacgctcatcaaggcctacgggatccgcattgacgtcattgtgcatggacaggccgggaagttcagcctgattcccaccattattaatctggccacagctctgacttccgtcggggtgggctccttcctgtgcgactggatcttgctaacattcatgaacaaaaacaaggtctacagccataagaaatttgacaaggtgtgtacgccgagccacccctcaggtagctggcctgtgacccttgcccgtgtattgggccaggcccctcccgaacccggccaccgctccgaggaccagcaccccagccctccatcaggccaggagggccaacaaggggcagagtgtggcccagccttcccgcccctgcggccttgccccatctctgccccttctgagcagatggtggacactcctgcctccgagcctgcccaagcctccacacccacagaccccaaaggtttggctcaactctga

SEQ ID NO: 626 - protein, 447 aa, Homo sapiens
  ref <308>: DATABASE ACCESSION NUMBER: Refseq / NP_057402
  ref <309>: DATABASE ENTRY DATE: 2003-02-19
MAAAQPKYPAGATARRLARGCWSALWDYETPKVIVVRNRRLGVLYRAVQLLILLYFVWYVFIVQKSYQESETGPESSIITKVKGITTSEHKVWDVEEYVKPPESIRVHNATCLSDADCVAGELDMLGNGLRTGRCVPYYQGPSKTCEVFGWCPVEDGASVSQFLGTMAPNFTILIKNSIHYPKFHFSKGNIADRTDGYLKRCTFHEASDLYCPIFKLGFIVEKAGESFTELAHKGGVIGVIINWDCDLDLPASECNPKYSFRRLDPKHVPASSGYNFRFAKYYKINGTTTRTLIKAYGIRIDVIVHGQAGKFSLIPTIINLATALTSVGVGSFLCDWILLTFMNKNKVYSHKKFDKVCTPSHPSGSWPVTLARVLGQAPPEPGHRSEDQHPSPPSGQEGQQGAECGPAFPPLRPCPISAPSEQMVDTPASEPAQASTPTDPKGLAQL

SEQ ID NO: 627 - DNA, 106 bp, Rattus norvegicus
  ref <308>: DATABASE ACCESSION NUMBER: EMBL / S59893
  ref <309>: DATABASE ENTRY DATE: 2000-03-04
gtgtttggatgattaaaatatgaaaaggaagattcttcctcttaattgcctttgtaatatgagaatgtattagtacagacttgtaaaatatatactgtataaaaat

SEQ ID NO: 628 - DNA, 454 bp, Rattus norvegicus
  ref <308>: DATABASE ACCESSION NUMBER: EMBL / AA866345
  ref <309>: DATABASE ENTRY DATE: 2000-03-03
ctatagaactcataagcatagagagtccacgtggtgatcatgtgctcaatgaacttttcaacaatccctagctgtgccttttaaaccatgcaatattcaggatagttggaatgaaagagtgaaaagctgctatttcggtaacttacttctctctgggaaagggcaggggagtcagcaaaccgtctacctcgagtgctcttccactctgtctgaggctgcactaacctctgacatctgttcctgcatgtgacaacagaaagccttcaggtggacttgtacatgtttgtgctttggaagcactaaaaggaaaaaataatatgtatattttcttcgctgtttatacagaagtttatatggagcagtattgttgtttttatttgtaaaaatgtaagtgatcaaagagattttcactttgcatatatgaaataaaaccattttattaattttcaaagct

SEQ ID NO: 629 - DNA, 589 bp, Homo sapiens
  ref <308>: DATABASE ACCESSION NUMBER: EMBL / BF000403
  ref <309>: DATABASE ENTRY DATE: 2000-10-13
gaacttgtgaaaatcaataaaatgatttattttatatatgcaaaatcaaaatctctttgtacactttaatttttgcaaattcatacaaacataacaatactgctccatataaacttttgtataaacattaaaggaaatatacacatattttgttcttcttgtgcttccaaagcacagaatgtataagtccatctgaagactttctatcatcacatgcaagaacaaatgtcagaggttgggggcagcctcaagtgcactttgtaatgtctctagacaaaagagaagagagttggaggtagattgtttggtgactctccctgccccttcccacagagaaataagttacccaaatagcagcttcttacttctttgattcaaactatcctgaatattgcatggtttaaaaggcacaactaggaattgttgaaaactttgttcagcacacataagattgccatttcctttctgtacacctattctttctgaaggacacagtaagagcaccaagttgtgctccacttgcaggtggcccctcgccactctgagaatgcctggaatggcaaagttcaagtgagtgacctctcattac

SEQ ID NO: 630 - DNA, 4224 bp, Rattus norvegicus
  ref <308>: DATABASE ACCESSION NUMBER: Refseq / NM_017218
  ref <309>: DATABASE ENTRY DATE: 2003-01-13
agttgcagtttgcaacctccgctgcggccgcagctacctattcgctggctgttcaggtggctttcgcttcgatgtcctcctaatcttggggcccccgggccagactcgggagggctcccttcaccatccgctggaatcatgagggcgactgggactctgcaggtgctgtgcttccttctcagcctggcccggggttccgagatgggcaactctcaggcagtgtgtcctgggactctgaacggactgagtgtgaccggagatgcagacaaccagtaccagacgctgtacaaactgtatgaaaagtgtgaggtggtcatgggtaacctggagattgtgctcacaggacacaatgctgacctttccttcctgcaatggatccgagaagtgacaggctacgtcctcgtggccatgaatgaattctctgtgcttcccttgcctaacctccgagtggtccggggaacccaggtctacgatgggaagttcgccatctttgttatgttgaactacaacaccaactccagccatgctctgcgccagctcaagttcactcagctaacagagattctgtcagggggcgtttacattgaaaagaatgacaaactttgccacatggatacaattgactggagagacatcgtgagggttcgaggcgctgagatagtggtgaagaacaatggtgcgaactgtccaccctgtcatgaggtctgcaagggacggtgctggggtcctggaccggacgactgccagatattgaccaagacgatctgtgcccctcagtgtaacggtcgctgcttcgggcccaaccctaaccagtgctgtcacgatgagtgtgctgggggctgctctggacctcaggacacagattgctttgcctgccgacgcttcaatgacagtggggcctgtgtgccccggtgtccagagcctcttgtgtacaacaagctaacgtttcagcttgaacccaacccccataccaagtatcagtatggaggagtctgcgttgccagttgtccccataactttgtggtggaccagacgttttgtgtcagggcttgtcctcctgacaagatggaagtagataagcacggactgaagatgtgtgagccttgcggagggctgtgccccaaagcctgtgaggggacaggctctggaagccgctaccagactgtggactcaagcaacattgatgggttcgtgaactgtaccaagatcctgggcaatctggacttcctcatcaccggcctcaacgttgacccctggcataagatacccgcactggacccggaaaagctcaatgttttcagaacagtccgggagatcacaggttacctaaacatccagtcctggccccctcacatgcacaacttcagtgttttttccaatctgacaaccatcgggggcagaagcctctacaaccggggcttctccttgttgatcatgaagaacttgaatgtcacatccctgggtttccggtccctgaaggaaatcagtgctgggcgtgtctacataagtgccaatcagcagctttgctaccaccactctctgaactggaccagactgcttcgggggccctcggaagagagacttgacatcaagtacgaccggcctctgggagaatgcttggcagagggcaaagtgtgtgatccactgtgttcctctgggggatgctggggcccaggccctggtcagtgcttgtcttgtcgaaactacagccgggaaggtgtctgtgtgactcactgcaacttcctgcaaggggaaccccgggagtttgttcatgaggctcaatgcttctcctgccatccagaatgcctacccatggagggcaccagcacatgcaatggctcgggctctgacgcttgtgcacgatgtgctcattttcgtgacgggccccactgtgtgaacagctgcccccatggaatcctaggtgccaaaggtccaatctacaagtatccagatgctcagaatgagtgtcggccctgccacgagaactgcacccaagggtgtaatggaccagaactacaagactgtttaggccaagcagaggtgttgatgagcaaacctcatctggtaatagcggtgacggtgggactggccgtgatcctcatgattctgggaggctcttttctgtattggcgtggacgcaggattcagaacaaaagggctatgagacgctacttggagcggggtgagagcatcgagcctctggacccaagcgagaaggcaaacaaagtcttggctagaatcttcaaagagacagagctgaggaaacttaaagtgcttggctctggcgtctttggaactgtccacaaggggatttggattcctgagggtgaatccatcaagattccagtctgcattaaagtcatcgaggacaagagtgggcgccaaagttttcaagctgtgactgaccatatgctggccgttggcagcctggaccatgcccacattgtacggctgctaggactgtgcccagggtcatctctgcagcttgttactcagtacttgcccctgggctccctccttgatcatgtgaaacagcaccgtgagacattgggaccacagctgctgctcaactggggagtacaaattgccaagggcatgtattacctcgaggaacatagcatggtgcacagggaccttgcgctccggaacgtgatgctcaagtcaccaagtcaggtccaggtggcagattttggtgtggctgacttgctgccaccagatgacaagcagttgctacatagtgaggccaagactccaattaagtggatggcccttgagagtatccactttgggaaatacacacaccagagtgatgtctggagttatggtgtaacagtttgggagttgatgaccttcggggcagagccctatgcagggttacgactggctgaaataccagacctgctagagaagggagagcggttagcacagccccagatctgcaccattgacgtctacatggtcatggtcaagtgctggatgattgatgagaatattcgcccaacctttaaagaactagccaatgagtttaccaggatggcccgtgacccaccaaggtatctggtcatcaagagagcgagtgggcctggaacacctcctgcggcagaaccctctgttctgaccaccaaagagttgcaggaggcagagctggagccagaactggacctagacctagacttggaggcagaggaggagggcctggccacctccctgggttctgctctcagcttgcctacgggaacgctcacccggccacgtgggagccagagccttttaagtccctcatctgggtacatgcccatgaaccagagcagtctcggagaggcttgtctggattctgcggttttggggggtcgtgaacagttctcccgtcccatctctctgcacccaattccacgggggcgtccagcatcagagtcatcagagggccacgtgacaggctctgaggctgaactccaagagaaagtgtcagtgtgtaggagccgaagccggagtcggagcccgcggcctcgtggggacagtgcctaccattcgcagcgacacagcctgcttactcctgtgaccccgctctccccaccagggttagaggaggaggacggcaatggctacgtcatgccagatacacacctcagaggtgcgtcctcctcccgggaaggcaccctctcgtcggtaggtctcagttctgtgttgggtactgaggaggaagatgaagatgaggagtatgaatacatgaaccggaagagaaggggtagccctcctcggccccccaggcctggctccctggaagaactgggttacgagtacatggatgtgggttcagacctcagtgcttctctgggcagtacacagagctgcccgctccatcccatggccatcgtgccctctgctggcacaactccagatgaagactatgagtacatgaaccggaggcgtggtgcgggtggcgccggaggggactatgcagctatgggggcctgcccagcagctgagcaagggtacgaggagatgcgagctttccaggggcctggacatcacgccccccatgttcgttatgcccgcctcaaaactctgcgtagtttagaagccaccgactctgccttcgacaaccccgattactggcacagcaggcttttccccaaggctaatgcccagagaacgtaaacttctgctccgtgacgctctgcgggcgtgtggcggcagctagtgcctcttcgagggtacccaatg

SEQ ID NO: 631 - protein, 1339 aa, Rattus norvegicus
  ref <308>: DATABASE ACCESSION NUMBER: Refseq / NP_058914
  ref <309>: DATABASE ENTRY DATE: 2003-01-13
MRATGTLQVLCFLLSLARGSEMGNSQAVCPGTLNGLSVTGDADNQYQTLYKLYEKCEVVMGNLEIVLTGHNADLSFLQWIREVTGYVLVAMNEFSVLPLPNLRVVRGTQVYDGKFAIFVMLNYNTNSSHALRQLKFTQLTEILSGGVYIEKNDKLCHMDTIDWRDIVRVRGAEIVVKNNGANCPPCHEVCKGRCWGPGPDDCQILTKTICAPQCNGRCFGPNPNQCCHDECAGGCSGPQDTDCFACRRFNDSGACVPRCPEPLVYNKLTFQLEPNPHTKYQYGGVCVASCPHNFVVDQTFCVRACPPDKMEVDKHGLKMCEPCGGLCPKACEGTGSGSRYQTVDSSNIDGFVNCTKILGNLDFLITGLNVDPWHKIPALDPEKLNVFRTVREITGYLNIQSWPPHMHNFSVFSNLTTIGGRSLYNRGFSLLIMKNLNVTSLGFRSLKEISAGRVYISANQQLCYHHSLNWTRLLRGPSEERLDIKYDRPLGECLAEGKVCDPLCSSGGCWGPGPGQCLSCRNYSREGVCVTHCNFLQGEPREFVHEAQCFSCHPECLPMEGTSTCNGSGSDACARCAHFRDGPHCVNSCPHGILGAKGPIYKYPDAQNECRPCHENCTQGCNGPELQDCLGQAEVLMSKPHLVIAVTVGLAVILMILGGSFLYWRGRRIQNKRAMRRYLERGESIEPLDPSEKANKVLARIFKETELRKLKVLGSGVFGTVHKGIWIPEGESIKIPVCIKVIEDKSGRQSFQAVTDHMLAVGSLDHAHIVRLLGLCPGSSLQLVTQYLPLGSLLDHVKQHRETLGPQLLLNWGVQIAKGMYYLEEHSMVHRDLALRNVMLKSPSQVQVADFGVADLLPPDDKQLLHSEAKTPIKWMALESIHFGKYTHQSDVWSYGVTVWELMTFGAEPYAGLRLAEIPDLLEKGERLAQPQICTIDVYMVMVKCWMIDENIRPTFKELANEFTRMARDPPRYLVIKRASGPGTPPAAEPSVLTTKELQEAELEPELDLDLDLEAEEEGLATSLGSALSLPTGTLTRPRGSQSLLSPSSGYMPMNQSSLGEACLDSAVLGGREQFSRPISLHPIPRGRPASESSEGHVTGSEAELQEKVSVCRSRSRSRSPRPRGDSAYHSQRHSLLTPVTPLSPPGLEEEDGNGYVMPDTHLRGASSSREGTLSSVGLSSVLGTEEEDEDEEYEYMNRKRRGSPPRPPRPGSLEELGYEYMDVGSDLSASLGSTQSCPLHPMAIVPSAGTTPDEDYEYMNRRRGAGGAGGDYAAMGACPAAEQGYEEMRAFQGPGHHAPHVRYARLKTLRSLEATDSAFDNPDYWHSRLFPKANAQRT

SEQ ID NO: 632 - DNA, 474 bp, Rattus norvegicus
  ref <308>: DATABASE ACCESSION NUMBER: EMBL / AA892485
  ref <309>: DATABASE ENTRY DATE: 2000-03-03
tcctgtcctgaacgctctttcgttttatcatgtttgacctttgtgttagagggacgtagggctgacatgcaggatggtaaaaataaattgggagcagacttcctgttgatatgttttcataaatgtttgggattatttgtgactttaaatagccttcaccttgtgtgtaatatgggggggccactccctgaaatttgaagtgtttcattggtgttgaatctgtttctaaatgttcgttatcatgtggtgcacaagtgacactccaaatagttcgcaaacctccaatggccatgtttctgtacagacaggcccattcagtggcctgccgcttcagcacggagatattctagtactgaaaaccacagaaagaacatgcttatcacaggggcacatcattagcatgagccaaatctgatcaaatgtgaaatatttgaaaaatgactcattctttgctaatgctcttttgttctcttg

SEQ ID NO: 633 - DNA, 3295 bp, Rattus norvegicus
  ref <308>: DATABASE ACCESSION NUMBER: Refseq / NM_133305
  ref <309>: DATABASE ENTRY DATE: 2003-01-13
ccacacttctcccactggcctcttcttcaccatgattcacagtcttttcttgatcaactctgctggggatattttcctggagaagcactggaaaagcgtggtcagccgctctgtttgcgattactttttcgaggcccaagagagagctacggaggctgaaaatgtgcctcccgtcatccccacacctcaccactaccttctgagcgtttaccggcacaagatcttctttgtggctgtgatccagacggaggtcccgcctctgtttgtcattgaattccttcaccgagtagtggacacatttcaggactatttcggggtctgctctgagccagtgatcaaagacaacgtggtggtggtctacgaggtgttggaagagatgctggacaatgggttccccttggctacggagtcgaacatcctcaaggagctgataaagcctcccaccattctccggacagtagtcaacaccatcacaggaagcaccaatgtgggcgaccagcttccaactgggcagctgtcggtggtgccttggcgacggactggggtgaaatataccaacaacgaggcctatttcgacgtggttgaagagatagacgccatcattgacaaatcaggttccacagtcaccgctgagatccaaggggtgattgatgcctgtgttaaactgaccgggatgccagatctcacgctgtccttcatgaaccccaggttgctggatgatgttagcttccacccctgtgtccgtttcaagcgctgggaatctgagcgcatcctctccttcatccctcctgacggcaacttccgcctgctctcctaccacgtcagtgcacagaacctagttgccattccagtctatgtcaaacacagcatcagcttccgggacagtggctcacttggacgctttgaaatcacagtggggccgaagcagaccatggggaagaccatagagggtgtgactgtaaccagccagatgcccaaaggagtcttgaacatgagcctcactccatcccaggggacacacacgtttgacccggtgacaaagatgctgtcttgggatgtaggaaaaataaacccgcaaaagctgccaagtttgaaggggacaatgggtctccaggtcggagcttctaaacccgatgagaaccctacaattaaccttcagttcaagatccagcagctggccatttctggactcaaagtgaaccgtctggatatgtacggagagaagtacaagccctttaagggcataaaatacatgaccaaagccggcaagttccaagtccgaacctgaagggaaagtcttggtgaaggaacactcacgaacactttttcgtttcttacttgtctaaaagtaaaatgtcagcctgtttcttaggtcagttccctcaggctccatctgccccctttgtcctctgtcttcagtaccacataagtgatggagggacaggaggttcctcagggaaaacgaagccaaacccatcgcagcactgactgagtcctagagtgtgggctggagagtggtggcctgtcgcactgcatttcacctcttaacacggttgccgttgggaaaagaccggcctttgacgtttggtttcaatcacctaaccccaatggaagatgtctatattgatttttttttatgatagaaagatttgaaagagagaaaaaaaaagaatagaaaaaaatgggtgttagtccaagaaagagcagttgagatttgattggtctgggttgtaactcggtgatcaagtgccgacctgggtcctgtgcaagccctggttcattcctggtaccgtccacaatacaagacagatctgctctacgaggggcaagaccaagaagctggtgtgaagagagttgtgaagagagaggtcacagtgaagagttggtgagaacagttatcagaatctccccaggggctaggacgagcagaacgcagtgtttctttctgaccccctcttacgtgtagaaaggatttgcatgtccaggactttcaaagttcaagtccacgcttgaactgaaactgcagtgggatcagcgtcctttggagactaaggtgccacacacagcctgcctctggagattctcactcgctgtttgcgctggcccatcgtcctggtgggaaggttacctgtcagagcagcttacagccttctgctggttatctgactccttggtgggctcgccccccaaaaacagcagtgatctcggtgcaggcagatctgtgaatgatagtggcagagtcgaggtgaactactccatggacagccatgctcggtgaccaccattacattaatgtttgtgaggccggactggcctatgccttgctttttcctgtctgaaggtcccatcagaacccctgagtaggtgtgaacccaccgaggacatgcgcgagtgcacaaatgcttcccactgtctgttccggtctccagacagacagctcccagtccgttcttacaacctaaaaaggtgtcttgagcctctgaatagaataccataggagggcaggcagtgttggccacaagtagctccccattactccccagtttaaacccagcagctgaaggagcagagtatctcaatctgtttcaatgtgtcctttagtcattttactaaacacataaggtgcgggtgtgtgttgtttttaacttagagcagcctgtgctctgtattgtgcctggagggagaagaccggcttgcttcagtctgcagggctccccctgaagtcccgtttctaagtgcttgtgcttgcttgcagggctctcccctgaagtcccgtgtctaagtgcttgtgcttgcttagtttctattgtttgctagtgctctcatgctgtggccaggacttatttttgctgcccagtagagttactctgtggtttccttgtgtggtgaactgcgctgtgtacagtcagatgttccttaccaggatctggactagtgtagccccacaccctgctgcaggggacacttcaggtcactttcacaggctctgggggattccgaggtttcttgggtcataggtactatttgcatcggtccccgtgtgtgtttaggtttgtacgtgtggctcattactcccgagagcacaggatagcttgtttttccaggcagagacagggttggagtacgggctccccaggcccagacaccgtggatacagccaagcctcgccgtccccacctagtggctgtcagcagaggtggcgcaggcctctccatagctgctcgctctgtgtgtggtccatgtgtggaagcagcatttctgttgaagtcttaataaagctttaccagtcttgtgg

SEQ ID NO: 634 - protein, 418 aa, Rattus norvegicus
  ref <308>: DATABASE ACCESSION NUMBER: Refseq / NP_579839
  ref <309>: DATABASE ENTRY DATE: 2003-01-13
MIHSLFLINSAGDIFLEKHWKSVVSRSVCDYFFEAQERATEAENVPPVIPTPHHYLLSVYRHKIFFVAVIQTEVPPLFVIEFLHRVVDTFQDYFGVCSEPVIKDNVVVVYEVLEEMLDNGFPLATESNILKELIKPPTILRTVVNTITGSTNVGDQLPTGQLSVVPWRRTGVKYTNNEAYFDVVEEIDAIIDKSGSTVTAEIQGVIDACVKLTGMPDLTLSFMNPRLLDDVSFHPCVRFKRWESERILSFIPPDGNFRLLSYHVSAQNLVAIPVYVKHSISFRDSGSLGRFEITVGPKQTMGKTIEGVTVTSQMPKGVLNMSLTPSQGTHTFDPVTKMLSWDVGKINPQKLPSLKGTMGLQVGASKPDENPTINLQFKIQQLAISGLKVNRLDMYGEKYKPFKGIKYMTKAGKFQVRT

SEQ ID NO: 635 - DNA, 3472 bp, Homo sapiens
  ref <308>: DATABASE ACCESSION NUMBER: Refseq / NM_006803
  ref <309>: DATABASE ENTRY DATE: 2001-07-19
gctgagagcagcaaggccagagttgaaaacttacagagtcctgaggctttcagactgaaaaaggctttcttctgtcactgacaatcgccaccatgatccatagtcttttcttgatcaactcctctggagacattttcctggagaaacattggaaaagtgtggtcagccgttctgtttgtgattacttttttgaggcgcaagagagagctactgaggcagaaaatgtgcctccggttatccctacccctcaccactatctcttaagtgtttaccgccacaagatcttttttgtggccgtgatccagacggaggtcccccctctgtttgtcattgagtttcttcaccgagtggtggacacatttcaggattattttggagtctgttcagagccagtgatcaaagacaatgtagttgtggtttatgaggtattggaagagatgcttgacaatggttttccattggctaccgagtcgaacattcttaaagaactcataaagcctcctaccatccttcgaacggttgtcaacaccatcacaggaagcacgaatgtgggtgaccagcttcccactgggcagctgtcagtggtgccttggcgacggactggggtgaaatataccaacaatgaggcctattttgatgtgattgaagagattgatgcaattattgataaatcaggctccacaattactgctgagatccagggggtgattgatgcctgtgtcaagctgactggcatgccagaccttacactttccttcatgaaccctaggttgttggatgatgtcagcttccatccttgtgttcgtttcaaacgctgggaatctgagcgcatcctctccttcatccctcctgatggaaacttccgcctgctgtcttaccatgtcagtgcacagaatctggttgcaatcccagtgtatgtcaaacataacatcagtttccgggacagtagttcccttggacgctttgaaataacggtgggacccaagcagacgatggggaagaccattgagggagtgactgtcaccagccagatgcccaagggggtcctgaacatgagccttactccatcacaggggacacacacattcgacccagtcacaaagatgctgtcttgggatgtaggaaaaataaatccacaaaagctaccaagtttgaaggggaccatgagtcttcaggctggagcttccaaaccagatgaaaaccccacaattaacctgcagtttaagatccagcagctggccatttctggactcaaggtgaatcgtctggatatgtatggagaaaagtacaaaccctttaagggcataaaatacatgaccaaagctgggaagttccaagttcgaacctgaagggagcatttgctgagggaatagtcttgcacattttttcatttcttacttgtctaaaagtaaaaaaaaatatcagcctgtctcctaggtcagtcccctcctggacccacccgctcccttttttccttagccttcagtgccatggaactaatcaagggaggaaaaggtcaccagggagaactggacagaactgaaacacagcaacaccagttctcaaggacaaggtgtgtgatgggggtaggaagcttggtgcttatgtaaccattttaaacgtggtttctataggaaagaccaacatttgtttagcttgcttggctttaattatctaaagccaatgaaagacttctttgttgattttttaagatagaaagattaaaaagaaagaaagatgggaagaaaatgaatgtcagtcaaggaaaggccacttaaggatctgctctatgaaggagaagaaagaggaaaaagaagtaaaggagttaggaggagacacttaaatgaaagattggcaagaaaagcagtcggactctaccttaaggagggatgggaaggaaagagttgtgttggtttctttctgattcctctactcatgtagaaaacacttgtacttctggaaatggactggagactttttaaatttgagtccactattgacatggaaaccccagtggaatcagattttccctcaaagaccatgatggtatcggactagttttcagacactgcctgttgctgtccatcagcacttggtctcttatcttcagtgagaaggtgacccgccttcttcccatggtggctgcctaaagtgcttcttttctaacccaaaacagttctactcacttccttttacagaattcaccggccattttcctgttacctgatccttctacaggatttttaaaaagtaagagagtttcagagaagccgatcccataatccccagtgcagccagggcccgtgtgtcatcgtactggagtagagggccgactcttcccatgaaggtgagcacagctgtgagtgagtgagctcatatctccatttgtcagtgctggactggtaccagatcgtaaccttcccgttggtcggaaacttttccatctgtcgccctagaaaaagagaaagcttaccatcgagggtgtggttgatccttgaagctgcttggtaaagttatcatttcctcagtcttttcttttgtactcctatcatgtattcattaatatctaccagtcccttttcattctaagacaaaacatttctcctaaatctctgaataaaatcagtgctgtaggaagatggactgtgttgatcatgggtgtaagcaacccagtttaagaaacatggcaactaaagggatacctcaggctttctttcccagtgggtcatttttgtcctagttcagtgtgtctgttactatttaaatatttatacaaaagggtttttgtttatagcttaaggaatgatactgtgctctgcttggtgcatggagaaaaaggaagacccgtactctccacaccctagagcttttctctaaatattgtgcaaagtttttgctagttttatcttctgactttgggactagtttttgctgcagagttgtgttgctttgtgattttcctctgggatagtgtactgtacacaaccagatgtgttccacactccgtgactccgcagtttgtcctggagtgacatacacatccaccatggaaagggaagcatctctgcctgtggattctcaagtacttggaagcacctctcctgaggaacctacaggattctaaggtttcctaggtcactgaacaactaatcttggtccctgaatatttctaggtttgtaagtgcagcagttttatttcctctagaactcatcctgtttcaagggaagtacctaagaagatatagagtgtttctagggtaagggacctgcaggtgtaagcatagatgaaataactgtcctgtcacatgtgcagcaggccatggagtgtagcgggcatcgctgccgccattcctgcagcatcaccataagcagtgcagggtgtctccatcgagctgtttggttccatgtgtgtttaacatgtgcagaagtagcttctctgtttaagtttaataaagttgagtttcaaccagtc

SEQ ID NO: 636 - protein, 418 aa, Homo sapiens
  ref <308>: DATABASE ACCESSION NUMBER: Refseq / NP_006794
  ref <309>: DATABASE ENTRY DATE: 2001-07-19
MIHSLFLINSSGDIFLEKHWKSVVSRSVCDYFFEAQERATEAENVPPVIPTPHHYLLSVYRHKIFFVAVIQTEVPPLFVIEFLHRVVDTFQDYFGVCSEPVIKDNVVVVYEVLEEMLDNGFPLATESNILKELIKPPTILRTVVNTITGSTNVGDQLPTGQLSVVPWRRTGVKYTNNEAYFDVIEEIDAIIDKSGSTITAEIQGVIDACVKLTGMPDLTLSFMNPRLLDDVSFHPCVRFKRWESERILSFIPPDGNFRLLSYHVSAQNLVAIPVYVKHNISFRDSSSLGRFEITVGPKQTMGKTIEGVTVTSQMPKGVLNMSLTPSQGTHTFDPVTKMLSWDVGKINPQKLPSLKGTMSLQAGASKPDENPTINLQFKIQQLAISGLKVNRLDMYGEKYKPFKGIKYMTKAGKFQVRT

SEQ ID NO: 637 - DNA, 308 bp, Rattus norvegicus
  misc_feature (1)..(308): n=a, c, g or t
  ref <308>: DATABASE ACCESSION NUMBER: EMBL / H31859
  ref <309>: DATABASE ENTRY DATE: 2000-03-04
tcaaactcataagtctagactcaagagagagaaatgaaaacctacatctagccacaggcttgcacatacatgttcagaatgtgtcaaccatagcgtctagaaaacaaccccagtggctgtgggcagacaagcagctgnacnaaatgagtatatcatgtgtacagatgctaaagctgtgaagtcagatggaatactgcttggcaggtcatgtaacggattgacgcatacaacagtgtgagaaactccaaaaatatcaaaacgtnaaagtcaagcacaaagcccgatattctnatttacttaaaatgtcc

SEQ ID NO: 638 - DNA, 523 bp, Rattus norvegicus
  ref <308>: DATABASE ACCESSION NUMBER: EMBL / AA899106
  ref <309>: DATABASE ENTRY DATE: 2000-03-03
ctagtgcatatgccccctttagtagaattgcaagaaaccatggatgccggtgcggcatgagtagtttgcaaagcattgaacccaagaaggaatcagaaatgagaagggacacgctggggaggttatgcagaaccacccaaccacacgactgaaccattttggatgtaagaagcgtcctgatgcctcaccacgtgttcccaagactgagcgtggtggggtctctacgttgcctactcctgctgactacagtagctgctacctaagggatatgtcttttgccagttggacgcaggtgattggctcctaagtctcatgtttggtgaatttgggcgtcttcttccaaacatggttcattgtagacgtttcccactgttatctgatggagggaattagctatgggccgtgacaaaaaaaaaactcatctaatgggggcagatggagaccacagatggaattttgaaaacaaagcttctgtgtaaccggaagagggtgaggtgatcttttatcccttattaagaagaag

SEQ ID NO: 639 - DNA, 1017 bp, Rattus norvegicus
  ref <308>: DATABASE ACCESSION NUMBER: Refseq / NM_012903
  ref <309>: DATABASE ENTRY DATE: 2003-01-14
ttcaaagtcctaaaacgcgcggccgtgggttcggggtttattgattgaattccgctggcgcaggatcctctgcagaaagagagagcgcgagagatggagatggacaaacggatttatttagagctgcggaacaggacgccctctgatgtgaaagagctggtcctggataactgtcggtcaattgaaggcaaaatcgaaggcctcacggatgagtttgaagaactggaattcctaagtacaatcaacgtaggcctcacctccatttccaacttaccaaagttaaacaaactcaagaagcttgaattaagcgaaaacagaatctcaggggacctggaagtattggcagagaaatgtccgaaccttaagcatctaaatttaagtggcaacaaaataaaagatctcagcacaatagagccgctgaagaagttagagaatctcaagagcctagacctgtttaactgtgaggtgaccaacctgaatgcctaccgagaaaacgtgttcaagctcctgccccaggtcatgtacctcgatggctatgacagagacaacaaggaggcccctgactctgatgttgagggctacgtggaggatgacgacgaggaagatgaggatgaggaggagtatgatgaatacgcccagctagtggaagatgaagaggaagaggatgaggaggaagaaggggaggaagaggacgtgagtggagaggaagaggaggatgaagaaggttacaacgacggggaagtggatgatgaggaagatgaagaagatgctgctgaagaagaagggagtcagaagcgaaaacgagagcccgatgacgagggccaagaggatgactaaggggaattaacctgtttggggaaattcctattgtgatttgactgtttttacccatatcccctccccctcctattcctgccccccgaaacttatttttttctgattgtagcgttgctgtgggaatgagaggggcaaagtgtactggggattgccgggggtggggtgggggtgggaggggag

SEQ ID NO: 640 - protein, 247 aa, Rattus norvegicus
  ref <308>: DATABASE ACCESSION NUMBER: Refseq / NP_037035
  ref <309>: DATABASE ENTRY DATE: 2003-01-14
MEMDKRIYLELRNRTPSDVKELVLDNCRSIEGKIEGLTDEFEELEFLSTINVGLTSISNLPKLNKLKKLELSENRISGDLEVLAEKCPNLKHLNLSGNKIKDLSTIEPLKKLENLKSLDLFNCEVTNLNAYRENVFKLLPQVMYLDGYDRDNKEAPDSDVEGYVEDDDEEDEDEEEYDEYAQLVEDEEEEDEEEEGEEEDVSGEEEEDEEGYNDGEVDDEEDEEDAAEEEGSQKRKREPDDEGQEDD

SEQ ID NO: 641 - DNA, 1216 bp, Rattus norvegicus
  ref <308>: DATABASE ACCESSION NUMBER: Refseq / NM_012846
  ref <309>: DATABASE ENTRY DATE: 2003-01-14
gcccagggtgggaggaagggcggtaatctctaggaagcagaaggcaggtttgcagaggacgctggataggagatgaggtgggggaaaccaaggcctgggcttcccgcagctgcagcaaggttttggtgcttaccacagcagcaggaatgcattgagggatgtgacagtggaacgcaggtggcagtgatactcactgctgctgaaggagcccaaagaaccagcatctgacctgtcttgaacgcaccatcgacagttgctgctgagtcatggccgaaggggagatcacaacctttgcagccctgaccgagaggttcaatctgcctctagggaactacaaaaaacccaaactgctctactgcagcaacgggggccacttcttgaggattcttcccgatggcaccgtggatgggaccagggacaggagcgaccagcacattcagctgcagctcagtgcggaaagcgcgggcgaagtgtatataaagggtacagagactggccagtacttggccatggacaccgaagggcttttatacggctcgcagacaccaaatgaagaatgcctattcctggaaaggctagaagaaaaccattataacacttacacatccaagaagcacgcggagaagaactggtttgtgggcctcaagaagaacgggagttgtaagcgcggtcctcggactcactacggccagaaagccatcttgtttctccccctcccggtatcttctgactaaggagtctgttctgggtgctccctatttttggttgaccctaaaatgttcccttgaccattggctgcgctaaccctcagcccacagagcctgaatttgtaagcagtgcttctaaatagccagttcacttttccgctgagcccttccccaccaccccagcacagtttggaacacggggaccaaattacttctaggggacaactggctggccagtctaggtctgggtttggatatccagatgcttcagggtacctgctacaagttggacctcgtgatacaaagaggggagccatgtgtagcatctggaggggtctaagaagtgggttcttttagtagctgcatgctctttccccttctgagtaatccctggttttgagtacccccaggcacttagcatgactacccttccccctaccagcacctcataaatatcagtaaagaaactgatagtaaaaaaaaaaaaaaaaaaaaaaaaaaaaaaaaaa

SEQ ID NO: 642 - protein, 155 aa, Rattus norvegicus
  ref <308>: DATABASE ACCESSION NUMBER: Refseq / NP_036978
  ref <309>: DATABASE ENTRY DATE: 2003-01-14
MAEGEITTFAALTERFNLPLGNYKKPKLLYCSNGGHFLRILPDGTVDGTRDRSDQHIQLQLSAESAGEVYIKGTETGQYLAMDTEGLLYGSQTPNEECLFLERLEENHYNTYTSKKHAEKNWFVGLKKNGSCKRGPRTHYGQKAILFLPLPVSSD

SEQ ID NO: 643 - DNA, 552 bp, Rattus norvegicus
  ref <308>: DATABASE ACCESSION NUMBER: Refseq / NM_031147
  ref <309>: DATABASE ENTRY DATE: 2003-01-13
cccgactcagcggctgccatggcatcagatgaaggcaagcttttcgtgggaggtctcagcttcgacaccaatgagcaggcgctggagcaggtcttctccaagtatgggcagatctcggaagtggtggtggtaaaggacagggagactcaacgatcccgaggcttcgggtttgtcacctttgaaaatatcgatgacgctaaggatgccatgatggctatgaatgggaagtctgtggatgggaggcagatccgagttgaccaggctggcaagtcttctgataaccggtcccgaggataccggggtggctctgctggaggccgtggcttcttccgtgggggacgcagccggggccgagggttctccagaggaggaggagaccggggctatggaggtggccgctttgagtcccggagtggtggttatggaggctccagagactactatgccagccggagtcagggtggcagctatggctatcggagctccggtgggtcctacagagacagctacgacagctatgctacacacaacgagtaaaagccctctccgtcc

SEQ ID NO: 644 - protein, 172 aa, Rattus norvegicus
  ref <308>: DATABASE ACCESSION NUMBER: Refseq / NP_112409
  ref <309>: DATABASE ENTRY DATE: 2003-01-13
MASDEGKLFVGGLSFDTNEQALEQVFSKYGQISEVVVVKDRETQRSRGFGFVTFENIDDAKDAMMAMNGKSVDGRQIRVDQAGKSSDNRSRGYRGGSAGGRGFFRGGRSRGRGFSRGGGDRGYGGGRFESRSGGYGGSRDYYASRSQGGSYGYRSSGGSYRDSYDSYATHNE

SEQ ID NO: 645 - DNA, 259 bp, Rattus norvegicus
  ref <308>: DATABASE ACCESSION NUMBER: EMBL / AA800456
  ref <309>: DATABASE ENTRY DATE: 2000-03-03
gaaaaaaaaatacccaaaccaattgcaagcctggtaatgagtggggccaatcttggacttgatggaaactgttgggaaaacatgcccgtcattgggagagagctgaatggaggtcaattatagaatggataaatagccacggaagccaatttagacattattccaatggatgttctgggtacagtattacctttggtgtcttctcacctgaatgtgggctaagataagtgttctctgaaacatacagccctgcctcgtg

SEQ ID NO: 646 - DNA, 214 bp, Homo sapiens
  ref <308>: DATABASE ACCESSION NUMBER: EMBL / AA059122
  ref <309>: DATABASE ENTRY DATE: 2000-03-03
tttttgaaggtgattaattgtctttattggaggaaaacaagaagtcatcaatctcattatcattatgatagaaatcttgatatgtatacatgattgtcaaggcagagaatcatttgctacatagacccatgaacaattttgcagtgccgcaaacctatgtgggttaaacttcttgcagagtttattacatgcatggaataaattcacagtttcc

SEQ ID NO: 647 - DNA, 2633 bp, Rattus norvegicus
  ref <308>: DATABASE ACCESSION NUMBER: Refseq / NM_021589
  ref <309>: DATABASE ENTRY DATE: 2002-11-05
gcggcggcggccaggagcgcacggacggccgcgcggcccgagctaggcgggcgccgccgcgatgctgcgaggccagcggcacgggcagctgggttggcatcgcccggccgcggggctaggcggtctggtgacttcgttgatgctggcttgtgcttgcgccgcatcctgtcgtgagacctgctgtcccgtgggcccctcggggttgcgctgcaccagggcagggaccctgaataccctccgcggcctgcggggcgccgggaacctgacggagctctatgtggaaaaccagcgggatctgcaacgcctggagtttgaggacctgcagggcctgggggagttgagaagcctaaccatcgtgaagagtggcctccgctttgtggcccctgatgccttccatttcacccctcggctcagtcacctgaatctctcctccaatgctttggagtccctctcctggaaaactgtgcagggcctctccctacaggacttgaccctgtcagggaacccactgcactgttcctgtgccctattgtggctccagcgctgggagcaggaggatttgtgtggtgtgtatacacaaaagcttcagggctctgggtctggagaccagttcctcccactgggacacaacaacagttgtggtgtaccctcagtgaagatccagatgcccaatgactctgtggaagtgggggatgacgtttttctgcagtgccaggtggaggggcaggccctacagcaggctgactggatcctcacagagctggaagggacagccaccatgaagaaatctggagatctgccatccctggggctaactctggtcaatgtcaccagtgatctcaacaagaagaatgtgacgtgctgggcagagaatgatgtgggccgggctgaggtctctgtccaagtcagcgtctccttcccagccagtgtgcatctgggcaaagccgtggaacagcatcactggtgcattcccttctctgtggacgggcagccagcaccgtccctgcgctggttcttcaacggctctgtgctcaatgagaccagcttcatcttcactcagttcttggagtcagcgctgaccaatgagaccatgcggcatggctgccttcgcctcaaccagcccacgcatgtcaacaacgggaactacaccctgctggctgccaacccctatggccaggctgctgcctccatcatggctgcctttatggacaacccttttgagttcaaccctgaggaccccatccctgtctccttctcgccagtggacactaacagcacatcaagagacccagtggagaagaaggacgaaacaccttttggggtctctgtggctgtgggcctggccgtctccgccgccctcttcctttctgccctcctcctagtgctcaacaaatgtggacagaggagcaaatttgggatcaaccgccctgctgtgctggcgccagaggatgggctggccatgtccctacacttcatgacactgggtggcagttctctttcccctactgagggcaaaggctccggactccagggccacatcatggagaacccacagtacttcagtgatacctgtgtccaccatatcaagcgccaggacatcattctcaagtgggagctaggggagggagcctttggaaaggtctttcttgctgagtgctacaaccttctgaatgatcaggacaagatgctggtggctgtcaaggcactgaaggagacatctgagaatgctcgtcaggacttccatcgtgaggcagagctgctcaccatgctacagcaccaacacatcgtacgcttctttggagtctgcacggagggtggcccattgctcatggtcttcgagtacatgcgccatggggacctcaaccgtttcctccggtcccacggacctgatgcaaaactgctggctggcggcgaggatgtggctcctggtcctttgggccttgggcagcttctggctgtggctagccaggtggctgctggtatggtgtacctagccagcctgcactttgtgcaccgggacctggccacacgcaactgtctggtgggtcagggactagtggtcaagattggagacttcggcatgagcagggacatctacagcacagactactaccgtgtgggaggtcggaccatgctgcccatccgctggatgcctccagagagcatcctctaccgcaagttcagcaccgagagtgatgtgtggagcttcggggtggtgctctgggagatcttcacctatggaaagcaaccctggtaccagctctccaacactgaggcgatcgagtgcatcacgcagggccgggagctggagcggccgcgcgcctgccctcctgatgtctacgccatcatgcgcggctgctggcagcgtgagccgcaacagcgcctcagcatgaaggatgtgcacgcgcggctgcaggccttggcacaggcgccaccgagttacctggacgttctgggctaggagtctggatgtcaggctaccctgggctccctcagcgcccagcagctatcacactcaagtcttaccctcagcatgtggaggggaccagcaggcggggagcagagggtggctttgcttcatggccagcatccatcataatagcaattatatttattatccctgaaaaaaaaaa

SEQ ID NO: 648 - protein, 799 aa, Rattus norvegicus
  ref <308>: DATABASE ACCESSION NUMBER: Refseq / NP_067600
  ref <309>: DATABASE ENTRY DATE: 2002-11-05
MLRGQRHGQLGWHRPAAGLGGLVTSLMLACACAASCRETCCPVGPSGLRCTRAGTLNTLRGLRGAGNLTELYVENQRDLQRLEFEDLQGLGELRSLTIVKSGLRFVAPDAFHFTPRLSHLNLSSNALESLSWKTVQGLSLQDLTLSGNPLHCSCALLWLQRWEQEDLCGVYTQKLQGSGSGDQFLPLGHNNSCGVPSVKIQMPNDSVEVGDDVFLQCQVEGQALQQADWILTELEGTATMKKSGDLPSLGLTLVNVTSDLNKKNVTCWAENDVGRAEVSVQVSVSFPASVHLGKAVEQHHWCIPFSVDGQPAPSLRWFFNGSVLNETSFIFTQFLESALTNETMRHGCLRLNQPTHVNNGNYTLLAANPYGQAAASIMAAFMDNPFEFNPEDPIPVSFSPVDTNSTSRDPVEKKDETPFGVSVAVGLAVSAALFLSALLLVLNKCGQRSKFGINRPAVLAPEDGLAMSLHFMTLGGSSLSPTEGKGSGLQGHIMENPQYFSDTCVHHIKRQDIILKWELGEGAFGKVFLAECYNLLNDQDKMLVAVKALKETSENARQDFHREAELLTMLQHQHIVRFFGVCTEGGPLLMVFEYMRHGDLNRFLRSHGPDAKLLAGGEDVAPGPLGLGQLLAVASQVAAGMVYLASLHFVHRDLATRNCLVGQGLVVKIGDFGMSRDIYSTDYYRVGGRTMLPIRWMPPESILYRKFSTESDVWSFGVVLWEIFTYGKQPWYQLSNTEAIECITQGRELERPRACPPDVYAIMRGCWQREPQQRLSMKDVHARLQALAQAPPSYLDVLG

SEQ ID NO: 649 - DNA, 381 bp, Rattus norvegicus
  ref <308>: DATABASE ACCESSION NUMBER: EMBL / AA891476
  ref <309>: DATABASE ENTRY DATE: 2000-03-03
atggtgtttaaatagttctgttatggaattgttcctgcgtagttctgaactgtccttttataagaagtgatggtcccgtgtcttcacaacgtagtgattatcagccttacaatgaccttgtagcctttctgaacacacacatcctgctcactccccaacagctagaaaaatgcaaagcactagcgggactcactgcatccgttttcacgtctttctaacatcaggacttctaaaatctctgggatacacgcggtagtcaaattcaaaaaaggattatcaatgaatagcacataagaattattttcatgaatttcaactaattgcagccagtttcagcatgtaaatatatactaatgttggctagtgtgtaattcttgagct

SEQ ID NO: 650 - DNA, 301 bp, Homo sapiens
  misc_feature (1)..(301): n=a, c, g or t
  ref <308>: DATABASE ACCESSION NUMBER: EMBL / H40837
  ref <309>: DATABASE ENTRY DATE: 2000-03-04
agaaaaaatggcaaaacacantggnatatgcattgccatgctattttccatgntctttgctaaaaacaggnactattaaaatctctgggatacatgagatagtaaaaaatgaggattataaatgaatagcacataagnaattattttcttgaatttaaacttattgcagccagtttcagcatgtaaatatataataatgttgggctagtgtgtaattcttgaactaaggaaatataaataaaaataaaaaggattgtggaaaaaaaaaaaaaaaaaaaaaaaaaaaaaaaaaaaaaaaaaa

SEQ ID NO: 651 - DNA, 2565 bp, Rattus norvegicus
  ref <308>: DATABASE ACCESSION NUMBER: Refseq / NM_012892
  ref <309>: DATABASE ENTRY DATE: 2003-01-14
caggctctcaggataactcccagtgtctggcctgatgcttgcctggcgatctctgccttgaatgccaaggtttaagcagaattcagaggactgagaactcttccctgagatttgatcaacctgaagccagttgcagaactgcacagggtcccgatggacctcaaggagagccccagtgagggcagcctgcaaccttccagtatccagatcttcgccaatacctccactctccatggcatccgccacatcttcgtgtatgggccgctgaccatccggcgtgtgctttgggcagtggccttcgtcggatccctgggcctgctgctggtggagagctcggagagggtgtcctactatttctcttatcagcatgttaccaaggtggatgaagtggtggcccagagcctggtcttcccagctgtgaccctctgcaacctcaatggcttccggttctccaggcttaccaccaacgacttgtaccacgctggggagttgctggccctgctggatgtcaacctacagattcccgacccgcatctggcagaccccacggtgctggaggccctccgacagaaggccaacttcaaacactacaaaccgaagcagttcagcatgctggagttcctgcaccgggtaggccatgacctgaaggatatgatgctctactgcaagttcaaggggcaggagtgtgggcatcaagacttcaccacagtgtttacaaaatacgggaagtgttacatgtttaactcaggcgaggatggcaagccgctgctcaccacggtcaagggggggacgggcaacgggctggagatcatgctggacattcagcaagatgagtacctgcccatctggggagagacagaggaaacaacgtttgaagcaggagtgaaggttcagatccacagtcagtctgagccgcctttcatccaagagctgggctttggggtggctccggggttccagaccttcgtggccacacaagagcagaggctcacatatctgcccccaccatggggggagtgccggtcctcagagatgggactcgacttctttcctgtttacagcatcacagcctgtcggattgactgtgagacccgctacatcgtggagaactgtaactgccgcatggtccacatgccaggggacgcccctttctgcacccctgagcagcacaaggagtgtgcagagcctgccctcggtctactggcagaaaaggacagcaattactgtctctgcaggacaccctgcaacctgacacgctacaacaaagagctctccatggtgaagatccccagcaagacgtcagccaagtacttagagaagaaatttaacaaatcggaaaaatatatctcagagaacattcttgttctggacatattttttgaggcgctcaattacgaaacaattgaacagaagaaggcgtatgaagttgctgccttacttggtgacatcggtggtcagatgggactgttcattggtgctagtctcctcacaatactagagctctttgattatatttatgagctgatcaaagagaagctattagacctgcttggcaaagaagaagaggaagggagccacgatgagaacatgagcacctgtgacacaatgccaaaccactctgaaaccatcagccacactgtgaacgtgcccctgcagacagctttgggcaccctggaggagattgcctgctgacacctctcaggcaacgcagcacctccaaacagaccttaaaggcccaagacctaggacaggagacagcaagcgcaggtgggatcgcccctgacgactgaaagaagcagagccccccatatgcacacattgcgaacttctgccaaacctcacctggccacatctgacatgaaccgtcccgggccctgcgtcatgtccctcgcaggaccgatgagtcgcactccggaactgtccaagaactaacctgccatcacatctcactgccagatgtacaaagcacctgcatgctcagacttcttacagcgccacctccacttccgacttgtacgtgatattttctccgtgcggtttccagggcccactccgctgcccaggcaatgggaccaggttccagccccaaagtcaccctgagcccagctccggaatcgaaactgcacagtcaagaaggaaaccacagaactctctacgtttgatccttgtgttgtttgtgaccgttcttagccttgtcctccaaactggcccaaggggctactgcactaaaggtgaccagtaccaacctccttcttttcccagcacccgtgaaggaggtacagtggcccgggtgaccccagtatttgtccatggagccacattgttctctccctgtgacacagctgtagagtctgattttgttttgttttgttttgtttagggcggggactgtttttgtttgtctatggaagatttgttttgttccgctttgtcttacggtcttcggttttgatgttctaaggttcgaattgggttttccatttttttttttgagtttatttattcgtgcttcgaaccacagtcatattaaaagctggtcttgtggaaaaaaaaaaaaaaaaaaaa

SEQ ID NO: 652 - protein, 512 aa, Rattus norvegicus
  ref <308>: DATABASE ACCESSION NUMBER: Refseq / NP_037024
  ref <309>: DATABASE ENTRY DATE: 2003-01-14
MDLKESPSEGSLQPSSIQIFANTSTLHGIRHIFVYGPLTIRRVLWAVAFVGSLGLLLVESSERVSYYFSYQHVTKVDEVVAQSLVFPAVTLCNLNGFRFSRLTTNDLYHAGELLALLDVNLQIPDPHLADPTVLEALRQKANFKHYKPKQFSMLEFLHRVGHDLKDMMLYCKFKGQECGHQDFTTVFTKYGKCYMFNSGEDGKPLLTTVKGGTGNGLEIMLDIQQDEYLPIWGETEETTFEAGVKVQIHSQSEPPFIQELGFGVAPGFQTFVATQEQRLTYLPPPWGECRSSEMGLDFFPVYSITACRIDCETRYIVENCNCRMVHMPGDAPFCTPEQHKECAEPALGLLAEKDSNYCLCRTPCNLTRYNKELSMVKIPSKTSAKYLEKKFNKSEKYISENILVLDIFFEALNYETIEQKKAYEVAALLGDIGGQMGLFIGASLLTILELFDYIYELIKEKLLDLLGKEEEEGSHDENMSTCDTMPNHSETISHTVNVPLQTALGTLEEIAC

SEQ ID NO: 653 - DNA, 279 bp, Rattus norvegicus
  ref <308>: DATABASE ACCESSION NUMBER: EMBL / AI639207
  ref <309>: DATABASE ENTRY DATE: 2000-03-04
aggtcagggtagggtggcaggtttttttttctggcgtcttctctcgggtagggtaagatgcgctttgcgttcaggtcaagggggggggttgttttttttttgttttgggggaaaggacgggccgcccttcggttaggttgtcctgtgccctgtcccccaggccctggccgggttgggttttggttttgtttccccggacggtaaggtaaacctagcctatttattttatttggatcgggggcggtgcggttttggctggcccgccctttttttttttaa

SEQ ID NO: 654 - DNA, 596 bp, Rattus norvegicus
  ref <308>: DATABASE ACCESSION NUMBER: EMBL / AA800296
  ref <309>: DATABASE ENTRY DATE: 2000-03-03
cagtgtctacaatcaattttattgtaatataatctaaaaacataccatttagaaaataccaagaaaaatttatgtacaagagttgatgctattgcatttggataaagctggcaagttcttgctactagcatagcccaggaaacaccaccgaggaaacctaatatattggaatagatgttgtgccgtttggcccacagtttgatggctctcagagttaacctgaagttgtcaatgtttggtactagatgtaaaatctcatcggttaccctgcaaccattaaggcttcttatgcatcttatatctaggtttttaagcagactgtcatctcgtaggtccaaatcttctggaatagtctgcagtgctaatcttgcaaacaaaatatcaatctctattccatcaaaacagagtttgataactggtacaaatgcctcttcaacagctcttaaatctttcacttcttcttgtaatttcaatttatcatagaatgaggtgaaaaaatcacttcgatcaacatgtcttggtgcaacacacaacgcatcaatatcagcacctttcgtatgtactcctagtctgtaggatccaaatgtaaaaatttt

SEQ ID NO: 655 - DNA, 1064 bp, Homo sapiens
  ref <308>: DATABASE ACCESSION NUMBER: Refseq / NM_032632
  ref <309>: DATABASE ENTRY DATE: 2002-11-05
ggggaaggaggagaagcgcttaaagcggcgggagcggtgcgggagaggggttggacccagggctgaggcaggcccccccctccctcccgcctcagtggatcatgcccagggcggcagcggcggcggttgcgggggggaagtgactgggcggtgccggcgccggagacgatgccgtttccagttacaacacagggatcacaacaaacacaaccgccacagaagcactatggcattacttctcctatcagcttagcagcccccaaggagactgactgcgtacttacacagaaactaattgagacattgaaaccctttggggtttttgaagaggaagaggaactgcagcgcaggattttaattttgggaaaactaaataacctggtaaaagagtggatacgagaaatcagtgaaagcaagaatcttccacaatctgtaattgaaaatgttggaggaaaaatttttacatttggatcttacagattaggagtgcatacaaaaggtgctgatattgatgcgttgtgtgttgcaccaagacatgttgatcgaagtgactttttcacctcattctatgataagttgaaattacaggaagaagtaaaagatttaagagctgttgaagaggcattcgtaccagttattaaactctgttttgatgggatagagattgatattttgtttgcaagattagcactgcagacaattcctgaagatttggatctacgagatgacagtctgctaaaaaatttagatataagatgtataagaagtcttaacggttgcagggtaaccgatgaaattttacatctagtaccaaacattgacaacttcaggttaactctgagagctatcaaactatgggccaaacgccacaacatctattccaatatattaggtttcctcggtggtgtttcctgggctatgctagtagcaagaacttgccagctttatccaaatgcaatagcatcaactcttgtacataaatttttcttggtattttctaaatggtatgtgtttagattatattaaaataaaattgattgtagacactgaaaaaaaaaaaaaaa

SEQ ID NO: 656 - protein, 285 aa, Homo sapiens
  ref <308>: DATABASE ACCESSION NUMBER: Refseq / NP_116021
  ref <309>: DATABASE ENTRY DATE: 2002-11-05
MPFPVTTQGSQQTQPPQKHYGITSPISLAAPKETDCVLTQKLIETLKPFGVFEEEEELQRRILILGKLNNLVKEWIREISESKNLPQSVIENVGGKIFTFGSYRLGVHTKGADIDALCVAPRHVDRSDFFTSFYDKLKLQEEVKDLRAVEEAFVPVIKLCFDGIEIDILFARLALQTIPEDLDLRDDSLLKNLDIRCIRSLNGCRVTDEILHLVPNIDNFRLTLRAIKLWAKRHNIYSNILGFLGGVSWAMLVARTCQLYPNAIASTLVHKFFLVFSKWYVFRLY

SEQ ID NO: 657 - DNA, 3008 bp, Rattus norvegicus
  misc_feature (1)..(3008): n=a, c, g or t
  ref <308>: DATABASE ACCESSION NUMBER: Refseq / NM_022297
  ref <309>: DATABASE ENTRY DATE: 2002-05-01
ccacatgatttattacaatcatctcctcaatagccacactatttattttatttcaattaaaaatttcttcccaaacctttcctgcacctccctcacccaaaactatagccacagaaaaaacgaataacccttgagaatcaaaatgaacgaaaatctatttgcctctttcattacccccacaataataggtctaccaattgttgtgaccattattatgttcccatcaattctattcccatcatcagaacgcctaatcagcaaccgactacactcatttcaacactgactaatcaaacttatcatcaaacaaataatgttaatcggagccgccgggcgctcgcaggctcgcaggctcgcaggttgggcgcgcgctgctctcgggaagacccggccaccgagccaaaccccgccgccgcctctccgcgcgagccatggccggcctcagccacccctcggtcttcggccgggccacccacgccgtggtgcgggctccgcccgagtccctgtgccgccacgcgctgaggcgctcccagggcgaagaggtggatttcgctcgcgctgagcgccagcaccagctctacgtgggcgtgctgggcagcaagctggggctgcaggtggtgcagctgccggccgacgagagcctgcctgactgcgtgttcgtggaggacgtggccgtggtgtgcgaggagaccgccctcatcacccgccccggggcgcctagccgcaggaaggaggttgacatgatgaaagaggctttggaaaaacttcagctcaacatagtagagatgaaagatgaaaatgcaaccttagatggtggggacgtcctattcacaggcagagagttttttgtgggcctttccaaaaggacaaatcaacgaggtgctgagatcttggctgatactttcaaggactacgcagtttccacagtccccgtggccgattctttgcatttaaagagtttctgcagcatggctggccccaacctgatcgcaatagggtccagtgaatctgcgcagaaggccctcaagatcatgcaacagatgagtgaccaccgttatgacaagctcactgtaccggacgacatggccgccaactgtatatatttaaatatccccagcaaagggcatgtcttgctgcaccgaaccccagaagagtacccagaaagcgcaaaggtttatgagaagctcaaggaccatctactgatccctgtgagcaattctgagatggaaaaggtggacggcttgctcacctgctgctccgtttttattaacaagaagacagactcttgagcggaagagtccctcccgagcggccggcgagtggcctaggccaggctgatgatggctctgtacccattcctcctgtttcctttgacaatctactgtgccactaactcttgtttacaaagaattccaatcttaatcgcctcatttccccacacccccctcttcctcacggggccccctaacctgtgcacacatttgctcaatgaactaagcaacctaggaaatacagaactaacgaatcattggaatgtgattgatagcgtggaggcactcactccagcctctgtgtccttagtgtgggaatagtttagatgcagggcatcctgaaggactgacctcctgggcagacagataaacaagcaagggactttctttgcttcatgagttgcgtttggttcctgtgagagtcctgagaacgtggattttttcccattcccctctcttctcacctctaaaacactttcttccaggtcttcctttggccttcctcacttctttcgtaatcaccttgaacctggatttatccaaggtctcgaactctggataccctcctaacgtccaccctgtctacgtgcagtcctctcctcctcacagccacaacttctgccaccaccagcaaatcagagtggctggttggagacgaggaacctcacagaggcacatcctgacagggtttcccattagcacacctaggaaggtaaattcaggtggttgatacaggatgttagatacagaagcctagaaacacccccatgggtacatctcagagagactgagtcactgccatgattttgcctcatgactggtcctataggagcgtggaggaaagtctttctccaccccaccacctccccctttttcagcttccttctgactcaaccttgtatctacccccttagaatcaccatgattttgaaaagtcatttccttcaaaagaggcagaacatctaatgattgttgacggtctggtaagagctagagggaactgcctccacccaaggcctaggagcacaatcaggaaatggttcctaaagtcaacttcaaacaatgtgtgagtctcctttgaaatatccatgactgtttactgtggaattcaaccgaaacttcaaattacacaactttcannagacgcaggtctctcacagggaacaataccacagcaaaggaattcctttcttgaaagctgaaacaggccaaggacatggtaccttacaaggcacggtgacccagccaggcatctcatcaaacttctggtcacttctaccttggctgtatagcctgcagtctgtcattcgatatttaaagttggggagacaaaggctatgtcagctctagctctccttacctctctttgtgatcagtgtttcttctagtgaaggcaagagagactgggcctcatctcgtccccctcagtggccggaagtgagaaaatcaagacttcctttaccgcccttctcttagttggcaacctctctgaagaggtctccatctctcccttgctgtctaactctagactcatatcgcatgccaatatctaactgtacaccctgtgaatgaaccatatcctggtcactgtcacatttcacagcgtatcacaggtgaacagttatgccttctccagggcaagggaatatgagacagttgcctaaattcataaagaaaaattgttctcagccattatggttgccttgaggggttaaagttgaccccacctacactagc

SEQ ID NO: 658 - protein, 285 aa, Rattus norvegicus
  ref <308>: DATABASE ACCESSION NUMBER: Refseq / NP_071633
  ref <309>: DATABASE ENTRY DATE: 2002-05-01
MAGLSHPSVFGRATHAVVRAPPESLCRHALRRSQGEEVDFARAERQHQLYVGVLGSKLGLQVVQLPADESLPDCVFVEDVAVVCEETALITRPGAPSRRKEVDMMKEALEKLQLNIVEMKDENATLDGGDVLFTGREFFVGLSKRTNQRGAEILADTFKDYAVSTVPVADSLHLKSFCSMAGPNLIAIGSSESAQKALKIMQQMSDHRYDKLTVPDDMAANCIYLNIPSKGHVLLHRTPEEYPESAKVYEKLKDHLLIPVSNSEMEKVDGLLTCCSVFINKKTDS

SEQ ID NO: 659 - DNA, 2494 bp, Homo sapiens
  ref <308>: DATABASE ACCESSION NUMBER: Refseq / NM_018150
  ref <309>: DATABASE ENTRY DATE: 2002-11-05
agtagacctttctgcgagtacgagccaaccggcagacccgactgaatgctcggattgggaaaatgaaacggaggaagcaagatgaagggcagagggaaggctcctgcatggctgaggatgatgctgtggacatcgagcatgagaacaacaaccgctttgaggagtatgagtggtgtggacagaagcggatacgggccaccactctcctggaaggtggcttccgaggctctggcttcatcatgtgcagcggcaaagagaacccggacagtgatgctgacttggatgtggatggggatgacactctggagtatgggaagccacaatacacagaggctgatgtcatcccctgcacaggcgaggagcctggtgaagccaaggagagagaggcacttcggggcgcagtcctaaatggcggccctcccagcacgcgcatcacacctgagttctctaaatgggccagtgatgagatgccatccaccagcaatggtgaaagcagcaagcaggaggccatgcagaagacctgcaagaacagcgacatcgagaaaatcaccgaagattcagctgtgaccacgtttgaggctctgaaggctcgggtcagagaacttgaacggcagctatctcgtggggaccgttacaaatgcctcatctgcatggactcgtactcgatgcccctaacgtccatccagtgttggcacgtgcactgcgaggagtgctggctgcggaccctggtgaggtggcatgggggtcggggaatgggaggccgctccgggcactgcccagatgtctgtgcttatgcctgagcctgcctgggggaagtggggagcatggcgcaaaggagaacagagccaggagccaggatatttacccgcaggatatttacccccaggctcgctgcctctcctccccaactgcaggtttaggaacttctccccctccatgagttcactgcattctcccttccccgccccggtccccgaaggcccactgcatcacacagactggtgaggcctggggtcaggaggaggctggctgtaggtaaacaggaccagggccttggcccctccccctcccattactaagctccttctgctcctgcccctgttcttcgctcaggagcagccattaaaatgtcgcccggagacagtaataaaaggctcggacgtgggctctgtgtcctgatcaaaggccgcgtgtaatctcgttagggctgcggctgccacagctggacccagccttgttctcattactggggctcctgctgcggggctggccaggcggtttgatcctggcgtccccccaacacaggagcgtgcctgcctgctcacagaagctgcctatgcgtccccagcctgggctgacaggaccaaggtctcagcacacactggtgcagagagacatggctgcaggcccaggtgctcacatgcgcacacatggctcattgtgtagaccagagccctccctgttctccctgcagggtgccaagaagctctgccctcagtgcaacacgatcacagcgcccggagacctgcggaggatctacttgtgagctatctgccccaggcaggcctcgcctccagcagccccacctgcccccagcctctgtgacagtgaccgtctccctttgtacatacttgcacacaggttccccatgtacatacatgcacatactcaaacatgcgtacacacacacacatttacacacgcaggactctggagccagagtagaggctgtggcccaggcactacctgctggctcccacctatggtttgggggccatacctgttccagctctgttcccagggtggggcagggaggtgggggttgggggagtagtggggcacggctcctaagatccagcccccatactgacagacggacagacagacatgcaaacaccagactgaagcacatgtaatatagaccgtgtatgtttacaatgttgtgtataaatgggacaactcctcgccctctacctgtcccctccccctttggttgtatgattttcttcttttttaagaacccctggaagcagcgcctccttcagggttggctgggagctcggcccatccacctcttggggtacctgcctctctctctcctgtggtgtcccttccctctcccatgtgctcggtgttcagtggtgtatatttcttctcccagacatggggcacacgccccaagggacatgatcctctccttagtcttagctcatggggctctttataaggagttggggggtagaggcaggaaatgggaaccgagctgaagcagaggctgagttagggggctagaggacagtgctcctggccacccagcctctgctgagaaccattcctgggattagagctgcctttcccagggaaaaagtgtcgtctccccgaccctcccgtgggccctgtggtgtgatgctgtgtctgtatattctatacaaaggtacttgtcctttccctttgtaaactacatttgacatggattaaaccagtataaacagtt

SEQ ID NO: 660 - protein, 245 aa, Homo sapiens
  ref <308>: DATABASE ACCESSION NUMBER: Refseq / NP_060620
  ref <309>: DATABASE ENTRY DATE: 2002-11-05
MKRRKQDEGQREGSCMAEDDAVDIEHENNNRFEEYEWCGQKRIRATTLLEGGFRGSGFIMCSGKENPDSDADLDVDGDDTLEYGKPQYTEADVIPCTGEEPGEAKEREALRGAVLNGGPPSTRITPEFSKWASDEMPSTSNGESSKQEAMQKTCKNSDIEKITEDSAVTTFEALKARVRELERQLSRGDRYKCLICMDSYSMPLTSIQCWHVHCEECWLRTLVRWHGGRGMGGRSGHCPDVCAYA

SEQ ID NO: 661 - DNA, 4795 bp, Rattus norvegicus
  ref <308>: DATABASE ACCESSION NUMBER: EMBL / M64795
  ref <309>: DATABASE ENTRY DATE: 2000-03-04
ctgcagcacagccctgcccttctcttgccctggagccacaaccctctttacagctcctagggatctgattcgctttgacctcccactgggtagcccgatcttgggctggttataaagtccatgagcctgactcagacctgtccggaatctccaatgggggccatggcgccgcccttgctgctcccgctgctggtggctgccctggccccgactcagacccaagccggtgagtgcggggtcctgagggaaatggcctctggggtaggggcgggggcggcaccggggaagaccggtccccgcgtcgaacaccagaccctccgccccttctccacccgcgacccgagccccgcgccctgctcccggcccggcccgcgcacccgcccggggtcccggtaggaggtccgggtctcaccgcgagccgcccccaggctcacactcgctgcggtatttcaccaccgcggtgtcccggcccggtctgggggagccccggtaacggaagtgggctatgtggacgacacggagttcgtgcgcttcgacagcgacgcggagtatccgaggatggagccgcgggtccggtggatggagcgggagggcccggagtattgggagcgggagatgcagagagccaagggcaaccagcagtggttccgagtggacctgaggaccctgctccgctactacaaccagagcgagggcggtgagtgaccctgggacggaggtcaggatccctccgcgtccccacacagcaggaaacgtcccgggtcccaagtccgagtttcaggagctgaacccacccgagcccgccctttcagtttggaggagtccccgggtgggcggggcgggggcggggcgggggcgggggcggggcgggtgggcggggactgaccgctggtcccgcaggctcgcacaccttccaggtgatgtctggctgtgacgtggggtcggaagggagcctcctccgcaggtatgagcagttcgcctatgatggccaagattacatcgccctgaacgaagacctgaaaacctggacagcggcggacacagcggcacggatcacccggagcaagtgggatcaggctggtgatgcagattattacaaggcctacctggagggcacgtgcgtggagtggctccgcagatacctggagcacgggaaggaggcgctgctgcgtctaggtgcggagatgcgggcttctcctccctctgccctcgggctgggtctcactcctgggaaagaagaaaccctcagctgggtgatgcccctgtctcagaggggagagaatgtccctgggtctcctgatccctcacgacagtgactgcactgcctctcccagggcccagccttctccctggagagttctgagtccctctcaggtgggaaggagagaacttccccactgaacagcaagggctccctgctgtcagccatggcctctcccaggccaggttctctgcccacacccactcactgaggacactgactcctgtcctgctgagtgtgtcagcccttcacacctcaggaccagaagtctcctttatctcagaggagacatggactccactacactaggctggttctcccagtctatagaactttccaaagaatacattctcacagatccctccctgatgtggggtttgcctctcttccacaccccatttctctctattcctacagtggagaatggtcccatgagcccttatggggtaccctggaggatataaactgtgggatttctttttctttttttctctcttttttcttattttctttttctttttatttttttcctttttttttttttttggaaggcattatttttcttctagtcaggttttctctgcaaacacatatttaataaattattttccattccctcttctgttctatgaccacccatctcatgctatagaacatcacataaggatggccatgttgacccactggctcatgtggattccctcttagattctgagtccctcaggaaagtgtgcagttctgtgctgagggcaccagctctctagtcgatgacagttgaagtgtcagacacacacagttcagtgtcatcattgatttaactgtgtcttgtgtagatttcagtttgtcttgttaactgtgtgatttcttaaatcttccacacagatcccccaaaggcacatgtgacccttcaccccagacctgaaggtgatgtcaccctgaggtgctgggccctgggcttctaccctgctgacatcaccctgacctggcagttgaatggggaggacctgacccaggacatggaacttgtggagaccaggcctgcaggggatggaaccttccagaagtgggcatctgtggtggtgcctcttgcgaaggagcagaattacacatgccgtgtggagcatgaggggctgcctaagccgctttcccagagatggggtaaggagggagccttctatagaccctgagctggtcagggctgagagctggggtcatgacccccaccttcatttcctgttcctgtccttcccagagtctcctccatccactgactccaacgtggaaaccattgttgtttctgttgttcttggagctggggccatcattggagctctggtggctgttgtgaggaagagatggataaaaacaggtaggaaagggcagggtctgtttcccctcagcttcctttagaagagcgctctgctcattaataggaaacatggccacaccctccatgctactgtctccaactgggtcctctgtcagttctggaaacttcctcctgtcaaaacattcagtgaaatcttacatatttccttctcacaggtggaaaaggaggagtctacacccctgctctaggttagtgtgggggcaggagtgtccctgagggtattggagtgaagctggagatgttgggagctctgggaatccatagtagctcctccagagaaatcttctgggggtgtcagttgtaccgtgatatgaatacatacatacacatatacacatacatatcttttgttttaccctagtataccctgtgcagtgacagctcccatcatctcttatgtgtctttctcagattgtaaaggtaactctgggtctgactggggaggggcaatgtggacatgattgggtttcagggactcccagaatcccctgtgagtggagggttgttgggctgttgtcttctcagtgatggtttatgactctcgttctctagcatgaagacagctgcctggagtggactgagtgacagacgatgtgttcaggtctctcctgtgacatccagagtcctcagttctctttagacaccagtgtctgatgttccctgtgatctatggcttctgtgtgaagaactgtggagcccagcctgccctgcacacctggacactgtccctgcactgcctgtgttcccttccacagccaaacttcctggtccagcctgggggagagagagagagagagagagagagagagagagagagagagagagagagagagagagagagagagagagagagagagagagagagagagagagcagcagagagagagagagagagagtgtgtgtgtgtgtgtgtgtgtgtgtgtgtgtgtgtgtgtgtgtgtgatatctgtatcttgggagctccatggagccctgagctgcagctcctcacttccacactgagaataatgaatctgagtgtgaacttgattgttcacatacttgacccaatgtagatattttttttaattattggattgaatacttagaggttttttgttctggggtcttgttttgttttgttgataaaaataattggcagatggagaagtttccagaatctgtgtcacaagctgtgtgtatctggtgggacagtgtgaggctgtgggagctgagtgtggacaggctgtgcccaggtgtgctcagtcagttcttgtcattgatggactcaggtctcagctctgtctcctccaggctgtgccctctccatcactgtgaagacatggggagagtctgtgatcacaaggacacagggaaggccagagccttgtccttgtcctgtccccaggattatgagcccccagggctgaagatcagagactcaagtggggtcctctaaagtgcagggtgcacaagatgagtcactacatctcctcccactcacttgatttagctgctaatgatggggtcgggaatctgccctgggctctccctgtggccatgctgctgtggtgatttctgcttctcctttctggtgtctttcccagggttctcagggtctggtgtgatctgtctgctcatctctcaggaccacctccacagctgagataagacctaacagagaggcttctcccctgtaacttgggtaccgattcctgaaccaggactgtcttaccttttccgtcttgtgttctggagttaactccctgaagtctcttaatctccacccccagctctgtgcacctgggtcttgcagctgatgcacctgtggttgctctgcctttggatggctctgtatggcaggagagcaaagtccccctcagaggcctgggaccatttaaatcatctcatattcatagcactaaagacacggaggcagaagctgagggaaaaacctgacagctcagcaaggaaactttattttcttaactacatacgggatatctatttaccagcctgatgctacaactaaactccagcccttcagatatctgtctgtgtcactctatcagtccagtctgcctttctcttgagctcctgcaaacccaagagggctcctgagctctctttcccggatttatattttatctgtgtcctgccagct

SEQ ID NO: 662 - DNA, 1231 bp, Rattus norvegicus
  ref <308>: DATABASE ACCESSION NUMBER: Refseq / NM_053965
  ref <309>: DATABASE ENTRY DATE: 2003-01-13
acagcgacgaagatcaagactgccaggagctgcaagtagactgacagaagactgaccatggcagaggagccgaaacccatcagtccgcttaagaacctccttgccggcggctttggcggcgtgtgcctggtgtttgtggggcaccccttggacacggtcaaggtccgactgcagacacaaccaccaagtttgcctgggcagccacctatgtactctgggaccatcgactgtttccggaagactctttttagagagggcatcacagggctgtatcggggcatggctgcacccatcattggagtcacccctatgtttgcggtgtgcttctttgggtttggtttgggaaagagactacagcagaaatctccagaggatgaacttacctacccgcagctgtttacagctgggatgttatctggtgtgttcaccacaggaatcatgacccctggagaacggatcaaatgcttactgcagattcaggcttcttcagggaaaaacaaatacagtggtaccttggactgtgcaaagaagctgtatcaggagtttgggatccgtggcttctacaaagggactgcgctcactctcatgcgagatgttcctgccagtgggatgtatttcatgacatacgaatggcttaaaaatctcttcactccacagggaaagagtgtccatgacctcagtgtgcctcgggtcctggtggctggcggctttcgagggatcttcaattgggttgtggcaatccccccagacgtgctcaagtctcgattccagaccgcacctcctggaaaatatcctaatggtttcagagatgtgttgagagagctgatccgagaagaaggagtcacctccttgtacaaagggttcaatgcagtcatgatccgagccttcccagccaatgctgcctgtttccttggctttgaaattccgatgaagatcctcaattggattgcccccaacttgtgaggctgaagacatgttgaagacctttggatgctggaagactgttgccgagaagcaggggcaggactgggaagaccctgagggtgaggggagggaagtggtgtgatcagagccccaggcatgactgtgatggtgaaactgttgccttaatgacatcctctaccttatgtaacttggtgccattttgaaacttgaatatagaaggtttccagagaattggagatggaataaatagtttatagactcgtcaaaaaaaaaaaaaaaaaaaaaa

SEQ ID NO: 663 - protein, 301 aa, Rattus norvegicus
  ref <308>: DATABASE ACCESSION NUMBER: Refseq / NP_446417
  ref <309>: DATABASE ENTRY DATE: 2003-01-13
MAEEPKPISPLKNLLAGGFGGVCLVFVGHPLDTVKVRLQTQPPSLPGQPPMYSGTIDCFRKTLFREGITGLYRGMAAPIIGVTPMFAVCFFGFGLGKRLQQKSPEDELTYPQLFTAGMLSGVFTTGIMTPGERIKCLLQIQASSGKNKYSGTLDCAKKLYQEFGIRGFYKGTALTLMRDVPASGMYFMTYEWLKNLFTPQGKSVHDLSVPRVLVAGGFRGIFNWVVAIPPDVLKSRFQTAPPGKYPNGFRDVLRELIREEGVTSLYKGFNAVMIRAFPANAACFLGFEIPMKILNWIAPNL

SEQ ID NO: 664 - DNA, 1219 bp, Homo sapiens
  ref <308>: DATABASE ACCESSION NUMBER: Refseq / NM_000387
  ref <309>: DATABASE ENTRY DATE: 2001-04-03
cgagaactgacagacggagtgacagacggactgaccatggccgaccagccaaaacccatcagcccgctcaagaacctgctggccggcggctttggcggcgtgtgcctggtgttcgtcggtcaccctctggacacggtcaaggtccgactgcagacacagccaccgagtttgcctggacaacctcccatgtactctgggacctttgactgtttccggaagactctttttagagagggcatcacggggctatatcggggaatggctgcccctatcatcggggtcactcccatgtttgccgtgtgcttctttgggtttggtttggggaagaaactacaacagaaacacccagaagatgtgctcagctatccccagctttttgcagctgggatgttatctggcgtattcaccacaggaatcatgactcctggagaacggatcaagtgcttattacagattcaggcttcttcaggagaaagcaagtacactggtaccttggactgtgcaaagaagctgtaccaggagtttgggatccgaggcatctacaaagggactgtgcttacccttatgcgagatgtcccagctagtggaatgtatttcatgacatatgaatggctgaaaaatatcttcactccggagggaaagagggtcagtgagctcagtgcccctcggatcttggtggctgggggcattgcagggatcttcaactgggctgtggcaatccccccagatgtgctcaagtctcgattccagactgcacctcctgggaaatatcctaatggtttcagagatgtgctgagggagctgatccgggatgaaggagtcacatccttgtacaaagggttcaatgcagtgatgatccgagccttcccagccaatgcggcctgtttccttggctttgaagttgccatgaagttccttaattgggccacccccaacttgtgaggctgaaggctgctcaagttcacttctggatgctggaagctgtcgttgaggagaaggagtagtaagcagaactaagcagtcttggagggcaaggggaggggaatggtgagatccgagccctgtgcatggacttggtgagactgttgccttaatgacatcctgcaccgtgtataacttagtgtgtcattttgaaacttgaattcattcttatcaatttaagggatcttaaaaggatttggaaatggaacaagtagcttccagaccagatactacctgt

SEQ ID NO: 665 - protein, 301 aa, Homo sapiens
  ref <308>: DATABASE ACCESSION NUMBER: Refseq / NP_000378
  ref <309>: DATABASE ENTRY DATE: 2001-04-03
MADQPKPISPLKNLLAGGFGGVCLVFVGHPLDTVKVRLQTQPPSLPGQPPMYSGTFDCFRKTLFREGITGLYRGMAAPIIGVTPMFAVCFFGFGLGKKLQQKHPEDVLSYPQLFAAGMLSGVFTTGIMTPGERIKCLLQIQASSGESKYTGTLDCAKKLYQEFGIRGIYKGTVLTLMRDVPASGMYFMTYEWLKNIFTPEGKRVSELSAPRILVAGGIAGIFNWAVAIPPDVLKSRFQTAPPGKYPNGFRDVLRELIRDEGVTSLYKGFNAVMIRAFPANAACFLGFEVAMKFLNWATPNL

SEQ ID NO: 666 - DNA, 237 bp, Rattus norvegicus
  ref <308>: DATABASE ACCESSION NUMBER: EMBL / AA866291
  ref <309>: DATABASE ENTRY DATE: 2000-03-03
accttgaagatccccttgcaggtgggggggcacctgcaccaggaatgagcaggctcaacatgggggcagccccatccttagtatgccgtgttcccctccccaggctctcttaccaacccagtctctacttatcacaaatccagcccaccctgtcccttggacctattttgtatgttgcctggaggagtccagtaccctatccccggacatttgtgacaaagtatgcataaactactg

SEQ ID NO: 667 - DNA, 456 bp, Homo sapiens
  ref <308>: DATABASE ACCESSION NUMBER: EMBL / BI963773
  ref <309>: DATABASE ENTRY DATE: 2002-03-14
tttttttttttttttatttgcagtagtttattcatattttgtcacaaatggccggggagggggtgccggactcctccaggcgacatagaaaataggtccaagagacaaggtgggctgaggttggggcagatggagacagggctggagaaagagcctgggggagaggggagggcagactaggggtggggctgcccccctgctgagcctgcttttttccggtgcgggtacccccccacctgcagggggagcctcagggtgggggtggagggggatggcccagaatttccagggtcaagctctgccccttggcagggcccaagtttcccccgaaatggacaaggccggaggtcctgccccttccaggaatgactgccatgcccacaggctggcagaggagcccctgcccctgtttagagctctgcccagccgctctagtccaagggggagggctctgaa

SEQ ID NO: 668 - DNA, 3050 bp, Rattus norvegicus
  ref <308>: DATABASE ACCESSION NUMBER: Refseq / NM_138837
  ref <309>: DATABASE ENTRY DATE: 2003-01-13
gcggccgcggctgctgctgcggcggcggcggtggtggcggcggtggggtggcgggagcggagcggcatggccacggcggcttctaacccctacctgccggggaacagcctgctcgcggccggatccattgtgcactcggacgcggccggggcgggcggcggcggagggggcggcggcggtggcggcggcggggcggggggcggcggcggcggcatgcagccgggaagcgccgccgtgacctcgggcgcctaccggggggatccgtcctccgtcaagatggtccagagtgacttcatgcagggggccatggccgccagcaacggcggccatatgctgagccacgcgcaccagtgggtcaccgccctgccccacgctgccgccgctgccgccgctgctgccgccgccgccgtggaagccagctcaccgtggtcgggcagcgcggtgggcatggccggcagcccccagcagccaccacggccgccgccgccgccgccgcagggcccggacgtgaagggaggcgttggacgcgaagacttgcacgccggcacagcgttgcaccaccgcggaccgccgcacttggggcccccgccaccgccccctcaccagggacaccctggaggctggggggccgcagccgccgctgccgctgccgccgctgccgccgctgccgccgctcacctcccgtccatggcgggcggccagcagccgccgccgcagagtctgctgtactcgcagcccggaggcttcacggtgaacggcatgctgagcgcgcccccggggccaggcggtggcggcggcggagcgggcggtggagcccaaagcctggttcacccggggttagtgcgcggggacacgcccgagctggcggagcatcatcaccaccatcaccaccacgcgcacccgcacccgccgcacccgcaccacgcgcagggacccccacatcacggtggcggcggagcggggccaggactcaacagccacgacccgcactcggacgaggacacgccgacgtctgacgacctggagcagttcgctaagcagttcaagcagcggcgcatcaagctgggtttcacccaggcggacgtggggctggctctgggcactctgtatggcaatgtgttctcgcagaccaccatctgccgcttcgaggccctgcagctcagtttcaagaacatgtgcaagctcaagccgttgctgaacaagtggctggaggaggcagactcgagcaccggcagccccaccagcattgacaagatcgcagcgcagggccgcaagcgcaagaagcggacctccatcgaggttagcgtcaaaggcgcgctggagagccacttcctcaagtgccctaaaccctcggcgcaggagatcaccaacttggccgacagcctgcagctggaaaaggaggtcgtgcgggtctggttctgcaaccgacgccaaaaggaaaaacgcatgacgccccctggcatccagcagcagacgccggacgatgtctactcgcaggtggggaccgtgagcgctgacacaccgccaccgcaccacgggctgcagaccagcgtgcagtgaatgccggggcgcagcgcgaagtgggccgccgccaccaccgccacctccgcagccgctgtcagcaccgccacggtcaccgccgctgccgtctttgagcggccgccgagaaccaccgccgccgctgctgccgctgctgccgccgccgccgccgccgccgccgccgctgccgccgcgcagacccaacacctggccagtgccagggtgaccaggcctcctcccctccgcccaaagacaggcgagccatggccctaggaggggggagaacagctggagaccgatgagactctttctgaagtccaaggaaggagggaccaaaaacaaatttttaagcataataaataccaagactgttttatatgcatatataacaaacaaaaccggaagaggaaaagggaggaacaaggacatctcgtttatactgtggtggtgttttgttcctgttttgaaagaagggtgaagatgcctaacgcaccaaaactacacacgaggtactgtccacaccgagatgtcctgctcggcgacagtggagaacacctgcctctgagataagagagaccccctccccgttcttccacttcttccaaaagggctgcctaaaagatccatggaaactttctttactgggagcgacctgaaaagaaagacgcaccaggtttcctgcaggtctgactctgctcctcgacagtgtttttcttggccatattcaagtctttggggaacaaataaatcaactaagaaatgggaaggaaggagaaacagagtctggggggggagggaagattcacagcttctgaagttaacagactgaacaggaaagccaaaagaaagcatccttgccgtaaacttgggaataaaagcatcgcgaaagagcctttgagaccgcccagaagggccaggtctcccccacgccactgaacccgggctttgccgactgccgctcggggtggaccatgcctaaagattccgccgctaatattttttttattaacattttttattttttatttctggactgactccgataaaagggtgtggaaaagacagcaccaaccgcgcacttcccttgacttctgccctcgatccgttgccaactttgattgaatgggtgctgcggatgtgattatgtaatactgccatttccaagcagtgtttttggtaggttttaataaacagacttttcaaatgacggcaatatagaatcgttagatccgttgttgatctaaaaatatttgctttatattttcattaaatgacttcttttaatattttattcaaaatacttatgaactgctgcaaaacggtaatttatttttccccagatcttgtattacgtgtttttttcagacgagcacaaatcaaaatgaaatgaaaatatggacagttgttaggtaataagggtatcttttgatgtgatcatttgattgtaatttaatttgagtagtgattccgtaagagctgattgagaaaataaattttgtcgaggcggccgc

SEQ ID NO: 669 - protein, 497 aa, Rattus norvegicus
  ref <308>: DATABASE ACCESSION NUMBER: Refseq / NP_620192
  ref <309>: DATABASE ENTRY DATE: 2003-01-13
MATAASNPYLPGNSLLAAGSIVHSDAAGAGGGGGGGGGGGGGAGGGGGGMQPGSAAVTSGAYRGDPSSVKMVQSDFMQGAMAASNGGHMLSHAHQWVTALPHAAAAAAAAAAAAVEASSPWSGSAVGMAGSPQQPPRPPPPPPQGPDVKGGVGREDLHAGTALHHRGPPHLGPPPPPPHQGHPGGWGAAAAAAAAAAAAAAAAHLPSMAGGQQPPPQSLLYSQPGGFTVNGMLSAPPGPGGGGGGAGGGAQSLVHPGLVRGDTPELAEHHHHHHHHAHPHPPHPHHAQGPPHHGGGGAGPGLNSHDPHSDEDTPTSDDLEQFAKQFKQRRIKLGFTQADVGLALGTLYGNVFSQTTICRFEALQLSFKNMCKLKPLLNKWLEEADSSTGSPTSIDKIAAQGRKRKKRTSIEVSVKGALESHFLKCPKPSAQEITNLADSLQLEKEVVRVWFCNRRQKEKRMTPPGIQQQTPDDVYSQVGTVSADTPPPHHGLQTSVQ

SEQ ID NO: 670 - DNA, 371 bp, Homo sapiens
  ref <308>: DATABASE ACCESSION NUMBER: EMBL / AA994870
  ref <309>: DATABASE ENTRY DATE: 2000-03-03
cattctaacaaatttattttctcgatcagctcttacggaatcactactcaaattaaattacaatcaaatgatcacatcaaaagatacccttattacctaacaactgtccatattttcatttcattttgatttgtgctcgtctgaaaaaaacacgtaatacaagatctggggaaaaataaattaccgttttgcagcagttcataagtattctgaataaaatattaaaagaagtcatttaatgaaaatataaagcaaatatttttagatcaacaacggatctaacaattctatattgccgtcttttgaaaagtctgtttattaaaacctaccaaaaacactgcttggaaatggcagtattatataatcacatc

SEQ ID NO: 671 - DNA, 554 bp, Rattus norvegicus
  ref <308>: DATABASE ACCESSION NUMBER: EMBL / AA859305
  ref <309>: DATABASE ENTRY DATE: 2000-03-03
cggccgcagggcagggcagggatggggaaggtctacatctcgttcaggtccagcagggtctggtccagcatcctttgtgtacagagatgctcctctttggtgcacttcagcttatcttccaagtcatcaatggtcttttccagtttggctaccgatctttcagcaaactcagcccgggtctccgcctccttgagtttatcagtaagaatctttatttcttcttcatacttgtcttctttttgagagtacttttcttcagcagcactcagacacttcaggttctggtccatcagtctgatctgctcatccatctctcggcaacgggactctgccagctcggcgcgttcctccgtgcgttccaagtctccttcaataatcaccaacttacgagccacctcttcatacttcctgtctgcctcttctgcaatgtgctttgcttccttcagctggatttcctggagctccatcttttcttcatcttttagagcccggttttcaatcaccttcatacctctctcactctcatcagcagccttctccgcttcctccagctt

SEQ ID NO: 672 - DNA, 2618 bp, Rattus norvegicus
  ref <308>: DATABASE ACCESSION NUMBER: Refseq / NM_031070
  ref <309>: DATABASE ENTRY DATE: 2003-01-13
gtcctttctctcgccgggtttggagacacgctcccgatttcgaggggagggagacgatggactgagacgatgcacgccatggaatcccgggtattactgagaacgttctgcgtgatcctcgggctcgaagcggtttggggacttggtgtggacccctccctacagattgacgtcttatcagagttagaacttggggagtccacagctggagtgcgccaagtcccaggactgcataatgggacgaaagccttcctcttccaagattcccccagaagcataaaagcacccattgctacagctgagcggtttttccagaagctgaggaataaacacgagttcacaattctggtgaccctgaaacagatccacttaaattcgggagtcattctctccatccaccacttggatcacaggtacctggaactggaaagcagcggccaccggaatgagatcagactgcattaccgctctggaactcaccgcccgcacacggaagtgtttccttatattttggctgatgccaagtggcacaagctctccttagccttcagtgcctcccacttaattttacacatcgactgcaacaagatctatgaacgagtggtggaaatgccttctacagacttgcctctgggcaccacattttggttgggacagagaaataacgcacacgggtattttaagggaataatgcaagatgtgcaattacttgtcatgccccaggggttcatcgctcagtgcccggatcttaatcgaacctgtccaacatgcaacgacttccatgggcttgtgcagaaaatcatggagctgcaggacattttatcgaagacgtcagccaagttgtctagagctgaacaacgaatgaacaggctggatcagtgctactgtgagcggacgtgcaccatgaagggagccacctaccgggagttcgagtcctggacagacggctgcaagaactgcacatgcttgaatgggaccatccagtgcgagactctggtctgccctgctcccgactgcccggctaaatcggctccagcgtacgtggatggcaagtgctgtaaggagtgcaagtccacctgccagttccaggggcggagctactttgagggagaaaggagcacagtcttctcagcttccggaatgtgcgtcttgtatgaatgcaaggatcagaccatgaagcttgttgagaacgccggctgcccggctttagattgccccgagtctcatcagatcgccttgtctcacagctgctgcaaggtttgcaaaggttatgacttctgttctgagaagcatacatgcatggagaactcagtctgcaggaacctgaacgacagggcagtgtgcagctgccgggatggtttccgggccctccgggaggacaatgcctactgtgaagacattgacgagtgtgcagaggggcgccattactgccgtgagaacaccatgtgtgtgaacacaccgggctctttcctgtgtatctgccaaacagggtacatcagaatcgacgattactcgtgtacggaacatgacgagtgcctcacaaaccagcacaactgtgacgagaacgctttgtgctttaacaccgttggaggtcacaactgcgtctgcaagcctgggtacactgggaatggaaccacgtgcaaagctttctgcaaagacggctgcaaaaacggaggtgcctgcattgctgccaatgtctgtgcttgcccacaaggcttcaccggacccagctgtgagacagacattgatgagtgctctgagggctttgttcagtgtgacagccgtgccaactgcattaacctgcctgggtggtaccactgtgagtgcagagatggctaccatgacaatgggatgtttgcgccaggtggagaatcctgtgaagatattgatgaatgtgggactgggaggcacagctgtgccaatgacaccatttgcttcaacttggacggtggctacgattgccggtgtccccatggaaagaactgcacaggggactgcgtgcacgacgggaaagtcaaacacaacggccagatctgggtgctggagaacgacaggtgctctgtgtgttcctgccagactggatttgttatgtgccaacggatggtctgtgactgcgaaaaccccacagttgacctctcctgctgccctgagtgcgacccaaggctgagcagccagtgcctgcatcaaaacggggaaaccgtgtacaacagcggtgacacctgggcccaggattgccgtcagtgccgctgcttgcaagaagaagttgactgctggcccctggcttgcccagaggtagagtgtgaatttagtgtccttcctgagaacgagtgctgcccacgctgtgtcaccgatccttgtcaggctgacaccatccgcaatgacatcaccaaaacctgcctggacgagatgaacgtggttcgcttcactgggtcttcctggatcaagcacggcacggagtgcaccctctgccagtgcaagaacggccacgtgtgctgctcagtggacccacagtgcctccaggagctgtgaagttaactgcctcatgggagatacctgttaaagaatgatttctcatttaaaaaaaaaaaaaaaaaaaaaaaaaaaaaaaaaaaaaaaaa

SEQ ID NO: 673 - protein, 816 aa, Rattus norvegicus
  ref <308>: DATABASE ACCESSION NUMBER: Refseq / NP_112332
  ref <309>: DATABASE ENTRY DATE: 2003-01-13
MESRVLLRTFCVILGLEAVWGLGVDPSLQIDVLSELELGESTAGVRQVPGLHNGTKAFLFQDSPRSIKAPIATAERFFQKLRNKHEFTILVTLKQIHLNSGVILSIHHLDHRYLELESSGHRNEIRLHYRSGTHRPHTEVFPYILADAKWHKLSLAFSASHLILHIDCNKIYERVVEMPSTDLPLGTTFWLGQRNNAHGYFKGIMQDVQLLVMPQGFIAQCPDLNRTCPTCNDFHGLVQKIMELQDILSKTSAKLSRAEQRMNRLDQCYCERTCTMKGATYREFESWTDGCKNCTCLNGTIQCETLVCPAPDCPAKSAPAYVDGKCCKECKSTCQFQGRSYFEGERSTVFSASGMCVLYECKDQTMKLVENAGCPALDCPESHQIALSHSCCKVCKGYDFCSEKHTCMENSVCRNLNDRAVCSCRDGFRALREDNAYCEDIDECAEGRHYCRENTMCVNTPGSFLCICQTGYIRIDDYSCTEHDECLTNQHNCDENALCFNTVGGHNCVCKPGYTGNGTTCKAFCKDGCKNGGACIAANVCACPQGFTGPSCETDIDECSEGFVQCDSRANCINLPGWYHCECRDGYHDNGMFAPGGESCEDIDECGTGRHSCANDTICFNLDGGYDCRCPHGKNCTGDCVHDGKVKHNGQIWVLENDRCSVCSCQTGFVMCQRMVCDCENPTVDLSCCPECDPRLSSQCLHQNGETVYNSGDTWAQDCRQCRCLQEEVDCWPLACPEVECEFSVLPENECCPRCVTDPCQADTIRNDITKTCLDEMNVVRFTGSSWIKHGTECTLCQCKNGHVCCSVDPQCLQEL

SEQ ID NO: 674 - DNA, 3198 bp, Homo sapiens
  ref <308>: DATABASE ACCESSION NUMBER: Refseq / NM_006159
  ref <309>: DATABASE ENTRY DATE: 2003-01-15
ttgggaggagcagtctctccgctcgtctcccggagctttctccattgtctctgcctttacaacagagggagacgatggactgagctgatccgcaccatggagtctcgggtcttactgagaacattctgtttgatcttcggtctcggagcagtttgggggcttggtgtggacccttccctacagattgacgtcttaacagagttagaacttggggagtccacgaccggagtgcgtcaggtcccggggctgcataatgggacgaaagcctttctctttcaagatactcccagaagcataaaagcatccactgctacagctgaacagttttttcagaagctgagaaataaacatgaatttactattttggtgaccctaaaacagacccacttaaattcaggagttattctctcaattcaccacttggatcacaggtacctggaactggaaagtagtggccatcggaatgaagtcagactgcattaccgctcaggcagtcaccgccctcacacagaagtgtttccttacattttggctgatgacaagtggcacaagctctccttagccatcagtgcttcccatttgattttacacattgactgcaataaaatttatgaaagggtagtagaaaagccctccacagacttgcctctaggcacaacattttggctaggacagagaaataatgcgcatggatattttaagggtataatgcaagatgtccaattacttgtcatgccccagggatttattgctcagtgcccagatcttaatcgcacctgtccaacttgcaatgacttccatggacttgtgcagaaaatcatggagctacaggatattttagccaaaacatcagccaagctgtctcgagctgaacagcgaatgaatagattggatcagtgctattgtgaaaggacttgcaccatgaagggaaccacctaccgagaatttgagtcctggatagacggctgtaagaactgcacatgcctgaatggaaccatccagtgtgaaactctaatctgcccaaatcctgactgcccacttaagtcggctcttgcgtatgtggatggcaaatgctgtaaggaatgcaaatcgatatgccaatttcaaggacgaacctactttgaaggagaaagaaatacagtctattcctcttctggagtatgtgttctctatgagtgcaaggaccagaccatgaaacttgttgagagttcaggctgtccagctttggattgtccagagtctcatcagataaccttgtctcacagctgttgcaaagtttgtaaaggttatgacttttgttctgaaaggcataactgcatggagaattccatctgcagaaatctgaatgacagggctgtttgtagctgtcgagatggttttagggctcttcgagaggataatgcctactgtgaagacatcgatgagtgtgctgaagggcgccattactgtcgtgaaaatacaatgtgtgtcaacaccccgggttcttttatgtgcatctgcaaaactggatacatcagaattgatgattattcatgtacagaacatgatgagtgtatcacaaatcagcacaactgtgatgaaaatgctttatgcttcaacactgttggaggacacaactgtgtttgcaagccgggctatacagggaatggaacgacatgcaaagcattttgcaaagatggctgtaggaatggaggagcctgtattgccgctaatgtgtgtgcctgcccacaaggcttcactggacccagctgtgaaacggacattgatgaatgctctgatggttttgttcaatgtgacagtcgtgctaattgcattaacctgcctggatggtaccactgtgagtgcagagatggctaccatgacaatgggatgttttcaccaagtggagaatcgtgtgaagatattgatgagtgtgggaccgggaggcacagctgtgccaatgataccatttgcttcaatttggatggcggatatgattgtcgatgtcctcatggaaagaattgcacaggggactgcatccatgatggaaaagttaagcacaatggtcagatttgggtgttggaaaatgacaggtgctctgtgtgctcatgtcagaatggattcgttatgtgtcgacggatggtctgtgactgtgagaatcccacagttgatcttttttgctgccctgaatgtgacccaaggcttagtagtcagtgcctccatcaaaatggggaaactttgtataacagtggtgacacctgggtccagaattgtcaacagtgccgctgcttgcaaggggaagttgattgttggcccctgccttgcccagatgtggagtgtgaattcagcattctcccagagaatgagtgctgcccgcgctgtgtcacagacccttgccaggctgacaccatccgcaatgacatcaccaagacttgcctggacgaaatgaatgtggttcgcttcaccgggtcctcttggatcaaacatggcactgagtgtactctctgccagtgcaagaatggccacatctgttgctcagtggatccacagtgccttcaggaactgtgaagttaactgtctcatgggagatttctgttaaaagaatgttctttcattaaaagaccaaaaagaagttaaaacttaaattgggtgatttgtgggcagctaaatgcagctttgttaatagctgagtgaactttcaattatgaaatttgtggagcttgacaaaatcacaaaaggaaaattactggggcaaaattagacctcaagtctgcctctactgtgtctcacatcaccatgtagaagaatgggcgtacagtatataccgtgacatcctgaaccctggatagaaagcctgagcccattggatctgtgaaagcctctagcttcactggtgcagaaaattttcctctagatcagaatcttcagaatcagttaggttcctcactgcaagaaataaaatgtcaggcagtgaatgaattatattttcagaagtaaagcaaagaagctataacatgttatgtacagtacactctgaaaagaaatctgaaacaagttattgtaatgataaaaataatgcacaggcatggttacttaatattttctaacaggaaaagtcatccctatttccttgttttactgcacttaatattatttggttgaatttgttcagtataagctcgttcttgtgcaaaattaaataaatatttctcttacctt

SEQ ID NO: 675 - protein, 816 aa, Homo sapiens
  ref <308>: DATABASE ACCESSION NUMBER: Refseq / NP_006150
  ref <309>: DATABASE ENTRY DATE: 2003-01-15
MESRVLLRTFCLIFGLGAVWGLGVDPSLQIDVLTELELGESTTGVRQVPGLHNGTKAFLFQDTPRSIKASTATAEQFFQKLRNKHEFTILVTLKQTHLNSGVILSIHHLDHRYLELESSGHRNEVRLHYRSGSHRPHTEVFPYILADDKWHKLSLAISASHLILHIDCNKIYERVVEKPSTDLPLGTTFWLGQRNNAHGYFKGIMQDVQLLVMPQGFIAQCPDLNRTCPTCNDFHGLVQKIMELQDILAKTSAKLSRAEQRMNRLDQCYCERTCTMKGTTYREFESWIDGCKNCTCLNGTIQCETLICPNPDCPLKSALAYVDGKCCKECKSICQFQGRTYFEGERNTVYSSSGVCVLYECKDQTMKLVESSGCPALDCPESHQITLSHSCCKVCKGYDFCSERHNCMENSICRNLNDRAVCSCRDGFRALREDNAYCEDIDECAEGRHYCRENTMCVNTPGSFMCICKTGYIRIDDYSCTEHDECITNQHNCDENALCFNTVGGHNCVCKPGYTGNGTTCKAFCKDGCRNGGACIAANVCACPQGFTGPSCETDIDECSDGFVQCDSRANCINLPGWYHCECRDGYHDNGMFSPSGESCEDIDECGTGRHSCANDTICFNLDGGYDCRCPHGKNCTGDCIHDGKVKHNGQIWVLENDRCSVCSCQNGFVMCRRMVCDCENPTVDLFCCPECDPRLSSQCLHQNGETLYNSGDTWVQNCQQCRCLQGEVDCWPLPCPDVECEFSILPENECCPRCVTDPCQADTIRNDITKTCLDEMNVVRFTGSSWIKHGTECTLCQCKNGHICCSVDPQCLQEL

SEQ ID NO: 676 - DNA, 2789 bp, Rattus norvegicus
  ref <308>: DATABASE ACCESSION NUMBER: Refseq / NM_012894
  ref <309>: DATABASE ENTRY DATE: 2003-01-14
gagctcactttgctcgccctgaaagagtttgcctcagatttgagccaaaataaaaactaaacaaatttcaagacaaaagaggtctccgccagtcaagaagccctcaaaagcattttaccatggatatagaagacgaagagaatatgagttccagcagcattgatgttaaagaaaaccgcaatctggacaacatgccccccaaggacagcagcacacccggtcctggcgagggtattccgctctccaacgggggtggtgggagcaccagcaggaagcggcccctggaggagggcagcaatggccactccaagtaccgcctgaagaagcgaaggaaaacgccagggcccgttctacccaagaacgccctgatgcagctgaacgagatcaaaccgggcttacagtacatgctgctgtcccagacaggacccgtgcacgcacctctgtttgtcatgtctgtggaggtaaacgggcaggtctttgaaggctccggccctacaaagaagaaggcaaagctgcatgctgctgagaaggccctgcggtcttttgtccagtttcccaacgcctctgaggcccacctggccatgggaaggaccctctccgtgaacacagacttcacgtccgaccaggcggacttccccgacacgctcttcaatggctttgagactccagacaagtcggagccacccttctacgtaggctccaatggggatgactccttcagctcaagcggagacgttagcctgtcagcctccccagtgcctgccagccttacccagcctcctctgcccatcccaccaccattcccacccccaagtgggaagaaccccgtgatgatcttgaatgagctgcgcccagggctgaagtatgacttcctctccgagagtggggagagccacgccaagagctttgtcatgtccgtggtggtagatggccagttctttgagggctcagggagaaacaagaagcttgccaaggcccgggctgcacagtctgccttggctactgtcttcaatttgcacttggaccaaacgccatctcgccagcctgtcctcagtgagggtctccagttgcatttgccacaggtattggcagatgctgtctcacgcctggtcctgggtaagttcagtgacctgacagacaacttttcctcccctcacgcacgaagaaaagtgctctctggagtagtgatgaccacaggtacagatgtcaaagatgccaaggtgataagtgtttcgacagggacgaagtgcatcaacggcgaatacatgagtgaccgtggcctggctctcaatgactgccacgcagagataatctcccgaaggtccctgctcaggtttctatacgcacagctcgagctttacttaaataacaaagaagaccagaaaaagtccatatttcagaagtcagagcggggtgggttccggctgaaggataccgtgcagttccacctgtacatcagcacctcaccctgcggagacgccagaatattctctccccatgagcccgtgctagagggtatggcgccagactcccaccagctgacagaaccggctgatagacatccgaatcgcaaagcaaggggacagctgcggactaaaatagaatctggcgaggggacaatccctgtgcgctcaaatgccagcatccagacctgggatggggtgctgcagggggaacggctgctcaccatgtcctgcagtgacaagatagcacgctggaacgtggtgggcatccagggggccctgctcagcattttcgtggagcccatctacttctccagcatcatcctgggcagcctgtaccacggggaccacctctccagggccatgtaccagcggatctccaacatagaggacctgccaccgctctacaccctcaacaagcccctgctcagcggtatcagcaatgcagaggcacggcagccagggaaggcacccaacttcagtgtcaactggacggtgggcgacacggccattgaggtcatcaatgccacaacagggaaggatgagctaggccgcccctcccgcctgtgtaagcacgcgctgtactgtcgctggatgcgggtacacggaaaggtgcccccccacctgctgcgcaccaagatcaccaagcccaccacctaccacgagtccaagctggcagcgaaggagtaccaggctgccaaggcacgtctgttcactgccttcatcaaggcggggctgggcgcctgggtggagaagcccacagagcaggaccagttctccttcactccctgagccaggcggagtcgagagcacagagtgcgaggctgtggtgccgaactgtcccccagagccttgcgtctgacctgggacaggtgtgcacctcggggacggcacggggagtctgggggaaccactggacttcaagcatcatccccggcgcctctcaccacccagcagggcagtgtggggatgtgtagggtgctgggcacctcacatctgagtagggatcaggtgcacagtgggggtgcatgggggcacaggggcccatcaccaccccttgccacacatttcccctcttgagctacccagtgaccgctttatatctcagtttacattagacattgagttctactgagtagggcttcctcaagtataggaaaatagaaatttactttgtgtgagattcttggataaataatttattcagagctaggaatgagatttataaaataagaagtaattatgtcaggtcacttttatgccacattattttaattgcaaaagaaaaaaaaagcgtttctatgtgaaagaacacaggaatctaga

SEQ ID NO: 677 - protein, 711 aa, Rattus norvegicus
  ref <308>: DATABASE ACCESSION NUMBER: Refseq / NP_037026
  ref <309>: DATABASE ENTRY DATE: 2003-01-14
MDIEDEENMSSSSIDVKENRNLDNMPPKDSSTPGPGEGIPLSNGGGGSTSRKRPLEEGSNGHSKYRLKKRRKTPGPVLPKNALMQLNEIKPGLQYMLLSQTGPVHAPLFVMSVEVNGQVFEGSGPTKKKAKLHAAEKALRSFVQFPNASEAHLAMGRTLSVNTDFTSDQADFPDTLFNGFETPDKSEPPFYVGSNGDDSFSSSGDVSLSASPVPASLTQPPLPIPPPFPPPSGKNPVMILNELRPGLKYDFLSESGESHAKSFVMSVVVDGQFFEGSGRNKKLAKARAAQSALATVFNLHLDQTPSRQPVLSEGLQLHLPQVLADAVSRLVLGKFSDLTDNFSSPHARRKVLSGVVMTTGTDVKDAKVISVSTGTKCINGEYMSDRGLALNDCHAEIISRRSLLRFLYAQLELYLNNKEDQKKSIFQKSERGGFRLKDTVQFHLYISTSPCGDARIFSPHEPVLEGMAPDSHQLTEPADRHPNRKARGQLRTKIESGEGTIPVRSNASIQTWDGVLQGERLLTMSCSDKIARWNVVGIQGALLSIFVEPIYFSSIILGSLYHGDHLSRAMYQRISNIEDLPPLYTLNKPLLSGISNAEARQPGKAPNFSVNWTVGDTAIEVINATTGKDELGRPSRLCKHALYCRWMRVHGKVPPHLLRTKITKPTTYHESKLAAKEYQAAKARLFTAFIKAGLGAWVEKPTEQDQFSFTP

SEQ ID NO: 678 - DNA, 3564 bp, Homo sapiens
  ref <308>: DATABASE ACCESSION NUMBER: Refseq / NM_015834
  ref <309>: DATABASE ENTRY DATE: 2002-01-19
gcggcggcggcggcggcggcggcagcggcggccaagcggccaggttggcggccggggctccgggccgcgcgaggccacggccacgccgcgccgctgcgcacaaccaacgaggcagagcgccgcccggcgcgagactgcggccgaagcgtggggcgcgcgtgcggaggaccaggcgcggcgcggctgcggctgagagtggagcctttcaggctggcatggagagcttaaggggcaactgaaggagacacactggccaagcgcggagttctgcttacttcagtcctgctgagatactctctcagtccgctcgcaccgaaggaagctgccttgggatcagagcagacataaagctagaaaaatttcaagacagaaacagtctccgccagtcaagaaaccctcaaaagtattttgccatggatatagaagatgaagaaaacatgagttccagcagcactgatgtgaaggaaaaccgcaatctggacaacgtgtcccccaaggatggcagcacacctgggcctggcgagggctctcagctctccaatgggggtggtggtggccccggcagaaagcggcccctggaggagggcagcaatggccactccaagtaccgcctgaagaaaaggaggaaaacaccagggcccgtcctccccaagaacgccctgatgcagctgaatgagatcaagcctggtttgcagtacacactcctgtcccagactgggcccgtgcacgcgcctttgtttgtcatgtctgtggaggtgaatggccaggtttttgagggctctggtcccacaaagaaaaaggcaaaactccatgctgctgagaaggccttgaggtctttcgttcagtttcctaatgcctctgaggcccacctggccatggggaggaccctgtctgtcaacacggacttcacatctgaccaggccgacttccctgacacgctcttcaatggttttgaaactcctgacaaggcggagcctcccttttacgtgggctccaatggggatgactccttcagttccagcggggacctcagcttgtctgcttccccggtgcctgccagcctagcccagcctcctctccctgtcttaccaccattcccacccccgagtgggaagaatcccgtgatgatcttgaacgaactgcgcccaggactcaagtatgacttcctctccgagagcggggagagccatgccaagagcttcgtcatgtctgtggtcgtggatggtcagttctttgaaggctcggggagaaacaagaagcttgccaaggcccgggctgcgcagtctgccctggccgccatttttaacttgcacttggatcagacgccatctcgccagcctattcccagtgagggtcttcagctgcatttaccgcaggttttagctgacgctgtctcacgcctggtcctgggtaagtttggtgacctgaccgacaacttctcctcccctcacgctcgcagaaaagtgctggctggagtcgtcatgacaacaggcacagatgttaaagatgccaaggtgataagtgtttctacaggaacaaaatgtattaatggtgaatacatgagtgatcgtggccttgcattaaatgactgccatgcagaaataatatctcggagatccttgctcagatttctttatacacaacttgagctttacttaaataacaaagatgatcaaaaaagatccatctttcagaaatcagagcgaggggggtttaggctgaaggagaatgtccagtttcatctgtacatcagcacctctccctgtggagatgccagaatcttctcaccacatgagccaatcctggaagggtctcgctcttacacccaggctggagtgcagtggtgcaatcatggctcactgcagcctcgacctcctgggctcttaagcgatccttccacctcaaccttccaaggagctgggactacagaaccagcagatagacacccaaatcgtaaagcaagaggacagctacggaccaaaatagagtctggtgaggggacgattccagtgcgctccaatgcgagcatccaaacgtgggacggggtgctgcaaggggagcggctgctcaccatgtcctgcagtgacaagattgcacgctggaacgtggtgggcatccagggatccctgctcagcattttcgtggagcccatttacttctcgagcatcatcctgggcagcctttaccacggggaccacctttccagggccatgtaccagcggatctccaacatagaggacctgccacctctctacaccctcaacaagcctttgctcagtggcatcagcaatgcagaagcacggcagccagggaaggcccccaacttcagtgtcaactggacggtaggcgactccgctattgaggtcatcaacgccacgactgggaaggatgagctgggccgcgcgtcccgcctgtgtaagcacgcgttgtactgtcgctggatgcgtgtgcacggcaaggttccctcccacttactacgctccaagattaccaagcccaacgtgtaccatgagtccaagctggcggcaaaggagtaccaggccgccaaggtacactgaggaggggacggctccgtcttcacattgtgcacagatctgaggatgggattagcgaagctgtggagactgcacatccggacctgcccatgtctcaaaacaaacacatgtacagtggctctttttccttctcaaacactttaccccagaagcaggtggtctgccccaggcataaagaaggaaaattggccatctttcccacctctaaattctgtaaaattatagacttgctcaaaagattcctttttatcatccccacgctgtgtaagtggaaagggcattgtgttccgtgtgtgtccagtttacagcgtctctgccccctagcgtgttttgtgacaatctcccctgggtgaggagtgggtgcacccagccccgaggccagtggttgctcggggccttccgtgtgagttctagtgttcacttgatgccggggaatagaattagagaaaactctgacctgccgggttccagggactggtggaggtggatggcaggtccgactcgaccatgacttagttgtaagggtgtgtcggctttttcagtctcatgtgaaaatcctcctgtctctggcagcactgtctgcactttcttgtttactgtttgaagggacgagtaccaagccacaaggaacacttcttttggccacagcataagctgatggtatgtaaggaaccgatgggccattaaacatgaactgaacggttaaaagcacagtctatggaacgctaatggagtcagcccctaaagctgtttgctttttcaggctttggattacatgcttttaatttgattttagaatctggacactttctatgaatgtaattcggctgagaaacatgttgctgagatgcaatcctcagtgttctctgtatgtaaatctgtgtatacaccacacgttacaactgcatgagcttcctctcgcacaagaccagctggaactgagcatgagacgctgtcaaatacagacaaaggatttgagatgttctcaataaaaagaaaatgtttcact

SEQ ID NO: 679 - protein, 714 aa, Homo sapiens
  ref <308>: DATABASE ACCESSION NUMBER: Refseq / NP_056649
  ref <309>: DATABASE ENTRY DATE: 2002-01-19
MDIEDEENMSSSSTDVKENRNLDNVSPKDGSTPGPGEGSQLSNGGGGGPGRKRPLEEGSNGHSKYRLKKRRKTPGPVLPKNALMQLNEIKPGLQYTLLSQTGPVHAPLFVMSVEVNGQVFEGSGPTKKKAKLHAAEKALRSFVQFPNASEAHLAMGRTLSVNTDFTSDQADFPDTLFNGFETPDKAEPPFYVGSNGDDSFSSSGDLSLSASPVPASLAQPPLPVLPPFPPPSGKNPVMILNELRPGLKYDFLSESGESHAKSFVMSVVVDGQFFEGSGRNKKLAKARAAQSALAAIFNLHLDQTPSRQPIPSEGLQLHLPQVLADAVSRLVLGKFGDLTDNFSSPHARRKVLAGVVMTTGTDVKDAKVISVSTGTKCINGEYMSDRGLALNDCHAEIISRRSLLRFLYTQLELYLNNKDDQKRSIFQKSERGGFRLKENVQFHLYISTSPCGDARIFSPHEPILEGSRSYTQAGVQWCNHGSLQPRPPGLLSDPSTSTFQGAGTTEPADRHPNRKARGQLRTKIESGEGTIPVRSNASIQTWDGVLQGERLLTMSCSDKIARWNVVGIQGSLLSIFVEPIYFSSIILGSLYHGDHLSRAMYQRISNIEDLPPLYTLNKPLLSGISNAEARQPGKAPNFSVNWTVGDSAIEVINATTGKDELGRASRLCKHALYCRWMRVHGKVPSHLLRSKITKPNVYHESKLAAKEYQAAKVH

SEQ ID NO: 680 - DNA, 489 bp, Rattus norvegicus; identical to SEQ ID NO: 582
  ref <308>: DATABASE ACCESSION NUMBER: EMBL / AI102868
  ref <309>: DATABASE ENTRY DATE: 2000-03-03

SEQ ID NO: 681 - DNA, 1452 bp, Rattus norvegicus
  ref <308>: DATABASE ACCESSION NUMBER: Refseq / NM_057188
  ref <309>: DATABASE ENTRY DATE: 2003-01-13
cgcgccccgcagctcctgactgacgccggccttcgcaccgcctccgccgcaggaagctaccgcgcaccgctagcaccatgccccgcatagacgcggacctgaaactcgacttcaaggatgttttgctgcgacctaaacggagcagcctcaagagccgatccgaggtggaccttgagcgaacctttacgtttcgaaactcaaagcagacctactcagggattcccgtcatcgtggccaacatggacaccgtggggacatttgagatggctgtggtgatgtcacagcatgccatgttcacagccattcacaagcattactccctggatgactggaaacattttgctgaaaatcaccccgaatgcctgcagcatgtagccgtgagttctggcagcgggcagaatgatcttgagaagatgagcctcatcttggaagctgtgcctcaggtgaagttcatctgcctggatgtggccaatgggtattcggaacattttgtggaattcgtgaaactggtccgatccaaatttcccgaacacaccatcatggcagggaacgtggtgacgggagagatggtggaggagctcatcctttctggagcagatatcatcaaagtgggagtcggaccaggctctgtgtgcaccacccgaaccaagacaggcgtgggctacccgcagctgagcgctgtgatagagtgtgctgactcagcacacggcctcaagggacacatcatctctgacggaagctgcacatgtccaggagatgtcgccaaagcctttggagctggcgcggattttgtcatgctgggaggcatgttttccggacacaccgagtgtgcaggagaggtgatcgagaggaacgggcagaagctgaagcttttctacggcatgagctcagacacagccatgaagaaacacgcgggaggcgtcgctgagtacagggcctctgagggcaagactgtggaagtgccttacaaaggggacgtagagaacacaattctggatatccttggaggacttcggtctacctgtacctacgtgggggccgccaagctcaaagagctcagtaggagagccacattcatccgcgtgacccaacagcacaacacggtgttcggctaacctcggggatgttcggttaacctcggggaagcggaagcctcctttcgccacgcttcaccccatcccgcctccttatctgccctagcaggctgcctgctatcacagacgctgagactgagtcctcatcctgatctcggggcttgccctaatgcctgtgtggggcccagaaacagggtgctcgaggggcccagggtcagcacctagaactcattgtctctttgttttaaccagcccttgcaccctctttttccaccccttgccctttgttttctttctaaaggacaatggtttcacttttaatataaggctgtggtcttgaaaaaaaaaaaaaaaaaaa

SEQ ID NO: 682 - protein, 345 aa, Rattus norvegicus
  ref <308>: DATABASE ACCESSION NUMBER: Refseq / NP_476536
  ref <309>: DATABASE ENTRY DATE: 2003-01-13
MPRIDADLKLDFKDVLLRPKRSSLKSRSEVDLERTFTFRNSKQTYSGIPVIVANMDTVGTFEMAVVMSQHAMFTAIHKHYSLDDWKHFAENHPECLQHVAVSSGSGQNDLEKMSLILEAVPQVKFICLDVANGYSEHFVEFVKLVRSKFPEHTIMAGNVVTGEMVEELILSGADIIKVGVGPGSVCTTRTKTGVGYPQLSAVIECADSAHGLKGHIISDGSCTCPGDVAKAFGAGADFVMLGGMFSGHTECAGEVIERNGQKLKLFYGMSSDTAMKKHAGGVAEYRASEGKTVEVPYKGDVENTILDILGGLRSTCTYVGAAKLKELSRRATFIRVTQQHNTVFG

SEQ ID NO: 683 - DNA, 1464 bp, Homo sapiens
  ref <308>: DATABASE ACCESSION NUMBER: Refseq / NM_006877
  ref <309>: DATABASE ENTRY DATE: 2002-11-05
ctccccgcgccgccccgcgcaggcgcccccgccccgccgtcgccgccgccgcagccaggagccgctgcaccatgccccgcatagatgcggacctcaagctcgacttcaaggacgtcctgctccgacctaagcggagcagcctcaagagccgagccgaggtggatcttgaacgcaccttcacgtttcgaaattcaaagcagacctactcagggattcccatcatcgtggccaacatggacactgtgggcacgtttgagatggcagccgtgatgtcacagcactccatgtttacagcaattcataagcattactccctggatgactggaagctctttgccacaaatcacccagaatgcctgcagaatgtagccgtgagttcaggcagtgggcagaatgatctggaaaagatgaccagcatcctggaagctgtgccacaggttaagtttatttgcctggatgtggccaatgggtattcagaacattttgtggaattcgtgaaacttgtccgtgccaaatttcctgaacacaccattatggcagggaacgtggtgacaggagaaatggtagaagagcttattctttccggagcagatatcatcaaagtgggagttggaccaggttctgtgtgcaccacccgcaccaagacgggagtggggtacccccagctgagtgccgtcattgagtgtgccgactctgcccacggcctgaagggccacatcatctctgatggaggctgtacgtgtccaggggatgtcgccaaagcctttggaactggagcagattttgtcatgctgggaggaatgttttcgggtcatacggagtgtgctggagaagtgattgagaggaacggacggaagctcaagctcttctacgggatgagctctgacaccgccatgaacaagcacgcaggaggagttgctgagtacagagcctctgagggtaagactgtggaagttccttacaaaggagatgtggaaaacactatcctggatattctcgggggactgaggtccacgtgcacctacgtgggggccgccaaactcaaggagctcagcaggagggcaacattcatccgggtgacccagcagcacaacaccgtgttcagctaaccctggggacaaagcagcgtctggctcgatggaagcgtccaaacctgcttttcccatctccccccaagtctgttccgtcagagcttctggctgctcctgaatggtggaatgcctgtgtcctctcttctgtctcctgccgcctggaggcttcggggctctcccgcctgccttctcggggcccagacgcaaggcaccgattgggccaacatcagagccctgctgcccagaactcataacctcattgttcaaaccaacacttgcacctttctctttttctctttctctctccctttctttgtttttctttcttttttaaaagaagatggtttcagctttaatataatgctattatctt

SEQ ID NO: 684 - protein, 345 aa, Homo sapiens
  ref <308>: DATABASE ACCESSION NUMBER: Refseq / NP_006868
  ref <309>: DATABASE ENTRY DATE: 2002-11-05
MPRIDADLKLDFKDVLLRPKRSSLKSRAEVDLERTFTFRNSKQTYSGIPIIVANMDTVGTFEMAAVMSQHSMFTAIHKHYSLDDWKLFATNHPECLQNVAVSSGSGQNDLEKMTSILEAVPQVKFICLDVANGYSEHFVEFVKLVRAKFPEHTIMAGNVVTGEMVEELILSGADIIKVGVGPGSVCTTRTKTGVGYPQLSAVIECADSAHGLKGHIISDGGCTCPGDVAKAFGTGADFVMLGGMFSGHTECAGEVIERNGRKLKLFYGMSSDTAMNKHAGGVAEYRASEGKTVEVPYKGDVENTILDILGGLRSTCTYVGAAKLKELSRRATFIRVTQQHNTVFS

SEQ ID NO: 685 - DNA, 1407 bp, Rattus norvegicus
  ref <308>: DATABASE ACCESSION NUMBER: Refseq / NM_019163
  ref <309>: DATABASE ENTRY DATE: 2003-01-14
atgacagagatacctgcacctttgtcctacttccagaatgcacagatgtctgaggacagccactccagcagcgtccgtagccagaatgacaatcaagaacggcagcagcatcatgacagacagagacttgacaaccctgagtcgatatctaatggccgaccccagagtaactttaccaggcaggtgatagagcaagatgaggaggaagacgaagagctgacattgaaatatggagccaagcacgtcatcatgctctttgttcctgtgaccctctgcatggtcgttgtggtggccactatcaagtcagtcagcttctacacccggaaggatgggcagctaatctataccccattcacagaagacaccgagactgtaggccagagagccctgcactcgatcttgaatgccgccatcatgatcagtgtcatcgtcgttatgaccatcctcctggtggtcctgtataagtacaggtgctacaaggtcatccatgcctggcttattgtttcatctctgttgttgctgttctttttttcattcatttacttaggggaagtattcaagacctacaatgtcgccgtggactatattacggttgcactcctgatctggaattttggtgtggtcgggatgattgccattcactggaaaggcccactccgactgcagcaggcgtatctcattatgatcagtgccctcatgtccctggtatttatcaagtacctccctgaatggaccgcatggctcatcttggctgtgatttcagtatatgatttggtggctgttctgtgccccaaaggtccacttcgtatgctggtcgaaacagctcaggaaagaaatgagactctctttccagctcttatctattcctcaaccatggtgtggttggtgaatatggctgaaggagacccagaagcccaaaggagggtacccaaaaaccccaagtatagcacacaaggaacagagagggaagagacacaggacactggcactgggagcgatgatggtggcttcagtgaggagtgggaggcccaaagagacagtcacctggggcctcatcgctccactcctgagtcaagagctgctgtccaggaactttctgggagcatcctcactagtgaagacccggaggaaagaggagtaaggcttgggctgggagatttcattttctacagtgttctggttggtaaggcctcagcgaccgccagtggggactggaacacaaccatagcctgctttgtagccatattgatcggcctgtgccttacgttactcctgctcgccattttcaagaaagcgttgccggcccttcccatctccatcaccttcgggctcattttctactttgccacggattatctcgtgcagcccttcatggaccaacttgcattccatcaattttatatctag

SEQ ID NO: 686 - protein, 468 aa, Rattus norvegicus
  ref <308>: DATABASE ACCESSION NUMBER: Refseq / NP_062036
  ref <309>: DATABASE ENTRY DATE: 2003-01-14
MTEIPAPLSYFQNAQMSEDSHSSSVRSQNDNQERQQHHDRQRLDNPESISNGRPQSNFTRQVIEQDEEEDEELTLKYGAKHVIMLFVPVTLCMVVVVATIKSVSFYTRKDGQLIYTPFTEDTETVGQRALHSILNAAIMISVIVVMTILLVVLYKYRCYKVIHAWLIVSSLLLLFFFSFIYLGEVFKTYNVAVDYITVALLIWNFGVVGMIAIHWKGPLRLQQAYLIMISALMSLVFIKYLPEWTAWLILAVISVYDLVAVLCPKGPLRMLVETAQERNETLFPALIYSSTMVWLVNMAEGDPEAQRRVPKNPKYSTQGTEREETQDTGTGSDDGGFSEEWEAQRDSHLGPHRSTPESRAAVQELSGSILTSEDPEERGVRLGLGDFIFYSVLVGKASATASGDWNTTIACFVAILIGLCLTLLLLAIFKKALPALPISITFGLIFYFATDYLVQPFMDQLAFHQFYI

SEQ ID NO: 687 - DNA, 5218 bp, Homo sapiens
  ref <308>: DATABASE ACCESSION NUMBER: Refseq / XM_047011
  ref <309>: DATABASE ENTRY DATE: 2003-01-03
cttccctccccgactgtgcgccgcggctggctcgggttcccgggccgacatgggcgccgccgcgtgggcacggccgctgagcgtgtctttcctgctgctgcttctgccgctcccggggatgcctgcgggctcctgggacccggccggttacctgctctactgcccctgcatggggcgctttgggaaccaggccgatcacttcttgggctctctggcatttgcaaagctgctaaaccgtaccttggctgtccctccttggattgagtaccagcatcacaagcctcctttcaccaacctccatgtgtcctaccagaagtacttcaagctggagcccctccaggcttaccatcgggtcatcagcttggaggatttcatggagaagctggcacccacccactggccccctgagaagcgggtggcatactgctttgaggtggcagcccagcgaagcccagataagaagacgtgccccatgaaggaaggaaacccctttggcccattctgggatcagtttcatgtgagtttcaacaagtcggagctttttacaggcatttccttcagtgcttcctacagagaacaatggagccagagattttctccaaaggaacatccggtgcttgccctgccaggagccccagcccagttccccgtcctagaggaacacaggccactacagaagtacatggtatggtcagacgaaatggtgaagacgggagaggcccagattcatgcccaccttgtccggccctatgtgggcattcatctgcgcattggctctgactggaagaacgcctgtgccatgctgaaggacgggactgcaggctcgcacttcatggcctctccgcagtgtgtgggctacagccgcagcacagcggcccccctcacgatgactatgtgcctgcctgacctgaaggagatccagagggctgtgaagctctgggtgaggtcgctggatgcccagtcggtctacgttgctactgattccgagagttatgtgcctgagctccaacagctcttcaaagggaaggtgaaggtggtgagcctgaagcctgaggtggcccaggtcgacctgtacatcctcggccaagccgaccactttattggcaactgtgtctcctccttcactgcctttgtgaagcgggagcgggacctccaggggaggccgtcttctttcttcggcatggacaggccccctaagctgcgggacgagttctgattctggccggagcaccagaccctctgatcctggagggaccagagtctgagctggtccttccagccaggcctggcagccagaggtgctccgggattgcaaactcctcttctcacctgccaaagatggagaagagtgccagggacccctcaaggagggagacgctccatatcccagggcataggacttgcaggttcctaggagcaggagcatctcccatcgcacgtgctttctgctcttctgggaatttctcacactggcaaagcagtccagcctccgtcttctggtccactctgctctgagcagcctgggatgctgaactcttcagagagatttttttatagagagatttctataattttgatacaaggtcatgactatcctagaactctctgtggtttttgaaaatcattgaattctattaatgtaggtacctaaagtgaccttaactgaatgtggatgaggctggggctggtgtgggtcttttggctgcttttcaaggtgtcccccaatgtggccctcaagagccatccccactgcctggccagagccattgttgtcccctacttcctaggccatttctggggcttgggggatgaatgctgtcctgtgctgtaaacactatgcaaatggaagttatcggttgtggtgctgtgcagcgctctgtgggcgactaagtgccactcacgcagcatgttcctggcaaggagcacataccatcaagccacactatcatggtattgttctcacagtcttttggtggttgatggccactgcaaacctggcaccatcagatctcttctgatctcttgccccagtggggcctggttggtagaatgttggcattcggttgatatccaaagcctgttctcccagccgtcctcctgcagctggagccttcaggccgtattctcacgagggaacgtttgccaaggctctgacctcacagaagatgcccagggcccagaagccatcagaattatcagtggagaagcaccttttgactcttcccttccaatgtaatctctgccaacaccatgaggcttaaggtgctctaagtcatgagtgttttggtctcaaatgctgcagttttaataatctgtgactcctgagagcccatggttttttgaccttgtggttctaaaattccttgtctgacccctgtagatcttttccttgccatgtcacctcccttggcctttgatcctggaaaggtggcagagcctccactgagccaggcccagagctccttgcagtgccttcttccttgtttacctgtgggaggaaacactttttttgtcaggggcagcctggttcagagctcagaggtcacactgtatcaaagatctcaaacagcaaagtcagcatttgctgtatagagctgccacccaactctaagcaggagaaactgtacagaaagggctttgctatttttcccttttgggaaaacaatgaagtgttttaagtcctgggtggactgagagatggtttgcctgtccagacttgctctcaagcctcatccagagaaggagctgcagatgagggagcccgtacactccctgccaccactaggttgtaagcctgtagctggctggctgatttcattttggaattcatttgccatccacagccttacactaggcacacactttagagtctggggctccagtggggcccgcctaattttttttccccccaagacagggccttgctctgtctcccaggctggagtgcagtggcatgatcatggcttactgcagccttgatctcccaggctcaagcgatccttctgcctcagcctctctggtagctgagactgcatgcccagctccaaatcaccttgattcatatcagcagtaataatcacttgtgttctgaaagaaagggcaccagaagttctagcaaaattcagttgtgttctgtgagctagcactttttcctctgacccaattttcttacctataaaatggtgataaaaaccgacaggttgttcaaaggcccagatcagctaaagcatgtatataagagcacgttgtaaacttgaaagagacaaaggcacaaatgtggctgttgattaatttgactgcttctcgttgctcgtcacctccatgccaggcactgtgcttgctaattgctttatgggggcattctcttatttattccccagccctgggaaataggagctgtcattatccttctctttctgcacaaggaaaaattaatgccctgagaattgtcataattttcccaaggctgcccagctggtggtgttaagccagaatttgacctcccagagccagtttccattagctgccatgctctgctgcctctaattcacagaatgcactttctaccctgtgtgccatggagacctcctatggaaaaatgatcagccaccttaccttctactgggtacctgctgtgagtctgcctatgccagaaggattaaggaggggaggttacccaagaaacaaagcctacatgccgcttacagcccccgttggatggttgctcagtacaacagtcttgcattcagcaggtgtttgttcatcacctactatgtgtcaggctctatgctaggtactggggatacaggagagaatcaagcgtaaagtctttgttctcaaggaatttgcattctagaaagtagaagatgtaataaatgtactgtgggacatgttaataagtgctataaagaaatataaagggtttgggagcaaaaagagggagtggatctattttagatgagcccaggtaagacctctctgaagagctgtcatgaaggagggagggagcacattcctggcagagaaaacagcacgtgcaaaggccccgagactggagtgtgttcctgaagagcagccaggaggccagcatggctggagaggcaggcataggcagggaaccgagcagcaggtcagagcaggcgagctgacattctgcagcctggacggccatggcaggaagcttttagttggagagatacaggaagcctcctagggttctgagcagaagaggggcatgagctgattcacattctgaaggacctctctagctggccagtgctgaggaggttggagagagaaagggtgaaagcagagagaccagtgcagggctgttaacagggttgcaggcgagagactggggtgctgggctcccctagactaggactccagtgccctcctctcccaagagacaaaggccattgcattgaaggaggtgggaaatgattagattctgaacatatgtaattatttttcagtctttttcaaagatacaaatatttacatagttttaatcatgtaatatatacaatttaatgtcctagtgttttacttaatagtgtatcatgttttccctgttggtatgtagcctggataaatgctcttaattataaaaaattctgtcgaggagtgttccatagtttattgttttcctattatgagaatttaggccaagtgtggtggctcatgcctgtaatcccagcactttgcgaggccgaggtgggcagatcacttgaggtgaggagttcaagaccagcctggccaacatggtgaattatctctactaaaaatacaaaaaaataataataatagccaggcgtggtggcacatgcctgtattcccagctgcttgggaggctgaggcaggagaatggcttgaacctgggaggtggaggttgcagtgagccgagatggtgccactgcattccagcctgggcaacagagcgagactccatctcaaaaaaaaggagacttcatgtgcccccaatttttcactattgttatttgaaaaaatatttttatttgtaagagtttttctttatttaaaatgttcattaataaagttgttggacgggaagcaaaaaaaaaaagttgtttaagataaattcccagaagtgaatttgttagatcaaacacttaaaactttttgttatggaagaattcaaatataaataaaaaattgtgagtaataaaatgaactcacagtttcaacaatgacccac

SEQ ID NO: 688 - protein, 388 aa, Homo sapiens
  ref <308>: DATABASE ACCESSION NUMBER: Refseq / XP_047011
  ref <309>: DATABASE ENTRY DATE: 2003-01-03
MGAAAWARPLSVSFLLLLLPLPGMPAGSWDPAGYLLYCPCMGRFGNQADHFLGSLAFAKLLNRTLAVPPWIEYQHHKPPFTNLHVSYQKYFKLEPLQAYHRVISLEDFMEKLAPTHWPPEKRVAYCFEVAAQRSPDKKTCPMKEGNPFGPFWDQFHVSFNKSELFTGISFSASYREQWSQRFSPKEHPVLALPGAPAQFPVLEEHRPLQKYMVWSDEMVKTGEAQIHAHLVRPYVGIHLRIGSDWKNACAMLKDGTAGSHFMASPQCVGYSRSTAAPLTMTMCLPDLKEIQRAVKLWVRSLDAQSVYVATDSESYVPELQQLFKGKVKVVSLKPEVAQVDLYILGQADHFIGNCVSSFTAFVKRERDLQGRPSSFFGMDRPPKLRDEF

SEQ ID NO: 689 - DNA, 819 bp, Rattus norvegicus
  ref <308>: DATABASE ACCESSION NUMBER: Refseq / NM_022939
  ref <309>: DATABASE ENTRY DATE: 2003-01-13
atgtcctacggtcccttagacatgtatcggaatccgggccgtcggagcctccgggacttcagcagcatcatccagacgtgcagcggcaacatccagcggatcagccaagccactgctcagataaagaatttgatgagccaacttggaactaagcaggactcaagcaaactccaggaaaatttgcaacagttccagcactccacaaatcagcttgccaaggagacaaatgagttgctgaaggagttagggtccttgcccctacccttgtctgcatcagagcagcgccaacagaagcttcagaaggagcggctcatgaatgacttctcgtcggccttgaacaatttccaggttgtgcagagaaaggtatctgagaaggagaaagaaagcatcgcgagagcacgggctggatcccgtctttctgcagaagacaggcaaagagaagagcagctcgtctcatttgacagccatgaggagtggaaccagatgcagagccaggaggaagaggcggccatcactgagcaagacctggaacttattaaagagagggaaacggcgattcagcagctggaggctgacattttggatgtcaatcagatctttaaagacttagctatgatgatccacgaccaaggtgatctgattgatagcatagaagccaatgtggaaagctcagaggtgcatgtggaaagagcctctgatcagctacagagagctgcttactatcagaaaaaatctcgcaagaagatgtgtatcctcgtgcttgtcctctcagtgattgttacagtcttggtagttgttatctgggttgcttctaagtga

SEQ ID NO: 690 - protein, 272 aa, Rattus norvegicus
  ref <308>: DATABASE ACCESSION NUMBER: Refseq / NP_075228
  ref <309>: DATABASE ENTRY DATE: 2003-01-13
MSYGPLDMYRNPGRRSLRDFSSIIQTCSGNIQRISQATAQIKNLMSQLGTKQDSSKLQENLQQFQHSTNQLAKETNELLKELGSLPLPLSASEQRQQKLQKERLMNDFSSALNNFQVVQRKVSEKEKESIARARAGSRLSAEDRQREEQLVSFDSHEEWNQMQSQEEEAAITEQDLELIKERETAIQQLEADILDVNQIFKDLAMMIHDQGDLIDSIEANVESSEVHVERASDQLQRAAYYQKKSRKKMCILVLVLSVIVTVLVVVIWVASK

SEQ ID NO: 691 - DNA, 452 bp, Rattus norvegicus
  ref <308>: DATABASE ACCESSION NUMBER: EMBL / AI639367
  ref <309>: DATABASE ENTRY DATE: 2000-03-04
aaaagatgttgtcataggaaggagaaatggcgtgataaataaagcattacccaagagggaatgtttgcatgtgtcagaatttgtaatgatgaagttggagtcagaatgttgaagtccagcattcctgtgttggaaatctgatgtagcttcactgtctggcttacacatttgcaatgagcataatggtgacagtccctgccagctacagctattgtgaggattaaatataatgacatttatgaagggtttcctagtgcctcgcatgtaataagcgtttgattttcaagctaaaattctggaatcgattgtagattggatcaagaaataatgaaaaatattgaagcttagaaaataattgccttttttttaggaacattgggaaacctagaaggaatttttatcatgttcttatagaaagtttggaccaaaactggcaatagtttgaatattaa

SEQ ID NO: 692 - DNA, 1786 bp, Rattus norvegicus
  ref <308>: DATABASE ACCESSION NUMBER: Refseq / NM_030989
  ref <309>: DATABASE ENTRY DATE: 2003-01-13
gggtctgctgggattgggactttcccctcccacgtgctcacactggctaaagttctgaagctccagttcattgggactttccttgctataggtagcgactacagttagggggtacctggcatccgggcccgcaccctacttcccagcagggtgtcacgctcccctgaagactggataactgtcatggaggattcacagtcggatatgagcatcgagctccctctgagtcaggagacattttcatgcttatggaaacttcttcctccagatgatattctgcccaccacagcgacagggtcacctaattccatggaagatctgttcctgccccaggatgttgcagagttgttagaaggcccagaggaagccctccaagtgtcagctcctgcagcacaggaacctggaactgaggcccctgcacccgtggcccctgcttcagctacaccgtggcctctgtcatcttccgtcccttctcaaaaaacttaccaaggcaactatggcttccacctgggcttcctgcagtcagggacagccaagtctgttatgtgcacgtactcaatttccctcaataagctgttctgccagctggcgaagacatgccctgtgcagttgtgggtcacctccacacctccacctggtacccgtgtccgtgccatggccatctacaagaagtcacaacacatgactgaggtcgtgagacgctggccccaccatgagcgttgctctgatggtgacggcctggctcctccccaacatcttatccgggtggaaggaaatccgtatgctgagtatctggacgacaggcagacttttcggcacagcgtggtggtaccgtatgagccacctgaggtcggctccgactataccactatccactacaagtacatgtgcaacagctcctgcatggggggcatgaaccgccggcccatccttaccatcatcacgctggaagactccagtgggaatcttctgggacgggacagctttgaggttcgtgtttgtgcctgtcctgggagagaccgtcggacagaggaagaaaatttccgcaaaaaagaagagcattgcccggagctgcccccagggagtgcaaagagagcactgcccaccagcacaagctcctctccccagcaaaagaaaaaaccactcgatggagaatatttcacccttaagatccgtgggcgtgagcgcttcgagatgttccgagagctgaatgaggccttggaattaaaggatgcccgtgctgccgaggagtcaggagacagcagggctcactccagctacccgaagaccaagaagggccagtctacgtcccgccataaaaaaccaatgatcaagaaagtggggcctgactcagactgacagcctctgcatcctgtccccatcaccagcctccccgtcccctcctttcttgccattttatgactttagggcttgttatgagagctgacaagacaatgctagtcccttcactgcctttttttaccttgtagatagtactcggccccctctatgcaaactggttcctggcccagattggggaatgggttggtagttgctgggtctctgctggtccagcgaaatcctatccggtcagttgttggacctggcacctacagtgaaatttcaccccaccccaccgcctgtaagattctatcttgggccctcatacgatctgtatcctccggacccatttcctccactctgcaaagcctgtctgcatttatccatcccccacccctctccctctttttatctctttttatatatccaatttcttattttacaa

SEQ ID NO: 693 - protein, 391 aa, Rattus norvegicus
  ref <308>: DATABASE ACCESSION NUMBER: Refseq / NP_112251
  ref <309>: DATABASE ENTRY DATE: 2003-01-13
MEDSQSDMSIELPLSQETFSCLWKLLPPDDILPTTATGSPNSMEDLFLPQDVAELLEGPEEALQVSAPAAQEPGTEAPAPVAPASATPWPLSSSVPSQKTYQGNYGFHLGFLQSGTAKSVMCTYSISLNKLFCQLAKTCPVQLWVTSTPPPGTRVRAMAIYKKSQHMTEVVRRWPHHERCSDGDGLAPPQHLIRVEGNPYAEYLDDRQTFRHSVVVPYEPPEVGSDYTTIHYKYMCNSSCMGGMNRRPILTIITLEDSSGNLLGRDSFEVRVCACPGRDRRTEEENFRKKEEHCPELPPGSAKRALPTSTSSSPQQKKKPLDGEYFTLKIRGRERFEMFRELNEALELKDARAAEESGDSRAHSSYPKTKKGQSTSRHKKPMIKKVGPDSD

SEQ ID NO: 694 - DNA, 2629 bp, Homo sapiens
  ref <308>: DATABASE ACCESSION NUMBER: Refseq / NM_000546
  ref <309>: DATABASE ENTRY DATE: 2000-10-31
acttgtcatggcgactgtccagctttgtgccaggagcctcgcaggggttgatgggattggggttttcccctcccatgtgctcaagactggcgctaaaagttttgagcttctcaaaagtctagagccaccgtccagggagcaggtagctgctgggctccggggacactttgcgttcgggctgggagcgtgctttccacgacggtgacacgcttccctggattggcagccagactgccttccgggtcactgccatggaggagccgcagtcagatcctagcgtcgagccccctctgagtcaggaaacattttcagacctatggaaactacttcctgaaaacaacgttctgtcccccttgccgtcccaagcaatggatgatttgatgctgtccccggacgatattgaacaatggttcactgaagacccaggtccagatgaagctcccagaatgccagaggctgctccccgcgtggcccctgcaccagcagctcctacaccggcggcccctgcaccagccccctcctggcccctgtcatcttctgtcccttcccagaaaacctaccagggcagctacggtttccgtctgggcttcttgcattctgggacagccaagtctgtgacttgcacgtactcccctgccctcaacaagatgttttgccaactggccaagacctgccctgtgcagctgtgggttgattccacacccccgcccggcacccgcgtccgcgccatggccatctacaagcagtcacagcacatgacggaggttgtgaggcgctgcccccaccatgagcgctgctcagatagcgatggtctggcccctcctcagcatcttatccgagtggaaggaaatttgcgtgtggagtatttggatgacagaaacacttttcgacatagtgtggtggtgccctatgagccgcctgaggttggctctgactgtaccaccatccactacaactacatgtgtaacagttcctgcatgggcggcatgaaccggaggcccatcctcaccatcatcacactggaagactccagtggtaatctactgggacggaacagctttgaggtgcgtgtttgtgcctgtcctgggagagaccggcgcacagaggaagagaatctccgcaagaaaggggagcctcaccacgagctgcccccagggagcactaagcgagcactgcccaacaacaccagctcctctccccagccaaagaagaaaccactggatggagaatatttcacccttcagatccgtgggcgtgagcgcttcgagatgttccgagagctgaatgaggccttggaactcaaggatgcccaggctgggaaggagccaggggggagcagggctcactccagccacctgaagtccaaaaagggtcagtctacctcccgccataaaaaactcatgttcaagacagaagggcctgactcagactgacattctccacttcttgttccccactgacagcctcccacccccatctctccctcccctgccattttgggttttgggtctttgaacccttgcttgcaataggtgtgcgtcagaagcacccaggacttccatttgctttgtcccggggctccactgaacaagttggcctgcactggtgttttgttgtggggaggaggatggggagtaggacataccagcttagattttaaggtttttactgtgagggatgtttgggagatgtaagaaatgttcttgcagttaagggttagtttacaatcagccacattctaggtaggtaggggcccacttcaccgtactaaccagggaagctgtccctcatgttgaattttctctaacttcaaggcccatatctgtgaaatgctggcatttgcacctacctcacagagtgcattgtgagggttaatgaaataatgtacatctggccttgaaaccaccttttattacatggggtctaaaacttgacccccttgagggtgcctgttccctctccctctccctgttggctggtgggttggtagtttctacagttgggcagctggttaggtagagggagttgtcaagtcttgctggcccagccaaaccctgtctgacaacctcttggtcgaccttagtacctaaaaggaaatctcaccccatcccacaccctggaggatttcatctcttgtatatgatgatctggatccaccaagacttgttttatgctcagggtcaatttcttttttcttttttttttttttttttctttttctttgagactgggtctcgctttgttgcccaggctggagtggagtggcgtgatcttggcttactgcagcctttgcctccccggctcgagcagtcctgcctcagcctccggagtagctgggaccacaggttcatgccaccatggccagccaacttttgcatgttttgtagagatggggtctcacagtgttgcccaggctggtctcaaactcctgggctcaggcgatccacctgtctcagcctcccagagtgctgggattacaattgtgagccaccacgtggagctggaagggtcaacatcttttacattctgcaagcacatctgcattttcaccccacccttcccctccttctccctttttatatcccatttttatatcgatctcttattttacaataaaactttgctgcca

SEQ ID NO: 695 - protein, 393 aa, Homo sapiens [sequence omitted]

SEQ ID NO: 696 - DNA, 6060 bp, Rattus norvegicus
  ref <308>: DATABASE ACCESSION NUMBER: Refseq / NM_013194
  ref <309>: DATABASE ENTRY DATE: 2003-01-14
tcctggctataagtcaccatggcccagcaggctgcagacaagtacctctatgtggataaaaacttcatcaataacccgctggcccaggccgactgcggtgccaagaagctggtatgggtgccttccaccaagaatggctttgaaccagccagccttaaggaggaggtgggagaagaggccattgtggagctggtggagaatgggaagaaggtgaaggtgaacaaggatgatatccagaagatgaacccacccaagttctccaaggtggaggacatggcagagctcacgtgcctcaacgaagcctcggtgctgcacaacctcaaggagcgatactactcagggctcatctatacctattcaggcctgttctgtgtggtcattaatccttataagaacctgcctatctactcagaggagatcgtggacatgtacaagggcaagaagaggcacgagatgccgccccacatctatgccatcacagacactgcctacaggagcatgatgcaggaccgagaagatcagtccatcctttgcacgggtgagtctggagcaggcaagacagagaacaccaagaaagtcattcagtacctggcacatgtggcctcctcacacaagagcaagaaggaccagggggagctggagcgccaactgctgcaggccaaccctatcctagaggcctttggaaacgccaagacggtgaagaatgacaactcttcacgatttggtaaattcattcgtatcaactttgatgtcaacggctacatcgttggggccaacattgagacttatcttctggagaaatctcgtgctatccgccaagccaaggaggaaagaaccttccacattttttactacctgctgtctggggccggagagcacctgaagactgatctcctgttggagccatacaataaataccgcttcctgtccaacgggcatgtcaccatcccagggcagcaggacaaggacatgttccaggagacaatggaggccatgaggattatgggtatcccagaggatgagcagatgggcttgctgcgggtcatctctggcgtccttcagcttggcaacattgtcttcaagaaggaacggaacactgaccaggcgtccatgccagataacacagctgctcaaaaggtgtcccacctcctggggatcaatgtgaccgacttcaccagaggcatccttaccccgcgcatcaaggtgggcagagactatgtgcagaaggcacagactaaagagcaggctgactttgccatcgaggctttggccaaggctacctacgagcggatgttccgctggctggtgcttcgcattaacaaagctctggacaagaccaagaggcagggcgcctcatttatcgggatcctggacatcgctggcttcgagatctttgatctgaactccttcgagcaactttgcatcaactataccaacgagaagctgcagcagctgttcaaccacaccatgttcatcctggagcaggaggagtaccagcgagagggcatcgagtggaacttcatcgactttggccttgacctgcagccttgcatcgacctcattgagaagccggcgggtcccccaggcatcctggccctgttagatgaggaatgttggttccctaaagccactgacaagagcttcgtggagaaggtggtgcaggagcagggcacccaccccaagttccagaagcccaagcaactgaaggacaaggctgatttctgcatcatccactatgcaggcaaggtggactataaggccgatgagtggctgatgaagaacatggaccctctgaacgacaacattgccaccctgcttcaccagtcctcagacaagtttgtctctgagctgtggaaggatgtggatcgaatcattggcttggaccaggtggctggaatgtctgagacagcgctacccggtgccttcaagactcggaagggcatgttccgtactgtggggcagctgtacaaggagcagctggccaagctcatggccacactgaggaataccaaccccaactttgtctgctgcatcattcccaaccacgagaagaaggccggcaaactggacccacacctggtgctggaccagttacgctgcaatggcgtccttgaaggcatccgaatctgccgccagggctttcccaacagagtggtcttccaggagttccggcagaggtatgagatcctcacacctaactccattccgaagggcttcatggatgggaagcaggcgtgtgtgctcatgatcaaagccttggagcttgacagcaacctgtaccgcatcggccagagcaaagtgttcttccgttccggagtcctagctcacctggaggaagagcgggacctgaagatcactgatgtcatcattggcttccaggcctgctgcagaggctacctggccaggaaggcctttgccaagaggcagcagcagctgactgccatgaaggtcctacagaggaactgtgctgcatacctcagactccggaactggcagtggtggaggctcttcaccaaggtcaagcccctgctgaactcaataaggcatgaggatgagcttttagccaaggaggcggaactgacaaaagttcgagagaagcatctggctgcagagaacaggctgacagagatggagactatgcagtctcagctcatggcagagaagttgcagcttcaggagcagctgcaggcgaaaaccgagttgtgtgctgaggctgaggagctccgggcccgcctgacagcgaagaagcaggagttggaggagatctgccatgacctggaggccagggtagaggaggaggaggagcgctgccagtatctgcaggcagagaagaagaagatgcagcagaacatccaggaactcgaggagcagctggaggaggaggagagtgcccggcagaagctgcagcttgagaaggtgaccactgaggccaagctgaagaaactggaggaggaccagatcatcatggaggatcaaaactgcaaactggccaaggagaagaagctgctggaagacagagtagctgaatttactacagacctcatggaagaggaggagaagtccaagagcctggccaagctcaagaacaagcatgaggcgatgatcaccgacctggaagagcgccttcgtagggaggagaagcaaaggcaggagttggagaagacccgccgcaagctagagggagactccacagacctcagcgaccagattgctgagctccaggcgcagatcgcagagctcaagatgcagctggccaagaaggaggaggaattgcaggctgccttggccagagtggaagaagaagctgctcagaagaacatggccctgaagaagattcgagaactggaaactcagatctctgagctgcaggaagacctggagtcggagcgtgcctgcaggaacaaagctgagaagcagaaacgggatcttggagaagagctagaggctctgaagacagagctggaggacactctggactccaccgctgcccagcaggaactgaggtcaaagcgtgagcaggaagtgagcatcctgaagaagactcttgaggatgaggccaagacccatgaggcccagatccaggagatgaggcagaagcactcgcaggccgtggaggagctggccgagcaattggagcagactaagcgggtaaaagctacccttgagaaggctaagcagaccctggagaatgagcggggagagctggccaatgaggtgaaggccttgctgcagggcaagggcgactcggagcacaagcgcaagaaggtggaggcgcagctgcaagaactgcaggtcaagttcagcgagggagagcgtgtacggaccgagctggctgacaaggtctccaagctgcaggttgaactggacagcgtgaccggtctccttaaccagtcggacagcaagtccagcaagcttacaaaggacttctctgcgctggagtcccagctccaggacacacaggagctgctccaggaggagaaccggcagaagctgagcctcagcaccaagctcaagcagatggaggatgagaaaaactccttcagagagcagctggaggaggaagaggaggaggccaagcgcaacctggagaagcagatcgccaccctccatgcccaggtgactgatatgaagaagaagatggaggacggtgtagggtgcctggagacagcagaggaggcaaagcggaggcttcagaaggacctggaaggcctgagccagcggcttgaggagaaggtggctgcctatgataagctggagaagaccaagacccggcttcagcaggagctggatgacctgctggtggacctggaccaccagcggcagagcgtctccaacctggaaaagaagcagaagaagtttgaccagctcctagctgaggagaagaccatctcagccaagtatgctgaggagcgagaccgagctgaagctgaggcccgtgagaaggagacaaaggcactgtcactggcccgagcacttgaggaggccatggagcagaaggcagagctagaacggctcaacaagcagttccgcacggagatggaggacctcatgagctccaaggatgacgtgggcaagagtgtccatgagctggagaagtccaacagggcattggagcagcaggtcgaggagatgaagacccagctggaggagctggaggatgagcttcaggccactgaggatgccaagctccgtctggaggtgaacctgcaggccatgaaggcccagtttgagcgggatctgcagggccgggatgaacagagcgaggagaagaagaagcagctggtcagacaggtgcgggagatggaggcggagctggaggatgagaggaagcagcggtccattgccatggctgctcgcaagaaactagagatggatctgaaggacctggaggctcacatagacacagccaacaagaaccgggaggaggccatcaaacagctacggaagcttcaggcccagatgaaggactgcatgcgggacgtggacgacacgcgagcctcccgggaggagatcctggcccaggccaaggagaatgagaagaagctcaagagcatggaggccgagatgattcagctgcaggaggaactggcagccgccgagcgtgctaaacgccaggcccagcaggagcgggatgagctggccgatgagatcgccaacagcagtggcaaaggggccctagcattggaggagaagcggcgactagaggccctcattgccctgctggaggaagagctggaggaggagcagggcaacacagaactgatcaacgaccggctgaagaaggccaatctgcagatcgaccaaataaacaccgacctgaacctggagcgcagccacgcccagaagaacgagaatgcgcggcagcagctggaacgccagaacaaggagctcaaggccaagctgcaggagatggagagtgctgtcaagtccaaatacaaggcctccatcgctgccttggaggccaagattgcacagctggaggagcagctggacaacgagaccaaggagcgccaggcagcctccaagcaggtgcgccgggcggagaagaagctgaaggatgtgctgctgcaagtggaagacgagcggaggaacgcggagcagttcaaggaccaggccgacaaggcatccactcgcctgaagcagcttaagcggcagctagaggaggccgaggaggaggcccagcgggccaatgcctcccgccggaagctgcagcgtgagctggaggatgccacagagactgccgatgctatgaaccgagaggtcagctccctgaagaacaaactgaggcgtggggacatgccatttgttgtgacccgccgaattgtccggaaaggcactggcgactgctcagacgaggaggtcgacggtaaagcagacggggctgatgccaaggcgaccgagtagggacttctgctacccaagacggatggacagacggctccacctcccttccccagccctccacacccctgccttgagactgctctgcccatgcccctcttcctcccaggccttcttgagggcattggcttcctctgctgcatccccttccagctccct

SEQ ID NO: 697 - protein, 1961 aa, Rattus norvegicus
  ref <308>: DATABASE ACCESSION NUMBER: Refseq / NP_037326
  ref <309>: DATABASE ENTRY DATE: 2003-01-14
MAQQAADKYLYVDKNFINNPLAQADCGAKKLVWVPSTKNGFEPASLKEEVGEEAIVELVENGKKVKVNKDDIQKMNPPKFSKVEDMAELTCLNEASVLHNLKERYYSGLIYTYSGLFCVVINPYKNLPIYSEEIVDMYKGKKRHEMPPHIYAITDTAYRSMMQDREDQSILCTGESGAGKTENTKKVIQYLAHVASSHKSKKDQGELERQLLQANPILEAFGNAKTVKNDNSSRFGKFIRINFDVNGYIVGANIETYLLEKSRAIRQAKEERTFHIFYYLLSGAGEHLKTDLLLEPYNKYRFLSNGHVTIPGQQDKDMFQETMEAMRIMGIPEDEQMGLLRVISGVLQLGNIVFKKERNTDQASMPDNTAAQKVSHLLGINVTDFTRGILTPRIKVGRDYVQKAQTKEQADFAIEALAKATYERMFRWLVLRINKALDKTKRQGASFIGILDIAGFEIFDLNSFEQLCINYTNEKLQQLFNHTMFILEQEEYQREGIEWNFIDFGLDLQPCIDLIEKPAGPPGILALLDEECWFPKATDKSFVEKVVQEQGTHPKFQKPKQLKDKADFCIIHYAGKVDYKADEWLMKNMDPLNDNIATLLHQSSDKFVSELWKDVDRIIGLDQVAGMSETALPGAFKTRKGMFRTVGQLYKEQLAKLMATLRNTNPNFVCCIIPNHEKKAGKLDPHLVLDQLRCNGVLEGIRICRQGFPNRVVFQEFRQRYEILTPNSIPKGFMDGKQACVLMIKALELDSNLYRIGQSKVFFRSGVLAHLEEERDLKITDVIIGFQACCRGYLARKAFAKRQQQLTAMKVLQRNCAAYLRLRNWQWWRLFTKVKPLLNSIRHEDELLAKEAELTKVREKHLAAENRLTEMETMQSQLMAEKLQLQEQLQAKTELCAEAEELRARLTAKKQELEEICHDLEARVEEEEERCQYLQAEKKKMQQNIQELEEQLEEEESARQKLQLEKVTTEAKLKKLEEDQIIMEDQNCKLAKEKKLLEDRVAEFTTDLMEEEEKSKSLAKLKNKHEAMITDLEERLRREEKQRQELEKTRRKLEGDSTDLSDQIAELQAQIAELKMQLAKKEEELQAALARVEEEAAQKNMALKKIRELETQISELQEDLESERACRNKAEKQKRDLGEELEALKTELEDTLDSTAAQQELRSKREQEVSILKKTLEDEAKTHEAQIQEMRQKHSQAVEELAEQLEQTKRVKATLEKAKQTLENERGELANEVKALLQGKGDSEHKRKKVEAQLQELQVKFSEGERVRTELADKVSKLQVELDSVTGLLNQSDSKSSKLTKDFSALESQLQDTQELLQEENRQKLSLSTKLKQMEDEKNSFREQLEEEEEEAKRNLEKQIATLHAQVTDMKKKMEDGVGCLETAEEAKRRLQKDLEGLSQRLEEKVAAYDKLEKTKTRLQQELDDLLVDLDHQRQSVSNLEKKQKKFDQLLAEEKTISAKYAEERDRAEAEAREKETKALSLARALEEAMEQKAELERLNKQFRTEMEDLMSSKDDVGKSVHELEKSNRALEQQVEEMKTQLEELEDELQATEDAKLRLEVNLQAMKAQFERDLQGRDEQSEEKKKQLVRQVREMEAELEDERKQRSIAMAARKKLEMDLKDLEAHIDTANKNREEAIKQLRKLQAQMKDCMRDVDDTRASREEILAQAKENEKKLKSMEAEMIQLQEELAAAERAKRQAQQERDELADEIANSSGKGALALEEKRRLEALIALLEEELEEEQGNTELINDRLKKANLQIDQINTDLNLERSHAQKNENARQQLERQNKELKAKLQEMESAVKSKYKASIAALEAKIAQLEEQLDNETKERQAASKQVRRAEKKLKDVLLQVEDERRNAEQFKDQADKASTRLKQLKRQLEEAEEEAQRANASRRKLQRELEDATETADAMNREVSSLKNKLRRGDMPFVVTRRIVRKGTGDCSDEEVDGKADGADAKATE

SEQ ID NO: 698 - DNA, 282 bp, Homo sapiens
  ref <308>: DATABASE ACCESSION NUMBER: EMBL / BF812653
  ref <309>: DATABASE ENTRY DATE: 2001-08-31
ctcttgctctagggcccgcttggacttctccagctcgtggacactcttgcccacatcatccttgagctcataggtcctccatctccgtgcggaactgcttgttgagccgctccagctccgccttctgctccatggcttcctccaggtcccgggccagcgaggcaagatggagttagtgcaggtcctgaaacgcgggctgcagcagatcaccggccacggcggtctccgaggctatctacgggtttttttcaggacaaatgatgcgaaggttggtacattagt

SEQ ID NO: 699 - DNA, 1944 bp, Rattus norvegicus
  ref <308>: DATABASE ACCESSION NUMBER: Refseq / NM_019318
  ref <309>: DATABASE ENTRY DATE: 2003-01-14
gggcagggcggggggtgtgtgcacgctcgagctttcgggccacagccaccgccgcgcgagctagaagcgccctagcccggcaagctggctcacccgctggccgcccagcacagcccgctggcccctctcctgcagcccatctggcggagggcggcggcggtggcggaggcaggaggatggcttcagaactggcaatgaacaattccgacctgcccaccagtcccctggccatggaatatgttaatgacttcgatctgatgaagtttgaagtgaaaaaggaaccggtggagaccgaccgcatcatcagccagtgcggccgtctcatcgccgggggctcgctgtcctccacccccatgagcacgccctgcagctcggtgcccccgtcccccagcttctcggcgcccagcccggcctcgggcagcgaacagaaggcgcacctggaagactactactggatgaccggctacccgcagcagctcaacccggaggcgctgggcttcagcccggaggacgcagtcgaggcgctcatcagcaatagccaccagctccagggtggcttcgatggctatgcgcggggcgcgcagcagctggccgcggcagcgggggccggcgccggcgcctccctgggcggcagcggcgaggagatgggccccgccgccgccgtggtgtccgccgtgatcgccgcggccgccgcgcagagcggcggggcacctcactaccatcaccaccaccaccacgccacggggcaccaccaccacccgacggccggcgccccgggagccgcgggtagcgcgtccgcctctgcgagcggcgcgggtggcgcgggcggcggtggcccggccagcgccgggggcggcggcggcggcggcggcgggggcacggcgggggcggggggcgccctgcacccgcaccatgccgcgggaggcctgcacttcgacgaccgcttctcggacgagcagttggtgaccatgtcggtgcgtgagctgaaccggcagctgcgcggggtcagcaaggaggaggtgatccgactgaagcagaagaggcggaccctgaaaaaccgcggctatgcccagtcctgccgcttcaagagggtgcagcagagacacgtcctggagtcggagaagaaccagctgctgcagcaggtcgaccacctcaagcaggagatctccaggctggtgcgcgaaagggacgcctacaaggagaaatacgagaagttggtgagcagcgggttccgagaaaactgctcgagcagcgacaacccttcctctcccgaatttttcatgtgagtgtgacacgcgatcccagctagccaccttgttaaatgctccgtgggggtccggctcctgagtgggcttgccagtttgcagggccacgctcgccaccacctcgccccctcccctggcgagtttgctccccttggccctgcacgcacacacacacacacacacacacacacacacacacacacacacacacacacacacacatacacacacacacacacacagcaagcttgtggtggtggtggtggctcttttgagttggggagggaaagggtatctggctcatggattgccaacctgaattcccctgtaacttgctagcttggttgttttggtcttttttattattattattactctttttacaccgcctaccccacacataccctggacttgcacaagggtcaaagatctgagcaggatacttcatgtaggacataactcacctttgaacccggccatcaagcgcctgtatattttttttcttcttcttctttagttcatgagctggtgttcattctctgtgtgtgtgtttttttattttgtttggattttcttttttcttctttgtttttgtttattattactaatttttttggagcttgctgtgtttcccagcctctgccctccctccctctgcaccatgttcttgagataaaag

SEQ ID NO: 700 - protein, 369 aa, Rattus norvegicus
  ref <308>: DATABASE ACCESSION NUMBER: Refseq / NP_062191
  ref <309>: DATABASE ENTRY DATE: 2003-01-14
MASELAMNNSDLPTSPLAMEYVNDFDLMKFEVKKEPVETDRIISQCGRLIAGGSLSSTPMSTPCSSVPPSPSFSAPSPASGSEQKAHLEDYYWMTGYPQQLNPEALGFSPEDAVEALISNSHQLQGGFDGYARGAQQLAAAAGAGAGASLGGSGEEMGPAAAVVSAVIAAAAAQSGGAPHYHHHHHHATGHHHHPTAGAPGAAGSASASASGAGGAGGGGPASAGGGGGGGGGGTAGAGGALHPHHAAGGLHFDDRFSDEQLVTMSVRELNRQLRGVSKEEVIRLKQKRRTLKNRGYAQSCRFKRVQQRHVLESEKNQLLQQVDHLKQEISRLVRERDAYKEKYEKLVSSGFRENCSSSDNPSSPEFFM

SEQ ID NO: 701 - DNA, 2649 bp, Rattus norvegicus
  ref <308>: DATABASE ACCESSION NUMBER: EMBL / M36419
  ref <309>: DATABASE ENTRY DATE: 2000-03-04
atgcaaaagattatgcatatttctgtcctcctttctcctgttttatggggactgatttttggtgtctcttctaacagcatacagataggggggctatttccaaggggcgctgatcaagaatacagtgcatttcgggtagggatggttcagttttccacttcggagttcagactgacaccccatatcgacaatttggaggtagccaacagtttcgcagtcaccaatgctttctgctcccagttttcaagaggagtctacgcaatttttggattttatgacaagaagtctgtaaataccatcacatcattctgtgggacactccatgtgtccttcatcacacctagcttcccaacagatggcacacatccatttgtcatccagatgcgacctgacctcaaaggagcactccttagcttgattgagtactaccaatgggacaagttcgcatacctctatgacagtgacagaggcttatcaacactgcaagctgttctggattctgctgcagagaagaagtggcaggtgactgctatcaatgtggggaacatcaacaatgacaagaaagatgagacctacagatcgctctttcaagatctggagttaaaaaaagaacggcgtgtaatcctggactgtgaaagggataaagtaaatgacattgtggaccaggttattaccattggaaaacatgttaaagggtaccattatatcattgcaaatctgggattcactgatggggacctgctgaaaattcagtttggaggagcaaatgtctctggatttcagattgtagactacgatgattccctggtgtctaaatttatagaaagatggtcaacactggaagagaaagaataccctggagcacacacagcgacaattaagtatacttcggccctgacgtatgatgctgtccaagtgatgactgaagcattccgtaaccttcggaagcagaggattgaaatatcccggagaggaaatgcaggggattgtttggccaacccagctgtgccctggggacaaggggtcgaaatagaaagggccctcaagcaggttcaagttgaaggcctctctggaaatataaagtttgaccagaatggaaaacgaataaactacacaattaacatcatggagctcaaaacaaatggaccccggaagattgggtactggagtgaagtggataaaatggttgtcaccctaactgagctcccatcaggaaatgacacgtctgggcttgaaaacaagactgtggtggtcaccacaatattggaatctccatatgttatgatgaagaaaaatcatgaaatgcttgaagggaatgagcgttacgagggctactgtgttgacttagctgcagaaattgccaaacactgtgggttcaagtacaagctgactattgttggggatggcaagtatggggccagggatgccgacaccaaaatttggaatggtatggttggagagcttgtctacgggaaagctgacattgcaattgctccattaactatcactctcgtgagagaagaggtgattgacttctccaagcccttcatgagtcttggaatctctatcatgatcaagaagcctcagaagtccaaaccaggagtgttttcctttcttgatcctttagcctatgagatctggatgtgcattgtgtttgcctacattggggtcagtgtagttttattcctggtcagcagatttagcccctacgagtggcacactgaggaatttgaagatggaagagaaacacaaagtagtgaatcaactaatgaatttgggatttttaatagtctctggttttccttgggtgcctttatgcggcagggatgcgatatttcgccaagatccctctctgggcgcattgttggaggtgtgtggtggttctttaccctgatcataatctcctcctacacggctaacttagctgccttcctgactgtagagaggatggtgtctcccatcgaaagtgctgaggatctgtctaagcaaacagaaattgcttatggaacattagactctggctccactaaagagtttttcaggagatctaaaatcgcagtgtttgataaaatgtggacttatatgaggagtgcagagccctctgtgtttgtgaggactaccgcagaaggagtagccagagtccggaaatccaaaggaaagtatgcctacttgctggagtccacaatgaacgagtacatcgagcagaggaagccttgtgacaccatgaaagtgggaggaaacttggattccaaaggctacggcatcgccacacctaaaggatcctcattaggaaatgcggttaacctcgcagtactaaaactgaatgaacaaggcctgttggacaaattgaaaaacaaatggtggtacgacaaaggagagtgcggcagcgggggaggtgattccaaggaaaagaccagtgccctcagtctgagcaacgttgctggagtattctacatccttgtcgggggccttggtttggcaatgctggtggctttgattgagttctgttacaagtcaagggccgaggcgaaacgaatgaaggtggcaaagaatccacagaatattaacccatcttcctcgcagaattcccagaattttgcaacttataaggaaggttacaacgtatatggcatcgagagtgttaaaatt

SEQ ID NO: 702 - DNA, 635 bp, Rattus norvegicus
  misc_feature (1)..(635): n=a, c, g or t
  ref <308>: DATABASE ACCESSION NUMBER: EMBL / AA893188
  ref <309>: DATABASE ENTRY DATE: 2000-03-03
cctgttgaaaacttccgtgtcntagtaagacagaagattgccagctttgaggaagcgagtctccagctaatgagtcacattgaacagtttttggataccaatgaaacactgtattttatgaaaagtatggactgcatcaaagctctccgggaggaagccattcagttttcagaagagcagcgtttcaacagtttcctggaaggccttcgagagaaagtggaaattaaacaattaaatcatttctgggaaattgtcgtgcaggatggaattactctgatcaccaaagacgaaagcccaggaagctctgtcacagctgaggaggccacgaagttcctgacccccaaagacaaagcaaaagaagacacaacaggacttgaagaaggtggtgatgtggatgatttactggacatgatatagatcatggatgcgtggggaatccaggagtaccagctccgtgttgctgagagctccgacaccatccctgaggccgtgcagggggacatgaagctctggccatcatcctagcagacaacttgggagtgagtcactccaggtccctacagacatatattacatggaataacttagaccctattcaaatttataaagagccattattttctgattggtatatc

SEQ ID NO: 703 - DNA, 2519 bp, Rattus norvegicus
  ref <308>: DATABASE ACCESSION NUMBER: Refseq / NM_017259
  ref <309>: DATABASE ENTRY DATE: 2002-11-05
agagcccgtgaggcggccggaccatcatcgtcctgctaatacagctacttcctcaaccaccggtatgagccacgggaagagaaccgacatgctcccggagatcgccgccgccgtaggtttcctcaccagtctcctgaggactcggggctgcgtgagcgagcagagactcaaggttttcagtagggcgctccaggacgcactgaccgatcattacaaacaccactggtttccagaaaagccatccaagggctccggctatcgctgtatccgcatcaaccacaagatggaccccatcatcagcaaggtggccagccagatcggactcagccagccccagctgcaccagctcctgcccagcgagctgaccctgtgggtcgatccctacgaagtgtcctaccgcatcggggaagatggatccatctgcgtgctgtatgaggaggcgccggtggccacctcctacgggctcctcacctgcaagaaccagatgatgctgggcaggagcagtccatcgaagaactacgtgatgactgtctccagctagagaggagccgccccgccctggcactctactgttctcatgctgccctgacaacaggccaccgtatacctcaacctggggaactgtatttttaaagtgaagagctatttatacatgttatttttttttttaagaaaagaggaggaaaaaaaccaaaagtttttttttaaaaaaacaaaaaagaaaaaacaattcgttaacgggagctgcttggaagtggtctccccaggtgcctttggagagaactgttcttgattgagtctatgagccagtgtttgcctaggggagtgggttggggattggcctagccaaggtaaaaggggattcttggctgatcccccaggaggtggtggaagggagcaaggttagcaactgtgaacgagaggggtcagggtctgctctgggttaccgttcccgctgggatgcctgtattcctggtccctctcttactcaggggcattcaagcctggtctcaaataatactacattgcctaatcttctcttttgtttttctgctgagatcctgggcacacggaaaggcctctcctgtcccttccgtctgagcagagtttcttgaaactgtgtctcgtttctgatcctaccctcggggtcctgaagaggtggtttcccggcctagaatctatctaaacgtttttggagggtgggctataaggcagatataatggaggggaaccgcacaaaccctttgctttgctctgtgctgctttgtatggatggatggttaataacttagggatgatttgcaatggaattttgggacccaaagagtatccaatgggggtgggtgttttggacctaagccctccttttgggaaccacgtgacagtctgaatgctgctaccattattcctttgagaggtggctcaaagctccagggaactccaggtcctttcttactgccttctcttcaagagcaacctcccccatttcttttccctctttcctgcggttgggtcctggagggccccatttcctaggacaagagttctcaatcactgtgcaatagtcccaggaagctctggaactgggcctcccagcccctcctgattcctggtgggttttaggaccccgccttccccgttcttctgactggctggtgggccttgaggagatctccctcggccgcagggagggcacctgtgcactgcaggactacctggtactcctgtggggctgccacggagagccaaaccttaggcatagctttgtctcctcggtgctcagagcacctgcagggggaggttgcccccctcagtaaaaatccaaatttatttgtagatgtgtgcaatatttactgttctgggttggagaaaatcgggaaacactgggaagaagtggccttccttcaggttcagtgacactgatgagggcttctcagaaggcctcgagtctctcaaaccaaaggacagagctagagccagccagtcacccttagtgaggatccccttccccatgtctctccactgccgtggcatcccatgtcctggatttctcaattcctcagtttctactcaaaggtgctacttaccaaacactctgcccgtcccgctctccccagcttcgcacagccgtcccaggtggcttcgtctctcctgctttaaagttaactttgggcccacagacccgagagctgtgggttgaagcaaagctgtgaatcgctccagatggtccctgtgttctgtccacacacaggtccccgcctttttagaagcagcctcctggtctcatgcttaaatctgttcctcactgcccgtgttcactttagaaatggcagaaccacagagctggactgttgagcaggcctgtctctctcattaaatagaaataagtaagtttgtaagctattccgacagaagagacaaaggttactgattgtacaatagcgcttttatatggaagactgtacagctttatggacaaatgtaaaacttttttgtttttaataaaaatgtagcagacc

SEQ ID NO: 704 - protein, 158 aa, Rattus norvegicus
  ref <308>: DATABASE ACCESSION NUMBER: Refseq / NP_058955
  ref <309>: DATABASE ENTRY DATE: 2002-11-05
MSHGKRTDMLPEIAAAVGFLTSLLRTRGCVSEQRLKVFSRALQDALTDHYKHHWFPEKPSKGSGYRCIRINHKMDPIISKVASQIGLSQPQLHQLLPSELTLWVDPYEVSYRIGEDGSICVLYEEAPVATSYGLLTCKNQMMLGRSSPSKNYVMTVSS

SEQ ID NO: 705 - DNA, 2717 bp, Homo sapiens
  ref <308>: DATABASE ACCESSION NUMBER: Refseq / NM_006763
  ref <309>: DATABASE ENTRY DATE: 2003-03-06
cagggtaacgctgtcttgtggacccgcacttcccacccgagacctctcactgagcccgagccgcgcgcgacatgagccacgggaagggaaccgacatgctcccggagatcgccgccgccgtgggcttcctctccagcctcctgaggacccggggctgcgtgagcgagcagaggcttaaggtcttcagcggggcgctccaggaggcactcacagagcactacaaacaccactggtttcccgaaaagccgtccaagggctccggctaccgctgcattcgcatcaaccacaagatggaccccatcatcagcagggtggccagccagatcggactcagccagccccagctgcaccagctgctgcccagcgagctgaccctgtgggtggacccctatgaggtgtcctaccgcattggggaggacggctccatctgcgtcttgtacgaggaggccccactggccgcctcctgtgggctcctcacctgcaagaaccaagtgctgctgggccggagcagcccctccaagaactacgtgatggcagtctccagctaggcccttccgcccccgccctgggcgccgccgtgctcatgctgccgtgacaacaggccaccacatacctcaacctggggaactgtatttttaaatgaagagctatttatatatattatttttttttaagaaaggaggaaaagaaaccaaaagttttttttaagaaaaaaaatccttcaagggagctgcttggaagtggcctccccaggtgcctttggagagaactgttgcgtgcttgagtctgtgagccagtgtctgcctataggagggggagctgttagggggtagacctagccaaggagaagtgggagacgtttggctagcaccccaggaagatgtgagagggagcaagcaaggttagcaactgtgaacagagaggtcgggatttgccctgggggaggaagagaggccaagttcagagctctctgtctcccccagccagacacctgcatccctggctcctctattactcaggggcattcatgcctggacttaaacaatactatgttatcttttcttttatttttctaatgaggtcctgggcagagagtgaaaaggcctctcctgattcctactgtcctaagctgcttttcttgaaatcatgacttgtttctaattctaccctcaggggcctgtagatgttgctttccagccaggaatctaaagctttgggttttctgagggggggaggagggaactggaggttattggggttaggatggaagggaactctgcacaaaacctttgctttgctagtgctgctttgtgtgtatgtgtggcaaataatttgggggtgatttgcaatgaaattttgggacccaaagagtatccactggggatgttttttggccaaaactcttccttttggaaccacatgaaagtcttgatgctgctgccatgatccctttgagaggtggctcaaaagctacagggaactccaggtcctttattactgccttcttttcaaaagcacaactctcctctaaccctcccctcccccttcccttctggtcgggtcatagagctaccgtattttctaggacaagagttctcagtcactgtgcaatatgccccctgggtcccaggagggtctggaggaaaactggctatcagaacctcctgatgccctggtgggcttagggaaccatctctcctgctctccttgggatgatggctggctagtcagccttgcatgtattccttggctgaatgggagagtgccccatgttctgcaagactacttggtattcttgtagggccgacactaaataaaagccaaaccttgggcactgttttttctccctggtgctcagagcacctgtgggaaaggttgctgtctgtctcagtacaatccaaatttgtcgtagacttgtgcaatatatactgttgtgggttggagaaaagtggaaagctacactgggaagaaactcccttccttcaatttctcagtgacattgatgaggggtcctcaaaagacctcgagtttcccaaaccgaatcaccttaagaaggacagggctagggcatttggccaggatggccaccctcctgctgttgccccttagtgaggaatcttcaccccacttcctctacccccaggttctcctccccacagccagtcccctttcctggatttctaaactgctcaattttgactcaaaggtgctatttaccaaacactctccctacccattcctgccagctctgcctccttttcaactctccacattttgtattgccttcccagacctgcttccagtctttattgctttaaagttcactttgggcccacagacccaagagctaattttctggtttgtgggttgaaacaaagctgtgaatcactgcaggctgtgttcttgcatcttgtctgcaaacaggtccctgcctttttagaagcagcctcatggtctcatgcttaatcttgtctctcttctcttctttatgatgttcactttaaaaacaacaaaacccctgagctggactgttgagcaggcctgtctctcctattaagtaaaaataaatagtagtagtatgtttgtaagctattctgacagaaaagacaaaggttactaattgtatgatagtgtttttatatggaagaatgtacagcttatggacaaatgtacacctttttgttactttaataaaaatgtagtaggataaaaaaaaa

SEQ ID NO: 706 - protein, 158 aa, Homo sapiens
  ref <308>: DATABASE ACCESSION NUMBER: Refseq / NP_006754
  ref <309>: DATABASE ENTRY DATE: 2003-03-06
MSHGKGTDMLPEIAAAVGFLSSLLRTRGCVSEQRLKVFSGALQEALTEHYKHHWFPEKPSKGSGYRCIRINHKMDPIISRVASQIGLSQPQLHQLLPSELTLWVDPYEVSYRIGEDGSICVLYEEAPLAASCGLLTCKNQVLLGRSSPSKNYVMAVSS

SEQ ID NO: 707 - DNA, 579 bp, Rattus norvegicus
  ref <308>: DATABASE ACCESSION NUMBER: EMBL / AA944361
  ref <309>: DATABASE ENTRY DATE: 2000-03-03
tggggactcttggagagtcaggagctcagaagcccttaagattgtcagatgttttactaatagatcacccttgctagataggttctagcaattcccttaggggagtgtggtggccataggccctcttgactttcagaaagcctgaaccccagtgattggtaactttcactctattcctagtgaagccttgtgaccctcttcctgaagtctgtcccctaatgacagggagctagctgcagtggccctgccctacaggtgtggccaggcacaccagctggagaggcggtactgggtactgtaggatctgcactgatgaccttgcagaggaggctctttgctgcaccactgttgtgtcaggtgcttcaagtgctgctgtcagtccccagccttatacctgcccagcctgggcctttgcttctgtccactctggtgtcgagtgtcgctacactccacttactgagggccatccggacctcttttgtctttctcttgcccctgccctgtcagtctgtggctgggggtgcttttactgtgaatccagtgttcacatttaccacaatttccttggcaccaatcatg

SEQ ID NO: 708 - DNA, 502 bp, Rattus norvegicus
  ref <308>: DATABASE ACCESSION NUMBER: EMBL / M89646
  ref <309>: DATABASE ENTRY DATE: 2000-03-04
cggatggttaccgtgtcattcatgatggctacggtgcccatccggaccaggaagttcatgacaaaccgtctgcttcagaggaaacagatggtcattgatgtccttcatcctgggaaggccacagtaccaaagacagaaattcgggaaaagctggccaagatgtacaaaaccacaccagatgtcatctttgtatttggattcagaacccactttggtggaggcaagacaactggctttggcatgatctatgattctttagattatgcaaagaagaatgagcctaaacacagacttgcgagacatggcctttatgagaagaaaaagacctcccgcaaacagcgaaaagaacgaaagaacagaatgaagaaggtcagggggactgcaaaggccaatgttggtgctggcaaaaagccaaaggagtagttctacggtgacttgatgttctgctgtgatatcgaaatttctgagggtaaaataaactaaaaaacgttctgcgagtctg

SEQ ID NO: 709 - DNA, 2018 bp, Rattus norvegicus
  ref <308>: DATABASE ACCESSION NUMBER: Refseq / NM_017333
  ref <309>: DATABASE ENTRY DATE: 2002-11-05
ccccgagcgaactgctgaggatccgctgtctggcattctctcagccttttgtccgagccagagctgcattcagaggagagaggcccgctaaggagcagctggactcctgctgcgagccgaaagccccctaaggcagttgaggacctgggaaggaggctccctgctggtggcgcttctcctggtgcttccaatccgtgcgagactgaaaacggcggagcggctacgggactctcacaggagcaagctgcaacatgcaatcgtccgcaagccggtgcggacgcgccttggtggcgctgctgctggcctgtggcttgttgggggtatggggagagaaaagaggattcccacctgcccaggccacaccatctcttctcgggactaaagaagttatgacgccacccactaagacctcctggactagaggttccaactccagtctgatgcgttcctccgcacctgcggaggtgaccaaaggagggagggtggctggagtcccgccaagatccttccctcctccgtgccaacgaaaaattgagatcaacaagacttttaaatacatcaacacgattgtatcatgcctcgtgttcgtgctaggcatcatcgggaactccacactgctaagaatcatctacaagaacaagtgcatgagaaatggtcccaatatcttgatcgccagcctggctctgggagatctgctacacatcatcatcgacattcccattaatgcctacaagctgctggcaggggactggccatttggagctgagatgtgcaagctggtgcccttcatacagaaggcttctgtggggatcacagtgttgagtctatgtgctctaagtattgacagatatcgagctgttgcttcttggagtcgaattaaaggaattggggttccaaaatggacagcagtagaaattgttttaatttgggtggtctctgtggttctggctgtccctgaagccataggttttgatgtgattacgtcggactacaaaggaaagcccctaagggtctgcatgcttaatccctttcagaaaacagccttcatgcagttttacaagacagccaaagactggtggctgttcagtttctacttctgcttgccgctagccatcactgcgatcttttacaccctaatgacctgtgagatgctcagaaagaaaagtggtatgcagattgccttgaatgaccacttaaagcagagacgagaagtggccaagacagtattctgcctggtcctcgtgtttgccctctgttggcttccccttcacctcagcaggattctgaagctcaccctttatgaccagagcaatcctcagaggtgtgaacttctgagttttttgctggttttggactacattggtatcaacatggcttctttgaattcctgcattaatccaatcgctctgtatttggtgagcaagagattcaaaaactgctttaagtcgtgtttgtgctgctggtgccaaacgtttgaggaaaaacagtccttagaggagaagcaatcctgcttgaagttcaaagctaacgatcacggatacgacaacttccgctccagcaataaatacagctcatcttgaaggaaggaacactcactgaatctcattgtcctcatcgtggacagatagcattaaaacaaaatgaaacctttgccaaacccaaacggaaaaccgtgcttgcggaaaggtgtgcacgcatgggagagggattgttttttaaccgttctaactttccacacctgatatttcacgggctgtttacaacctaagaaagccatgggaatgaatgaagcctcgggaaagcacttagattcttagtcagcacttcagcacggctcttaaaagccctcactgcactcacagcccacttacatttaaaaacaagaactcaaactctattcaggggtttattatccagtcctatgaatctggatacaggaatgcatgacattgcaaaacaattcttaaagcaaagtttcaattgctcgatttgagacaaaaaacaaaacaaaaaaaaaa

SEQ ID NO: 710 - protein, 442 aa, Rattus norvegicus
  ref <308>: DATABASE ACCESSION NUMBER: Refseq / NP_059029
  ref <309>: DATABASE ENTRY DATE: 2002-11-05
MQSSASRCGRALVALLLACGLLGVWGEKRGFPPAQATPSLLGTKEVMTPPTKTSWTRGSNSSLMRSSAPAEVTKGGRVAGVPPRSFPPPCQRKIEINKTFKYINTIVSCLVFVLGIIGNSTLLRIIYKNKCMRNGPNILIASLALGDLLHIIIDIPINAYKLLAGDWPFGAEMCKLVPFIQKASVGITVLSLCALSIDRYRAVASWSRIKGIGVPKWTAVEIVLIWVVSVVLAVPEAIGFDVITSDYKGKPLRVCMLNPFQKTAFMQFYKTAKDWWLFSFYFCLPLAITAIFYTLMTCEMLRKKSGMQIALNDHLKQRREVAKTVFCLVLVFALCWLPLHLSRILKLTLYDQSNPQRCELLSFLLVLDYIGINMASLNSCINPIALYLVSKRFKNCFKSCLCCWCQTFEEKQSLEEKQSCLKFKANDHGYDNFRSSNKYSSS

SEQ ID NO: 711 - DNA, 1578 bp, Homo sapiens
  ref <308>: DATABASE ACCESSION NUMBER: Refseq / NM_003991
  ref <309>: DATABASE ENTRY DATE: 2001-02-03
gggctgcaggtttcgacccgcgctggcgagtcatgagcgccaagtttcccactggcgcgcaaacttgagttacttttgagcgtggatactggcgaagaggctgcgggcggtattagcgtttgcagcgacttggctcgggcagctgaccccaaagtgtctgtcttccttcctctgcttgtctctaggctctgaaactgcggcggccaccggacgcttctggagcaggtagcagcatgcagccgcctccaagtctgtgcggacgcgccctggttgcgctggttcttgcctgcggcctgtcgcggatctggggagaggagagaggcttcccgcccgacagggccactccgcttttgcaaaccgcagagataatgacgccacccactaagaccttatggcccaagggttccaacgccagtctggcgcggtcgttggcacctgcggaggtgcctaaaggagacaggacggcaggatctccgccacgcaccatctcccctcccccgtgccaaggacccatcgagatcaaggagactttcaaatacatcaacacggttgtgtcctgccttgtgttcgtgctggggatcatcgggaactccacacttctgagaattatctacaagaacaagtgcatgcgaaacggtcccaatatcttgatcgccagcttggctctgggagacctgctgcacatcgtcattgacatccctatcaatgtctacaagctgctggcagaggactggccatttggagctgagatgtgtaagctggtgcctttcatacagaaagcctccgtgggaatcactgtgctgagtctatgtgctctgagtattgacagatatcgagctgttgcttcttggagtagaattaaaggaattggggttccaaaatggacagcagtagaaattgttttgatttgggtggtctctgtggttctggctgtccctgaagccataggttttgatataattacgatggactacaaaggaagttatctgcgaatctgcttgcttcatcccgttcagaagacagctttcatgcagttttacaagacagcaaaagattggtggctgttcagtttctatttctgcttgccattggccatcactgcatttttttatacactaatgacctgtgaaatgttgagaaagaaaagtggcatgcagattgctttaaatgatcacctaaagcagagacgggaagtggccaaaaccgtcttttgcctggtccttgtctttgccctctgctggcttccccttcacctcagcaggattctgaagctcactctttataatcagaatgatcccaatagatgtgaacttttgagctttctgttggtattggactatattggtatcaacatggcttcactgaattcctgcattaacccaattgctctgtatttggtgagcaaaagattcaaaaactgctttaaggctgggccacatgttggaaataagctagtaatgttgttttctgtcaatattgaatgtgatggtacagtaaaccaaaacccaacaatgtggccagaaagaaagagcaataataattaattcacacaccatatggattctatttataaatcac

SEQ ID NO: 712 - protein, 436 aa, Homo sapiens
  ref <308>: DATABASE ACCESSION NUMBER: Refseq / NP_003982
  ref <309>: DATABASE ENTRY DATE: 2001-02-03
MQPPPSLCGRALVALVLACGLSRIWGEERGFPPDRATPLLQTAEIMTPPTKTLWPKGSNASLARSLAPAEVPKGDRTAGSPPRTISPPPCQGPIEIKETFKYINTVVSCLVFVLGIIGNSTLLRIIYKNKCMRNGPNILIASLALGDLLHIVIDIPINVYKLLAEDWPFGAEMCKLVPFIQKASVGITVLSLCALSIDRYRAVASWSRIKGIGVPKWTAVEIVLIWVVSVVLAVPEAIGFDIITMDYKGSYLRICLLHPVQKTAFMQFYKTAKDWWLFSFYFCLPLAITAFFYTLMTCEMLRKKSGMQIALNDHLKQRREVAKTVFCLVLVFALCWLPLHLSRILKLTLYNQNDPNRCELLSFLLVLDYIGINMASLNSCINPIALYLVSKRFKNCFKAGPHVGNKLVMLFSVNIECDGTVNQNPTMWPERKSNNN

SEQ ID NO: 713 - DNA, 624 bp, Rattus norvegicus
  ref <308>: DATABASE ACCESSION NUMBER: Refseq / NM_021758
  ref <309>: DATABASE ENTRY DATE: 2003-02-21
atggctgcgctggtggagccgctggggctggagcgggacgtgtcccgggctgtggagctgctagagcggctgcagcgtagcggagaactgcccccgcagaagctgcaggccctgcagcgggtcctgcagagccgcttctgctccgccatccgcgaggtgtatgaacagctctatgacacgctggacatcactggcagcgccgaggtgcgggctcatgccacagccaaggctacagtggctgctttcacagccagtgagggccatgcccatcccagggtcgtggaactaccgaagactgatgagggtttgggcttcaacatcatgggcggcaaagagcagaactcgcccatctatatctctcgagtcatccccggaggtgtggctgatcgccatggtggcctcaagaggggagaccagctgctgtctgtgaatggtgtgagtgtggaaggcgaacaccatgaaaaggcagtggaactcctgaaggccgcccagggctcagtgaaactggtggtgcgctacacccctcgggtgctggaggagatggaagcccgcttcgagaagatgcgatctgcccgtcggcgccagcagcaccacagctactcgtccttggagtctcgaggctga

SEQ ID NO: 714 - protein, 207 aa, Rattus norvegicus
  ref <308>: DATABASE ACCESSION NUMBER: Refseq / NP_068526
  ref <309>: DATABASE ENTRY DATE: 2003-02-21
MAALVEPLGLERDVSRAVELLERLQRSGELPPQKLQALQRVLQSRFCSAIREVYEQLYDTLDITGSAEVRAHATAKATVAAFTASEGHAHPRVVELPKTDEGLGFNIMGGKEQNSPIYISRVIPGGVADRHGGLKRGDQLLSVNGVSVEGEHHEKAVELLKAAQGSVKLVVRYTPRVLEEMEARFEKMRSARRRQQHHSYSSLESRG

SEQ ID NO: 715 - DNA, 754 bp, Homo sapiens
  ref <308>: DATABASE ACCESSION NUMBER: Refseq / NM_022165
  ref <309>: DATABASE ENTRY DATE: 2002-09-30
ccatttggtgtggctgaccgccatggctgcgctggtggagccgctggggctggagcgggacgtgtcccgggcggttgagctcctcgagcggctccagcgcagcggggagctgccgccgcagaagctgcaggccctccagcgagttctgcagagccgcttctgctccgctatccgagaggtgtatgagcagctttatgacacgctggacatcaccggcagcgccgagatccgagcccatgccacagccaaggccacagtggctgccttcacagccagcgagggccacgcacatcccagggtagtggagctacccaagacggatgagggcctaggcttcaacatcatgggtggcaaagagcaaaactcgcccatctacatctcccgggtcatcccagggggtgtggctgaccgccatggaggcctcaagcgtggggatcaactgttgtcggtgaacggtgtgagcgttgagggtgagcagcatgagaaggcggtggagctgctgaaggcggcccagggctcggtgaagctggttgtccgttacacaccgcgagtgctggaggagatggaggcccggttcgagaagatgcgctctgcccgccggcgccaacagcatcagagctactcgtccttggagtctcgaggttgaaaccacagatctggacgttcacgtgcactctcttcctgtacagtatttattgttcctggcactttatttaaagatatttgaccctcaaaaaaaaaaaaaaaaaaaaaa

SEQ ID NO: 716 - protein, 207 aa, Homo sapiens
  ref <308>: DATABASE ACCESSION NUMBER: Refseq / NP_071448
  ref <309>: DATABASE ENTRY DATE: 2002-09-30
MAALVEPLGLERDVSRAVELLERLQRSGELPPQKLQALQRVLQSRFCSAIREVYEQLYDTLDITGSAEIRAHATAKATVAAFTASEGHAHPRVVELPKTDEGLGFNIMGGKEQNSPIYISRVIPGGVADRHGGLKRGDQLLSVNGVSVEGEQHEKAVELLKAAQGSVKLVVRYTPRVLEEMEARFEKMRSARRRQQHQSYSSLESRG

SEQ ID NO: 717 - DNA, 1219 bp, Rattus norvegicus
  ref <308>: DATABASE ACCESSION NUMBER: EMBL / D86745
  ref <309>: DATABASE ENTRY DATE: 2002-12-28
ccctggctggctccttggctctgtgagaaccctggtcttgtgtacatgaaaacggccaccaatagaaacaacagtcacggccagcccctggctggttgaacgcctgagaccttggtgccctggtacagcctgggttaataaccctgtttatacacttgagtcatccgataaagggcatccaggcagtgggcaggtggccctgtgccctgcaatggccacttcattgactaaagcgatagcaaggccacgtggagcttccagtgcccctcccccaccacttctccaccagtcctgccagggtcagcgtgtatgcattgtgtgtgtgtgtatggtttttttttttttttttcaatgaacatgacttctggagtcaaggttgtttggccagtccccctcccgcccatcaaggatataaatagcactccgtagagagggccacagagccaggaagaaacaggaacaagacacagaccatgagctccagccaatcaggggtctgcccatgccagggctctgcaagccaccccaccattctctacacacttctaagccccggtcccaggaccaggcccatggcacccgcatctcgcagccactgcctgtgccagcaacaccggcctgtgcgcctgtgtgctccacaccgcacctgcagggaggccttggatgtcctaggcaagactgtagccttcctcaggaacctgccgtccttctgcctcctgccccatgaggatcagcgacggctgctagagggctgctggggccctctcttcctgcttgggttggcccaggatactgtgacctttgaggtggccgaggctccggtccccagcatacttaaaaagatcttgctagaggaacccaacagtggtgcccagggtgcccagccaccagacccaccacaaccctcactggctgccgtgcagtggctgcagcactgcctggagtctttctggagccttgagctgggtcccaaggagtacgcatacctgaaaggcactatcctcttcaacccaggtgagcttccagacactcctggatggtggccaaggtgggaggggacagggctcatccagggaaagtgctttcttgggacttggcatccattgtacctttgggtcctttttagcctcaaaaatagatacctcgggttggggatttagctcagtggtagagcgcttgcctatcaggcgcaaggccctgggttcggtccccagctccg

SEQ ID NO: 718 - DNA, 2435 bp, Rattus norvegicus
  ref <308>: DATABASE ACCESSION NUMBER: Refseq / NM_019232
  ref <309>: DATABASE ENTRY DATE: 2003-01-14
actgttggctaagccggtctcactgctcctttagtctctttggacactttccaaatatcggggcgatgaccgtcaaaaccgaggctgctcgaagtaccctcacctactccagaatgaggggaatggtagcaatcctcatcgctttcatgaaacagagaaggatgggcctgaacgattttattcagaagcttgccaacaactcctatgcatgcaaacaccctgaagttcaatcctatttgaaaatctcccaacctcaggagcccgaacttatgaacgccaacccctcacctcctccaagtccctctcaacaaatcaacctgggtccatcctcaaatccccacgccaaaccctctgacttccacttcttgaaagtgatcggaaaaggcagttttggaaaggttcttctagcaaggcacaaggcagaagaagcattctatgccgtcaaagttttgcagaagaaagccatcttgaagaagaaggaggagaagcatattatgtcagagcgcaatgttctgttgaagaatgtgaagcaccctttcctggtgggccttcacttctctttccagactgctgacaaactctacttcgtcctagactacattaatggcggagagctgttctaccatctccagagggagcgctgcttcctggaaccccgtgctcgcttctacgcagctgaaatagccagtgccttgggttatctgcactccctaaacatcgtttatcgagacttaaaaccagagaatattctcctagactcacagggacacatcgtcctcactgactttgggctctgcaaggagaacatcgagcacaatgggacaacgtccaccttctgtggcacgcctgagtatctcgctcctgaggttctccataagcagccgtacgaccggacagtggactggtggtgcctcggggctgtcttgtatgagatgctctatggcctgcctccgttctacagccggaacacagccgagatgtatgacaatattctgaacaagcctctccagctgaaaaatatcaccaactcagcaaggcacctgctggagggcctcctgcagaaggaccggaccaagaggctgggtgccaaggatgactttatggagattaagagtcatattttcttctctttgattaactgggatgatctcattaataagaagatcacgcccccatttaacccaaatgtgagcgggcccagtgaccttcggcactttgatcccgagtttactgaggagccggtccccagctccatcgggcgatcccctgacagcatccttgtcacagccagtgtgaaagaagccgcggaagccttccttggcttctcctatgcccctcctatggactccttcctctgaaagctcccaggatggttccgaaggatttcctcagcgtttttctaaagtgttttagttagcctttggtggagttaccagctgacagaacatcttagaagagaaatttgcacaccaggaagcttggcagtcccgcctgccggggcctgcacgcggcttgttgacgcggaagctttccggaagctttccgaagagcacatcctcctctcagtgagctagtgaggtcttcatttcttttcttccttccaacgtggtgctagctctaaaggagcttgagagtgccgcctgagacgcaccttggtctcagtgagaaggaagatgcaggtctaagagggatctccgcaggtctgagctgtgatcaagaatattctgcaatgtgccttttctgagattgtgttagctccaaagcttttcctatcgcagagtgtccagtttttgtttgtttttttttttttgttttgttttttgtttcttttttttcccaacccttgcgtatttcccatgtgtgcagttagtgtgagtgctatgcctgatcacagacagttttgttgtaagcatcaatgtgacacttgcaggacactacaatgtgggacattgtttgtttcttccacatttggaagataaatttatgcgcagactgtttttttttgtaagatataataactaaaacctattgaaacggtcttgcagtgacgagcatccagatgcttgagggaagcattgctgctacaaatatttctatttttagaaagggtttttatggaccaatgccccagttgtcagtcagagccgttggtgttcatgttaaaatgtcacctgcaaaatgggcattatttatggttccccccaacctttgttcattttcttttgcattcctgattattgtgtgtaaagaaagtctgtacattgggttataacactagatatttaaacttacaggcttatttgtaaaccatcattttaatgtcctgtaattaacatggttataacatgtacactcccccctactcaccacacaactttttttgtgtgcggtgaaaccaattttggtttgcaataaaatcttgaaaactatttgcg

SEQ ID NO: 719 - protein, 430 aa, Rattus norvegicus
  ref <308>: DATABASE ACCESSION NUMBER: Refseq / NP_062105
  ref <309>: DATABASE ENTRY DATE: 2003-01-14
MTVKTEAARSTLTYSRMRGMVAILIAFMKQRRMGLNDFIQKLANNSYACKHPEVQSYLKISQPQEPELMNANPSPPPSPSQQINLGPSSNPHAKPSDFHFLKVIGKGSFGKVLLARHKAEEAFYAVKVLQKKAILKKKEEKHIMSERNVLLKNVKHPFLVGLHFSFQTADKLYFVLDYINGGELFYHLQRERCFLEPRARFYAAEIASALGYLHSLNIVYRDLKPENILLDSQGHIVLTDFGLCKENIEHNGTTSTFCGTPEYLAPEVLHKQPYDRTVDWWCLGAVLYEMLYGLPPFYSRNTAEMYDNILNKPLQLKNITNSARHLLEGLLQKDRTKRLGAKDDFMEIKSHIFFSLINWDDLINKKITPPFNPNVSGPSDLRHFDPEFTEEPVPSSIGRSPDSILVTASVKEAAEAFLGFSYAPPMDSFL

SEQ ID NO: 720 - DNA, 2561 bp, Rattus norvegicus
  ref <308>: DATABASE ACCESSION NUMBER: Refseq / NM_019141
  ref <309>: DATABASE ENTRY DATE: 2003-01-14
cgccgccctcagtgacgcccgcggggaatgcgggagccggccgcccggctcagccgccgcgcctgcctgccgcccgcgtcacgcgagacccgcaggcccgggacgccgccgcgggccctcgaagcggatgagccgcgcctctgcctgcgcagccaactaaagcggcgtggatgattcgcgacctgagcaagatgtaccgcagacgcgcgcacccggcaccgcatcagcctgctcaacccttcaaatttacaatttcagaatcctgtgatcggattaaggaagagtttcagtttttacaggctcaataccacagtctgaagctggaatgtgagaagctggccagtgagaagacagagatgcagcggcattatgtcatgtattatgaaatgtcctatgggttgaacatagagatgcacaagcaggcagagattgttaaacgactaaatgctatctgtgcacaggtcattccttgcctgtcccaagagcagcaacaactccaagctcagcatttactcacatggacatggtctgcctgtgcctctgacaccacacccttgggcttcagccagccattccacccatctggcagcagtgcaggactgctggccctctccagtgcactaggaggtcagtctcacctcccaattaaggatgagaaaaagcaccatgacaatgatcaccaaagagacagagactccatcaagagctcttccgtatccccatcagctagtttccgaggttctgagaaacacaggaactctacagactattcctcagagagcaagaagcagaaaacagaagagaaggaaattgcagctcgctatgacagtgatggtgagaagagtgatgacaacttggtagttgatgtgtccaatgaggatccatcttcccctcgaggaagcccagcacattccccaagggagaatggcctggacaagacacgcctcctcaagaaagatgctcccatcagccctgcttctgttgcatcttccagcagtactccttcctccaaatccaaagagcttagccttaatgaaaagtctactactcctgtttcaaagtccaatacccctactccacggactgatgcacctacccctggcagtaactctactcccggactgaggcctgtacctggaaagccaccaggtgtggaccccttagcatccagcctgaggaccccaatggctgtaccttgtccatatccaaccccttttgggattgtgccccatgctgggatgaatggagagctgaccagccctggagccgcctatgctgggcttcacaacatctccccacagatgagtgcagctgcggcagcggcagcggcagcggcagcctatggaagatcacctgtggtgggatttgatccacaccatcacatgcgtgtgccagcaatacctccaaacttgacaggcattccaggaggaaaaccagcatactcctttcacgttagtgccgatggtcagatgcagccggtcccctttccccctgatgcgctcattggaccgggaatcccccgacatgcccgacagatcaacacccttaaccatggggaagtagtgtgtgcagtgaccatcagcaaccccacaagacacgtgtacacaggtggcaagggctgtgtaaaggtctgggacatcaccgatcctggcaacaaaagcccagtctctcagctggactgtctgaacagggataactacatccgctcctgcagattgctccctgatggccgcaccttaattgttggaggggaagccagtacactgtccatctgggacctggcagctccaaccccacgcatcaaggcagagctgacgtcctcagcccctgcctgctatgctctggccatcagccccgactccaaggtctgcttctcatgctgcagtgatggcaacatcgcagtgtgggatctgcacaaccagactctggtgaggcaattccaggggcacacagatggagccagttgtattgacatttctaacgatggcaccaagctctggacaggtggtttggacaacactgtgaggtcctgggacctgcgtgaagggcggcaactgcagcaacacgacttcacctctcagatcttttctttgggctattgcccaactggagagtggcttgcagtggggatggagaatagcaatgtggaagtgttgcatgtcaccaagccagacaaataccagttgcatcttcatgagagctgtgttctgtcactcaagtttgcccactgtggcaaatggtttgtaagacctggaaaggacaaccttttgaatgcttggaggacaccttatggggccagcatcttccagtccaaagaatcctcatcggtgcttagctgtgacatctctgcggatgacaagtacattgtcactggctctggggacaagaaagctacggtttatgaagttatttattaaggacaaatcttcgtgcaaactggactcctcctcatagcactttgcgctgttgtacttttctgttcacccctcacccattctaaaaccaaggatttcaataccattgcagttgtggagtttaaggccttccatagcccacgtctc

SEQ ID NO: 721 - protein, 741 aa, Rattus norvegicus
  ref <308>: DATABASE ACCESSION NUMBER: Refseq / NP_062014
  ref <309>: DATABASE ENTRY DATE: 2003-01-14
MYRRRAHPAPHQPAQPFKFTISESCDRIKEEFQFLQAQYHSLKLECEKLASEKTEMQRHYVMYYEMSYGLNIEMHKQAEIVKRLNAICAQVIPCLSQEQQQLQAQHLLTWTWSACASDTTPLGFSQPFHPSGSSAGLLALSSALGGQSHLPIKDEKKHHDNDHQRDRDSIKSSSVSPSASFRGSEKHRNSTDYSSESKKQKTEEKEIAARYDSDGEKSDDNLVVDVSNEDPSSPRGSPAHSPRENGLDKTRLLKKDAPISPASVASSSSTPSSKSKELSLNEKSTTPVSKSNTPTPRTDAPTPGSNSTPGLRPVPGKPPGVDPLASSLRTPMAVPCPYPTPFGIVPHAGMNGELTSPGAAYAGLHNISPQMSAAAAAAAAAAAYGRSPVVGFDPHHHMRVPAIPPNLTGIPGGKPAYSFHVSADGQMQPVPFPPDALIGPGIPRHARQINTLNHGEVVCAVTISNPTRHVYTGGKGCVKVWDITDPGNKSPVSQLDCLNRDNYIRSCRLLPDGRTLIVGGEASTLSIWDLAAPTPRIKAELTSSAPACYALAISPDSKVCFSCCSDGNIAVWDLHNQTLVRQFQGHTDGASCIDISNDGTKLWTGGLDNTVRSWDLREGRQLQQHDFTSQIFSLGYCPTGEWLAVGMENSNVEVLHVTKPDKYQLHLHESCVLSLKFAHCGKWFVRPGKDNLLNAWRTPYGASIFQSKESSSVLSCDISADDKYIVTGSGDKKATVYEVIY

SEQ ID NO: 722 - DNA, 2887 bp, Homo sapiens
ggggaatgcggagcggcccggcagccggcacccagccgccgccgcgcgttcctgccgcccgtgtcacgcgagacccggcgggggccgggaccgcccgagccgcccctcagaccgagccggccgcctccgctgccgcggccgcctcctcttcggggtcattaaagccaatgagccgcgcgcctctgccgagcgcagccaactaaatcggcttggatgattcgcgacctgagcaagatgtacccgcagaccagacacccagcaccgcatcagcctgctcaaccctttaaatttacaatttccgaatcctgtgatcggattaaggaagagtttcagtttttacaggctcaataccacagtctgaagctggaatgtgagaaactcgccagtgagaagacagagatgcagcggcattatgtcatgtattatgaaatgtcctatgggttgaatatagaaatgcacaagcaggcagagattgtcaagaggctgaatgctatctgtgcacaagtcattcctttcctgtcccaagagcaccagcaacaagtggtgcaggctgtggaacgggccaagcaggtgaccatggcagaactgaacgccatcattgggcaacaactccaggcccagcatttatcacatggacatggtctccccgtacctctgactccacacccttcagggctccagccccctgccattccacccatcggtagcagtgccgggcttctggccctctccagtgctctaggaggtcagtcccatcttccaattaaagatgagaagaagcaccatgacaatgatcaccaaagagacagagactccatcaagagctcttcagtatccccatcagccagtttccgaggtgctgagaagcacagaaactccgcagactactcctcagagagcaaaaagcagaaaactgaagaaaaggaaattgcagctcgttatgacagcgatggtgagaaaagtgatgacaacttggtggttgacgtttccaatgaggatccatcttcccctcgagggagcccagcacattcccccagagagaatggcctagacaagacacgcctgctcaagaaagatgccccgattagtccagcctctattgcatcttccagcagtactccctcctccaaatccaaagaacttagccttaatgaaaaatctactactcccgtctcaaagtccaatacccctactccacgaactgatgcgcccaccccaggcagtaactctactcccggattgaggcctgtacctggaaaaccaccaggagttgaccctttggcctcaagcctaaggaccccaatggcagtaccttgtccatatccaactccatttgggattgtgccccatgctggaatgaacggagagctgaccagccccggagcggcctacgctgggctccacaacatctcccctcagatgagcgcagctgctgccgccgccgctgctgctgctgcctatgggagatcaccagtggtgggatttgatccacaccatcacatgcgtgtgccagcaatacctccaaacctgacaggcattccaggaggaaaaccgcatactccttccatgttagcgcagatggtcagatgcagcctgtcccttttccacccgacgccctcatcggacctggaatcccccggcatgctcgccagatcaacaccctcaaccacggggaggtggtgtgcgcggtgaccatcagcaaccccacgagacacgtgtacacgggtgggaagggctgcgtcaaggtctgggacatcagccacccaggcaataagagtcctgtctcccagctcgactgtctgaacagggataactacatccgttcctgcagattgctccctgatggtcgcaccctaattgttggaggggaagccagtactttgtccatttgggacctggcggctccaaccccacgcatcaaggcagagctgacatcctcggcccccgcctgctatgccctggccatcagccccgattccaaggtctgcttctcatgctgcagcgacggcaacatcgctgtgtgggatctgcacaaccagaccttggtgaggcaattccagggccacacagatggagccagctgtattgacatttctaatgatggcaccaagctctggacaggtggtttggacaacacggtcaggtcctgggacctgcgcgaggggcggcagctgcagcagcacgacttcacctcccagatcttttctctgggctactgcccaactggagagtggcttgcagtggggatggagaacagcaatgtggaagttttgcatgtcaccaagccagacaaataccaactacatcttcatgagagctgtgtgctgtcgctcaagtttgcccattgtggcaaatggtttgtaagcactggaaaggacaaccttctgaatgcctggagaacaccttatggggccagtatattccagtccaaagaatcctcatcggtgcttagctgtgacatctccgtggacgacaaatacattgtcactggctctggggataagaaggccacagtttatgaagttatttattaaagacaaatcttcatgcagactggacttctcctcctggtagcactttgctctgtcatcctttttgttcacccccatccccgcatctaaaaccaaggatttcagatactcattgcagttgtggagtttaatcccctttcttaacctcacttcccacttgctattgaattgtgaatagtcattaaaaacctgtgataccaaatcttcagctgtctacttggaagaacatggaataagcatacttaacagtgaaaagaatctttaattatgtattatatctgtaatatatttattttgtttaaagaaggctttctaacaatgactgactaaataaagctgtctgctcctgcattgat

SEQ ID NO: 723 - protein, 492 aa, Homo sapiens
MIRDLSKMYPQTRHPAPHQPAQPFKFTISESCDRIKEEFQFLQAQYHSLKLECEKLASEKTEMQRHYVMYYEMSYGLNIEMHKQAEIVKRLNAICAQVIPFLSQEHQQQVVQAVERAKQVTMAELNAIIGQQLQAQHLSHGHGLPVPLTPHPSGLQPPAIPPIGSSAGLLALSSALGGQSHLPIKDEKKHHDNDHQRDRDSIKSSSVSPSASFRGAEKHRNSADYSSESKKQKTEEKEIAARYDSDGEKSDDNLVVDVSNEDPSSPRGSPAHSPRENGLDKTRLLKKDAPISPASIASSSSTPSSKSKELSLNEKSTTPVSKSNTPTPRTDAPTPGSNSTPGLRPVPGKPPGVDPLASSLRTPMAVPCPYPTPFGIVPHAGMNGELTSPGAAYAGLHNISPQMSAAAAAAAAAAAYGRSPVVGFDPHHHMRVPAIPPNLTGIPGGKPHTPSMLAQMVRCSLSLFHPTPSSDLESPGMLARSTPSTTGRWCAR

SEQ ID NO: 724 - DNA, 1892 bp, Rattus norvegicus
  ref <308>: DATABASE ACCESSION NUMBER: EMBL / S61960
  ref <309>: DATABASE ENTRY DATE: 2000-03-04
aaactgaccaaggagtatgatcaatcccgtccagcctccgagcctgcagccgtttggtcatggtgagctgcttcagctaacaattgcactgacagtgctcttgagccaagttgcttctgggcggaagtagtccatctagggctcggcctctttaaagaaacagacttctgcaaccttgggactacgtttggggtcgccggctattggacggagcagcgcaattgttagctgaagcagctcaccatgaccaaacggctgcaggctcggaggctggacgggattgatcaaaacctctgggtggagtttggcaaactgaccaaggagtatgacgtcgtgaacttgggtcagggcttccctgacttctcgcctccggactttgcaacgcaagcttttcagcaggctaccagtgggaacttcatgctcaaccagtacaccagggcatttggttacccaccactgacaaacgtcctggcaagtttctttggcaagctgctgggacaggagatggacccactcacgaatgtgctggtgacagtgggtgcctatggggccttgttcacacgctttcaggccctggtggatgaaggagatgaggtcatcatcatggaacctgcttttgactgttatgaacccatgacaatgatggctggaggttgccctgtgttcgtgactctgaagccgagccctgctcctaaggggaaactgggagccagcaatgattggcaactggatcctgcagaactggccagcaagttcacacctcgcaccaagatcctggtcctcaacacacccaacaaccctttaggaaaggtattctctaggatggagctggagctggtggctaatctgtgccagcagcacgatgtcgtgtgcatctctgatgaggtctaccagtggctggtctatgacgggcaccagcacgtcagcatcgccagcctccctggcatgtgggatcggaccctgaccatcggcagtgcaggcaaaagcttcagtgccactggctggaaggtgggctgggtcatgggtccagataacatcatgaagcacctgaggacagtgcaccagaattctatcttccactgccccacccaggcccaggctgcagtagcccagtgctttgagcgggagcagcaacactttggacaacccagcagctactttttgcagctgccacaggccatggagctgaaccgagaccacatgatccgtagcctgcagtcagtgggcctcaagctctggatctcccaggggagctacttcctcattgcagacatctcagacttcaagagcaagatgcctgacctgcccggagctgaggatgagccttatgacagacgctttgccaagtggatgatcaaaaacatgggcttggtgggcatccctgtctccacattcttcagtcggccccatcagaaggactttgaccactacatccgattctgttttgtcaaggacaaggccacactccaggccatggatgagagactgcgcaagtggaaagagctccaaccctgaggaggctgccctcagccccacctcgaacacaggcctcagctatgccttagcacagggatggcactggagggcccagctgtgtgactgcgcatgtttccagaaaagaggccatgtcttgggggttgaagccatcctttcccagtgtccatctggactattgggttgggggccagttctgggtctcagcctactcctctgtaggttgcctgtagggttttgattgtttctggcctctctgcctggggcaggaaagggtggaatatcaggcccggtaccaccttagccctgccgaggctctgtggcttctctacatcttctcctgtgacctcaggatgttgctactgttcctaataaagttttaagttattaggaccctc

SEQ ID NO: 725 - DNA, 1277 bp, Rattus norvegicus
  ref <308>: DATABASE ACCESSION NUMBER: Refseq / NM_134352
  ref <309>: DATABASE ENTRY DATE: 2002-05-22
tgcggccgcgaagaacccatgggcctcctgaggcggcggctgctgctgctggtggtggtggtgacgacctgtgtcccagcctcccagggcctgcggtgcatacagtgcgaaagtaaccaggactgcctggtggaggagtgtgccctgggccaggacctctgcagaaccacggtgcttcgggaatgggaagacgccgaggagctggaggtggtgaccagaggcctgtgccacaaggagaagaccaacaggaccatgagctaccgcatgggctcggtgatcgtcagcctcaccgagaccgtgtgtgccacaaacctctgcaacaggcccagacccggagcccgagggcgaccttttccccggggccgttaccttgagtgtgcatcctgcacctctctggaccagagctgtgagaggggccgggagcaaagcctgcagtgccggtatcctacagaacactgtattgaagtggtgacgctccaaagcacagaacggagcgtgaaggacgaaccctacaccaaaggctgtggcagtcttcccggatgcccgggcacagcaggtttccatagcaaccagacctttcacttcctgaagtgctgcaacttcacccaatgcaatggtggcccagttctggatcttcagagcttaccaccgaatggcttccaatgttacagctgtgaggggaacgagcacctttggatgttcctacgaagagacgtcctcattgactgccggggaccaatgaatcagtgcttggaggctacaggcttagatgtgctgggaaaccggagttacaccgtaagaggctgcgccacggcttcctggtgccaaggttcccacgtggccgactccttccagacccacgtcaacctctctatctcctgctgtaatggcagtggctgtaaccgccctacagggggcgcccccgggccaggccctgctcatcttatcctcattgcctccctgctcctgaccctcagactgtggggcatccctctctggacctgaatcctgagccgtctgccctggctggacccaggaacttttgactcctccgcctctgctccatctttgaggacaggcgtgctgtattgtcttcttgggcctcaagaactggaagagaattgagaaaagggctgcgggccagcaggggggcctcttggttgagttaatattgttgctgttattattattatcattgttattaccctaatttattatgtaaatatatatataagatttttgtaccagtaaaaaaaaaagcggccgcagaattcgat

SEQ ID NO: 726 - protein, 328 aa, Rattus norvegicus
  ref <308>: DATABASE ACCESSION NUMBER: Refseq / NP_599179
  ref <309>: DATABASE ENTRY DATE: 2002-05-22
MGLLRRRLLLLVVVVTTCVPASQGLRCIQCESNQDCLVEECALGQDLCRTTVLREWEDAEELEVVTRGLCHKEKTNRTMSYRMGSVIVSLTETVCATNLCNRPRPGARGRPFPRGRYLECASCTSLDQSCERGREQSLQCRYPTEHCIEVVTLQSTERSVKDEPYTKGCGSLPGCPGTAGFHSNQTFHFLKCCNFTQCNGGPVLDLQSLPPNGFQCYSCEGNEHLWMFLRRDVLIDCRGPMNQCLEATGLDVLGNRSYTVRGCATASWCQGSHVADSFQTHVNLSISCCNGSGCNRPTGGAPGPGPAHLILIASLLLTLRLWGIPLWT

SEQ ID NO: 727 - DNA, 840 bp, Rattus norvegicus
  ref <308>: DATABASE ACCESSION NUMBER: Refseq / NM_031677
  ref <309>: DATABASE ENTRY DATE: 2003-01-13
atgactgaacgctttgactgccaccactgcaatgagtctctctatggcaagaagtacattctaaaggaggagaacccgcactgtgtggcctgcttcgaggagctctatgccaacacctgtgaggagtgtggaacacccatcggctgtgactgcaaggacttgtcctacaaggatcgccactggcatgaaggctgcttccactgctcccggtgcgggagctcgctggtggacaagccctttgcggccaaggaggagcagctgctgtgcaccgactgctattccaacgagtactcgtccaagtgccaggagtgtaagaagaccatcatgccaggtacccgcaagatggaatacaagggcagcagctggcacgagacctgcttcacctgtcagcgctgccagcagcccatcggaaccaagagcttcatacctaaggagaatcagaacttctgcgtgccctgctatgagaagcagtatgccctgcagtgtgtgcagtgcaaaaagccaattaccacaggaggtgttacttaccgggatcagccctggcacagggagtgctttgtgtgcacagcctgcaagaagcagctatctgggcaacgcttcacagcccgggatgagtttccatactgcctgacctgcttctgtgacctgtatgctaagaagtgtgctgggtgcaccaaccccatcagtggtctgggtggcacaaagtacatctcttttgaggaacgccagtggcacaacgactgctttaactgtaagaagtgctccctgtccttggtggggcgaggcttcctcacagagagagacgacatcctctgtcctgactgtggaaaggacatctga

SEQ ID NO: 728 - protein, 279 aa, Rattus norvegicus
  ref <308>: DATABASE ACCESSION NUMBER: Refseq / NP_113865
  ref <309>: DATABASE ENTRY DATE: 2003-01-13
MTERFDCHHCNESLYGKKYILKEENPHCVACFEELYANTCEECGTPIGCDCKDLSYKDRHWHEGCFHCSRCGSSLVDKPFAAKEEQLLCTDCYSNEYSSKCQECKKTIMPGTRKMEYKGSSWHETCFTCQRCQQPIGTKSFIPKENQNFCVPCYEKQYALQCVQCKKPITTGGVTYRDQPWHRECFVCTACKKQLSGQRFTARDEFPYCLTCFCDLYAKKCAGCTNPISGLGGTKYISFEERQWHNDCFNCKKCSLSLVGRGFLTERDDILCPDCGKDI

SEQ ID NO: 729 - DNA, 1892 bp, Homo sapiens
  ref <308>: DATABASE ACCESSION NUMBER: Refseq / NM_001450
  ref <309>: DATABASE ENTRY DATE: 2002-11-05
agggtacgggccgggaccgccgcagcccggggcgggggcacggcaaccgcgaggcctgggggcgcccgccccccgcgccccacgcccggtgccagcgagccgaggcgtgcatctccttatatggtcaaatgacacggcggggtttctcgagggcgggagctgcgcagcgctccactcggccggcagcggagccgcagccaccagccgcccgcgccctccagccccgtccgggagtccccggcccgctgcggtgccgtgagtacctccaaccccctgcgccccggagggaggccgaggggcttagccaccagggctcggaagtgggggccgaatccggtgcgagacccaaggagaggggagcagagccggagttggggagactgtggctgaaaactgtgtcttcctggagactaggctggcattttgactttgggacggagtctcgctttgtcgcccaggctggagtgcagtggcacgatctcagctcactgcaagctctacctcttggttcacgccattctcctgccccagcctcccaagtagctgggactacaggttgctgaaaagccaggagtcaaaatgactgagcgctttgactgccaccattgcaacgaatctctctttggcaagaagtacatcctgcgggaggagagcccctactgcgtggtgtgctttgagaccctgttcgccaacacctgcgaggagtgtgggaagcccatcggctgtgactgcaaggacttgtcttacaaggaccggcactggcatgaagcctgtttccactgctcgcagtgcagaaactcactggtggacaagccctttgctgccaaggaggaccagctgctctgtacagactgctattccaacgagtactcatccaagtgccaggaatgcaagaagaccatcatgccaggtacccgcaagatggagtacaagggcagcagctggcatgagacctgcttcatctgccaccgctgccagcagccaattggaaccaagagtttcatccccaaagacaatcagaatttctgtgtgccctgctatgagaaacaacatgccatgcagtgcgttcagtgcaaaaagcccatcaccacgggaggggtcacttaccgggagcagccctggcacaaggagtgcttcgtgtgcaccgcctgcaggaagcagctgtctgggcagcgcttcacagctcgcgatgactttgcctactgcctgaactgcttctgtgacttgtatgccaagaagtgtgctgggtgcaccaaccccatcagcggacttggtggcacaaaatacatctcctttgaggaacggcagtggcataacgactgctttaactgtaagaagtgctccctctcactggtggggcgtggcttcctcacagagagggacgacatcctgtgccccgactgtgggaaagacatctgaattcaacacagagaagttgctgcttgtgatctcacacacagatttttatgttttctttctcacccaggcaatcttgccttctggtttcttccagccacattgagactttcttctagtgcttttcagtgatactcacgtttgcttaaaccctttagtgctttgtgatagttcagtcccagggaaagagaaaactcgccctaggccctaggtgggaagatggtttgaaatttttgtaatcgagtaaggcacacccaaatgtaaaaatccttttgaatgatgcctttataaatctttctctcactgtctatttaagtgcaattaacatatgtcacgaacttgaaagttttctaaactcaataaggtaatgaccagttgttatttacagctctgtaacctcccgttgcgtcaagtctaaaccaagattatgtgacttgcaataaagttattcagaacagaaaaaaaaaaaaaaaaaa

SEQ ID NO: 730 - protein, 279 aa, Homo sapiens
  ref <308>: DATABASE ACCESSION NUMBER: Refseq / NP_001441
  ref <309>: DATABASE ENTRY DATE: 2002-11-05
MTERFDCHHCNESLFGKKYILREESPYCVVCFETLFANTCEECGKPIGCDCKDLSYKDRHWHEACFHCSQCRNSLVDKPFAAKEDQLLCTDCYSNEYSSKCQECKKTIMPGTRKMEYKGSSWHETCFICHRCQQPIGTKSFIPKDNQNFCVPCYEKQHAMQCVQCKKPITTGGVTYREQPWHKECFVCTACRKQLSGQRFTARDDFAYCLNCFCDLYAKKCAGCTNPISGLGGTKYISFEERQWHNDCFNCKKCSLSLVGRGFLTERDDILCPDCGKDI

SEQ ID NO: 731 - DNA, 386 bp, Rattus norvegicus
  misc_feature (1)..(386): n=a, c, g or t
  ref <308>: DATABASE ACCESSION NUMBER: EMBL / U75395
  ref <309>: DATABASE ENTRY DATE: 2000-07-30
attgccagttttgccttgcccanccttggttttggaatagtttgttagttttccagggaaaccaagcttgggccttgcaatgggaatggatccgagggcccacgggacntggaggatttagggactttcccttcccatactccaagggaggcntctcctgactcgagatgactggtgagggctgatgtgggatttgaagtcccagactggctcacaagtgctatttattgtatatttattgtgtggatgtcatcatttcagaaaggggggagacaataaaagggggagccgagctgggcctatctgcaggaagatctggctcaggctgctgtgggcagcatcaagccaagtggaatggagctggccaagctgagcctgactttttt

SEQ ID NO: 732 - DNA, 518 bp, Rattus norvegicus
  ref <308>: DATABASE ACCESSION NUMBER: EMBL / AA874805
  ref <309>: DATABASE ENTRY DATE: 2000-03-03
ttttgttttttttttttgcagtcaagatcagaccactcccatcttttctattccctttacacccacaagctcacctgaccttgcccctgtgtatcaagagcagctcaagactctggcctggtctggacatggccacctcggtctcccaaccaagagaatcccaggtcaagagcctggcacccagccaagtcaccctctgagacagctcaacctgtcattcagctcaagggatgaggaaagacttcgcagcatacacaccccaagggtgtcttcagaatgggaccccagtgtcaggaaaccttggggtacctgcatgacagctacagacaacacccacagctgcctccatgtccttttagggaccctggctgcagtcgatatcgaacgagtcgatcgtagctgactaggataagtgttcaaggctgagaggatgttggacaacaccagtgtgtgaggacacgctgacttaaagaagccacagtcttgctttgcctgtggcctttctcctcagagctatg

SEQ ID NO: 733 - DNA, 2176 bp, Rattus norvegicus
  ref <308>: DATABASE ACCESSION NUMBER: Refseq / NM_053908
  ref <309>: DATABASE ENTRY DATE: 2003-01-13
gaattcggcacgagaggggcttggctcaaagtgccattggtttgacaggctggatgaggaggaagtggccgaaaccgaaatattcttcctgaaggtctggatccccgaacagctgtgccactcgattggccccgcccctgtcgccctttgcctgtgacttcccccactcctccagggagatgctgtcccgcgggtggtttcaccgggacctcagtgggcctgatgccgagaccctgctcaagggccggggagtccctgggagcttcctggctcggcccagtcgcaagaaccagggtgacttctccctctcagtcagggtggatgaccaggtgactcatattcggatccagaactcaggggacttctatgacctgtatggaggggagaagtttgcgacgtcgacagagctggtggagtattacactcagcagcagggcatcctgcaggaccgagacggcaccatcatccacctcaagtacccactgaactgctcggaccccaccagcgagaggtggtatcatggtcacatgtctggagggcaggcagagtcactgctgcaggccaagggcgagccctggacatttcttgtgcgtgagagtctcagccaacctggtgattttgtgctctctgtgctcaatgaccagcccaaggctgccccgggttccccgctcagggtcacgcacatcaaggttatgtgtgagggtggacgatacactgtgggtggctcagagacattcgacagcctcacagacctggtggagcacttcaagaagacggggattgaggaggcctcaggtgcctttgtctacctgaggcagccttactatgccactcgggtaaatgcagcagacattgagaaccgggtcttggaactgaacaagaagcaggagtcagaggacacagccaaggccggcttctgggaggagtttgagagtctgcaaaagcaagaggcaaagaacttgcaccagcgtctggaagggcagcggccggagaacaagagcaagaaccgctacaagaacattcttccctttgaccacagccgagtgatcctgcagggacgtgacagtaacatcccagggtctgattacatcaatgccaactacgttaagaaccagctgctaggtccggatgagaactctaagacctacatcgccagtcagggctgtctggacgctaccgtcaatgacttctggcagatggcttggcaggagaacactcgtgtcatcgtcatgactaccagagaggtggagaaaggccggaacaaatgtgtcccatactggcctgaggtgggcactcagcgcgtctatgggctctactctgtgaccaactgtaaagagcatgacacagcagagtacaaacttcgaacattgcagatctccccactggacaatggggacctggttcgggagatatggcactaccagtacctgagctggcctgaccatggggttcccagtgagcctggaggtgtcctcagctttctggatcagatcaaccagcggcaggaaagtttgcctcacgcggggcccatcattgtgcattgcagcgctggcatcggccgcaccggcaccatcatcgtcattgatatgctcatggagagcgtctccaccaaggggctagactgtgacattgacatccagaagaccatccagatggtacgggcacagcgctctggcatggtgcagacagaggcacagtacaagtttatttatgtggccatcgcccagttcatcgaaacaaccaagaagaaactggagatcatacaatcccagaggggccaggagtcggagtatgggaacatcacctaccctccggctttgaggagtgcccacgccaaagcctcccgtacctcgtccaaacacaaggaggaggtgtacgaaaacgtgcatagcaagaacaagaaggaagagaaagtaaagaagcagcgatcggcagacaaggagaagaacaaaggttctctcaagaggaacatcagccttactccgtgcagaggcctccgctgggcagacagagacctgtagtccacaccacccccatcttgttgtaatttaagtgaccgtggtcctctgaacctgtatatggctcagcaagcctcagggagagtcagacccttctcttcttgtaaataaagcccctggacaactgtgtaaaaaaaaaaaaaaaaaaaaaactcgag

SEQ ID NO: 734 - protein, 613 aa, Rattus norvegicus
  ref <308>: DATABASE ACCESSION NUMBER: Refseq / NP_446360
  ref <309>: DATABASE ENTRY DATE: 2003-01-13
MLSRGWFHRDLSGPDAETLLKGRGVPGSFLARPSRKNQGDFSLSVRVDDQVTHIRIQNSGDFYDLYGGEKFATSTELVEYYTQQQGILQDRDGTIIHLKYPLNCSDPTSERWYHGHMSGGQAESLLQAKGEPWTFLVRESLSQPGDFVLSVLNDQPKAAPGSPLRVTHIKVMCEGGRYTVGGSETFDSLTDLVEHFKKTGIEEASGAFVYLRQPYYATRVNAADIENRVLELNKKQESEDTAKAGFWEEFESLQKQEAKNLHQRLEGQRPENKSKNRYKNILPFDHSRVILQGRDSNIPGSDYINANYVKNQLLGPDENSKTYIASQGCLDATVNDFWQMAWQENTRVIVMTTREVEKGRNKCVPYWPEVGTQRVYGLYSVTNCKEHDTAEYKLRTLQISPLDNGDLVREIWHYQYLSWPDHGVPSEPGGVLSFLDQINQRQESLPHAGPIIVHCSAGIGRTGTIIVIDMLMESVSTKGLDCDIDIQKTIQMVRAQRSGMVQTEAQYKFIYVAIAQFIETTKKKLEIIQSQRGQESEYGNITYPPALRSAHAKASRTSSKHKEEVYENVHSKNKKEEKVKKQRSADKEKNKGSLKRNISLTPCRGLRWADRDL

SEQ ID NO: 735 - DNA, 2304 bp, Homo sapiens
  ref <308>: DATABASE ACCESSION NUMBER: Refseq / NM_080549
  ref <309>: DATABASE ENTRY DATE: 2003-01-15
agtggagtggcagccccagaactgggaccaccgggggtggtgaggcggcccggcactgggagctgcatctgaggcttagtccctgagctctctgcctgcccagactagctgcacctcctcattccctgcgcccccttcctctccggaagcccccaggatggtgaggtggtttcaccgagacctcagtgggctggatgcagagaccctgctcaagggccgaggtgtccacggtagcttcctggctcggcccagtcgcaagaaccagggtgacttctcgctctccgtcagggtgggggatcaggtgacccatattcggatccagaactcaggggatttctatgacctgtatggaggggagaagtttgcgactctgacagagctggtggagtactacactcagcagcagggtgtcctgcaggaccgcgacggcaccatcatccacctcaagtacccgctgaactgctccgatcccactagtgagaggtggtaccatggccacatgtctggcgggcaggcagagacgctgctgcaggccaagggcgagccctggacgtttcttgtgcgtgagagcctcagccagcctggagacttcgtgctttctgtgctcagtgaccagcccaaggctggcccaggctccccgctcagggtcacccacatcaaggtcatgtgcgagggtggacgctacacagtgggtggtttggagaccttcgacagcctcacggacctggtggagcatttcaagaagacggggattgaggaggcctcaggcgcctttgtctacctgcggcagccgtactatgccacgagggtgaatgcggctgacattgagaaccgagtgttggaactgaacaagaagcaggagtccgaggatacagccaaggctggcttctgggaggagtttgagagtttgcagaagcaggaggtgaagaacttgcaccagcgtctggaagggcagcggccagagaacaagggcaagaaccgctacaagaacattctcccctttgaccacagccgagtgatcctgcagggacgggacagtaacatccccgggtccgactacatcaatgccaactacatcaagaaccagctgctaggccctgatgagaacgctaagacctacatcgccagccagggctgtctggaggccacggtcaatgacttctggcagatggcgtggcaggagaacagccgtgtcatcgtcatgaccacccgagaggtggagaaaggccggaacaaatgcgtcccatactggcccgaggtgggcatgcagcgtgcttatgggccctactctgtgaccaactgcggggagcatgacacaaccgaatacaaactccgtaccttacaggtctccccgctggacaatggagacctgattcgggagatctggcattaccagtacctgagctggcccgaccatggggtccccagtgagcctgggggtgtcctcagcttcctggaccagatcaaccagcggcaggaaagtctgcctcacgcagggcccatcatcgtgcactgcagcgccggcatcggccgcacaggcaccatcattgtcatcgacatgctcatggagaacatctccaccaagggcctggactgtgacattgacatccagaagaccatccagatggtgcgggcgcagcgctcgggcatggtgcagacggaggcgcagtacaagttcatctacgtggccatcgcccagttcattgaaaccactaagaagaagctggaggtcctgcagtcgcagaagggccaggagtcggagtacgggaacatcacctatcccccagccatgaagaatgcccatgccaaggcctcccgcacctcgtccaagagcttggagtctagtgcagggaccgtggctgcgtcacctgtgagacggggtggccagaggggactgccagtgccgggtccccctgtgctgtctcctgacctgcaccaactgcctgtacttgcccccctgcacccggctgcagacacaaggaggatgtgtatgagaacctgcacactaagaacaagagggaggagaaagtgaagaagcagcggtcagcagacaaggagaagagcaagggttccctcaagaggaagtgagcggtgctgtcctcaggtggccatgcctcagccctgaccctgtggaagcatttcgcgatggacagactcacaacctgaacctaggagtgccccattcttttgtaatttaaatggctgcatcccccccacctctccctgaccctgtatatagcccagccaggccccaggcagggccaacccttctcctcttgtaaataaagccctgggatcactgtg

SEQ ID NO: 736 - protein, 624 aa, Homo sapiens
  ref <308>: DATABASE ACCESSION NUMBER: Refseq / NP_536859
  ref <309>: DATABASE ENTRY DATE: 2003-01-15
MVRWFHRDLSGLDAETLLKGRGVHGSFLARPSRKNQGDFSLSVRVGDQVTHIRIQNSGDFYDLYGGEKFATLTELVEYYTQQQGVLQDRDGTIIHLKYPLNCSDPTSERWYHGHMSGGQAETLLQAKGEPWTFLVRESLSQPGDFVLSVLSDQPKAGPGSPLRVTHIKVMCEGGRYTVGGLETFDSLTDLVEHFKKTGIEEASGAFVYLRQPYYATRVNAADIENRVLELNKKQESEDTAKAGFWEEFESLQKQEVKNLHQRLEGQRPENKGKNRYKNILPFDHSRVILQGRDSNIPGSDYINANYIKNQLLGPDENAKTYIASQGCLEATVNDFWQMAWQENSRVIVMTTREVEKGRNKCVPYWPEVGMQRAYGPYSVTNCGEHDTTEYKLRTLQVSPLDNGDLIREIWHYQYLSWPDHGVPSEPGGVLSFLDQINQRQESLPHAGPIIVHCSAGIGRTGTIIVIDMLMENISTKGLDCDIDIQKTIQMVRAQRSGMVQTEAQYKFIYVAIAQFIETTKKKLEVLQSQKGQESEYGNITYPPAMKNAHAKASRTSSKSLESSAGTVAASPVRRGGQRGLPVPGPPVLSPDLHQLPVLAPLHPAADTRRMCMRTCTLRTRGRRK

SEQ ID NO: 737 - DNA, 2190 bp, Rattus norvegicus
  ref <308>: DATABASE ACCESSION NUMBER: EMBL / S77494
  ref <309>: DATABASE ENTRY DATE: 2000-03-04
ctgttagccagaactaagtcactgcccacacagcaattacaccatgaatctctaacatcacaaccttctttcaaatactgtaaaaaaaaaaatactggaaaacctttttagatttgtttcaatctaccacgcttctgaaatgttcagctattaaggggaatgtcaatatatatatacagcccaaattagcgaagcccaaattagggaagcacatagcatggcatacttgagaggttggcaaacaagagggaagcaggtactttctgcaaaaacagggactgtgcgccacaatgagaccgctgtgaccttacttcaaactgtgaaactgtgtgcagcagtaggatttggagtcttaaattcagaaggagcagaaagaaagagagttagacgtttgaattcctggtgcttatgctgacgttttctctcatttgccagcattaaaatctcaagtaaggtgtctcctgtgccaggacgtgtcaggtagacctttctcagtgagctggaatcctgccttctgtgtcatagagttgtaagagcagcagtttctacccatcatgctgtgtactcactgctgcagagcaagtgggaggggccagagatgggccgtccccaggggcggatagcgcggtacacttaattctcttctgcctgaaagcacacttccccgtaagcgaatacagacagaactttgattgagctggtatctgaccgataggattgcttctttgatgtacctctttgacctagctagcatttcagctttgatactgcagaacgatcttttcaaattataatcattctgatagagatatcttaatagacgtgcttttaaaaacaaaacggaaactactgtcagtatgaatactgagccagactggcattcatagatttaacaacttgtatttctaagattcttaactctataaaagtaatatggcttttagatatataggataataatttcagtgagaccgttatctctttactcaacattatgttagggacagtataagccaagcacttacctgttacacattggagactaaaacgactgcccccaaccttagtaagtatgaaaactagactcacattatttcatttttaactgctaaaagtatgtctatagaatttaaaatttaagcactactatttgtcctggccacatttttcaaaaattaagttaaaagttattaattatatacaggtgtgtatttctaataattaaaatacctttcaaatccatggaatgtctgccttttaaatgtaatttgggcttttttgtttgattctttttcacttaactagctgtttatttgtaaacatttctttccacgatttaaaaacacttccaatcggctttacttcctgatttagcacttcctattttgacccttgggcatctgttcttcgtttaattggtgtagaataatgataaaaatcccaagctagtctaaccaaactgcattcttaagagtactaagtgggaatgatgcaaagttcatcaagaattgaaaagaagccggtctttgcactaaggaagacagcataattaagtcttctcgttgccatctgagtaatatcatgatatggggaccgcagaatccatctccggtgggatgatggtatagctttcctagttccagaaaaaatctccttcacattttatataataatttaatcacaatgtccatcgaattcttccttaggcattctttgtaacagtagtgtgctgctctttaaaatattaacctctgacacatgtgtgaacctcattccctgtggtcactaaaatttcttccccactgagcatcaatctttagcagattttaggaaaatactgaattcttagtcaggaaatattttaggaataatcttgctaacagtatattaagtaataaaattacccactctatgtgtgtttcattttttttaatttacatagacaatggtttttataaagcaatgatttcaatttttcccagctacccaaagtcctggttaatttgtgaacacaaattttgttagccttcaagtttaaacggtgctgaattgtcttaacttgaatgtaaaaatggattaaggcttatctcatgggacacaaacatgtcccatatgactgcttgctgcgtactaggggacatgccatttggtgttaaattgtctataataaagttcggtttctcccaaaaa

SEQ ID NO: 738 - DNA, 281 bp, Rattus norvegicus
  ref <308>: DATABASE ACCESSION NUMBER: EMBL / AI176460
  ref <309>: DATABASE ENTRY DATE: 2000-03-03
ggcacgaggggctcgtgcgtcgatgaagaacgcagctagctgcgagaattaatgtgaattgcaggacacattgatcatcgacacttcgaacgcacttgcggccccgggttcctcccggggctacgcctgtctgagcgtcgcttgacgatcaatcgccgcccccccttgcggtttcgccgccgcgggggggatcgcgtcgcgcggctgggagtctgctcgcagggccccgctccccggggccctccgtctcccgaagttcagacgtgggcggcgtccggcgt

SEQ ID NO: 739 - DNA, 1265 bp, Rattus norvegicus
  ref <308>: DATABASE ACCESSION NUMBER: Refseq / NM_021680
  ref <309>: DATABASE ENTRY DATE: 2002-11-05
cgtcgccctcagccgggcgccccttgccctgtgcccagaccggcccgccccgggacccgccctgccggacccgcttggccgcccgggaagatgcggctgctcccggaatggctcctcttgctctttggtccttggctccttaggaaggttatcagtggccagatcgtggaatccgggaggccacagtacctggacctgcgtcccgccatggccggagggggcgcccgcggccagcagctcccggtgcccgcttcttccgagggcctgaaccccgtgcgctcctggagctgggcttggccagctaaccacaccggggcgctggccaggccgggggcagccggtggcccgcccgtgccgcgcaccaagagaaagccatccattaaagcggcccgcgccaagaagattttcggctggggggacttttactttcgtgtacataccctcaagttctcgctgctggtgaccggcaagattgtggaccatgtgaacggtaccttcagtgtgtacttccgtcacaattcgtccagcctgggtaacctaagtgtcagtatcgtgccgccttccaagcgtgtggagttcgggggcgtctggctgcctgggcctgccccccaccctctacagtctacgctggcattagaaggggtgcttcccggactggggccccctctggggatggcggggcaggggctggggggtaaccttgggggtgcacttgccggcccactcggaggcgcgctgggagttcctggggccaaagagtcgcgcgcttttaattgccacgtagaatatgagaagacaaaccgcgctcgcaagcaccgcccgtgcctgtacgacccgtcgcaggtgtgcttcaccgagcacacgcagagtcaggccgcttggctctgcgccaagcccttcaaagtcatctgtatcttcgtctccttcctcagttttgactacaaactggtgcagaaggtgtgcccagactataacttccagagtgagcacccctactttggataacgcccccgtcctgggcccagagtttcccaccagatctcagtctcactaggtgggaccctccctgtataccccatgctcctgtgactgcccccacgtcttccactatgggtgaggtggagaacaacagccttcccccgggactatcagccagtgtggccctccatttccttgtggtactgagtgtccctaagactcaaatgtcttcgtggcaggaggagagctcctggctagactcctgcacctgaacatgactggttgtc

SEQ ID NO: 740 - protein, 304 aa, Rattus norvegicus
  ref <308>: DATABASE ACCESSION NUMBER: Refseq / NP_067712
  ref <309>: DATABASE ENTRY DATE: 2002-11-05
MRLLPEWLLLLFGPWLLRKVISGQIVESGRPQYLDLRPAMAGGGARGQQLPVPASSEGLNPVRSWSWAWPANHTGALARPGAAGGPPVPRTKRKPSIKAARAKKIFGWGDFYFRVHTLKFSLLVTGKIVDHVNGTFSVYFRHNSSSLGNLSVSIVPPSKRVEFGGVWLPGPAPHPLQSTLALEGVLPGLGPPLGMAGQGLGGNLGGALAGPLGGALGVPGAKESRAFNCHVEYEKTNRARKHRPCLYDPSQVCFTEHTQSQAAWLCAKPFKVICIFVSFLSFDYKLVQKVCPDYNFQSEHPYFG

SEQ ID NO: 741 - DNA, 411 bp, Homo sapiens
  ref <308>: DATABASE ACCESSION NUMBER: EMBL / AF043469
  ref <309>: DATABASE ENTRY DATE: 2000-03-03
gcacgagggtcacgcgctttcaattgccacgtggagtatgagaagacaaaccgcgcgcgcaagcaccgaccgtgcctgtacgacccgtcgcaggtgtgcttcaccgagcacacgcagagccaggccgcctggctctgtgccaagcccttcaaagtcatctgtatcttcgtctctttcctcagctttgactacaaactggtgcagaaggtgtgcccagactataacttccagagtgagcacccctacttcggatagcgcccctccccagccagtcctgagcctcccgccaaatcccagcctcactaggtgggacccccttcccagtgttctgccgctcctgtggccatgtcgcccactccttccactctgggggcggaggggaatggcttctcgggaccctcagctagcgtg

SEQ ID NO: 742 - protein, 84 aa, Homo sapiens
ARGSRAFNCHVEYEKTNRARKHRPCLYDPSQVCFTEHTQSQAAWLCAKPFKVICIFVSFLSFDYKLVQKVCPDYNFQSEHPYFG

SEQ ID NO: 743 - DNA, 2352 bp, Rattus norvegicus
  ref <308>: DATABASE ACCESSION NUMBER: Refseq / NM_012588
  ref <309>: DATABASE ENTRY DATE: 2003-01-14
gggagcagcgagcaagcaggtcctcagcgtccagtcaccgctctaagccaggcgccatgcatcccgcgcgccccgcgctctgggcggctgcgctcaccgccctcactctgctccgcggaccgccagtggcgcgggccggcgcgggcgcggtgggcgcgggccccgtggtgcgctgcgaaccgtgcgacgcgcgtgcgctggcccagtgcgcgcctccgcccaccgcgcccgcgtgcacggagctggtgcgagaacccggctgcggctgctgcctgacttgcgcgctgcgcgaaggcgacgcgtgcggcgtctacacggagcgctgtggcaccggcctccgctgccagccgcgaccggccgagcagtatcccctgaaggcgctgctgaatggccgcgggttctgcgccaacgccagcgccgccagcaacctgagtgcctacctcccctcccagccgtctcctggaaacaccactgagtctgaggaggaccacaatgctgggagtgtggaaagccaggttgtccccagcacacatcgcgtgactgattccaagttccatccactccattcaaagatggaggtcatcataaaaggccaggctagggacagccagcgctacaaagttgactatgagtcccagagcacagacacccagaacttctcctccgagtctaagcgggagacagaatatggtccctgccgcagagaaatggaggacacactgaatcatctgaagttcctcaatgtgctgagtcccaggggcgtccacatcccaaactgtgacaagaaggggttctataagaagaaacagtgtcgcccttccaaaggcagaaagcggggcttctgctggtgcgtggacaagtacgggcagccattgccaggctatgacaccaaggggaaagacgacgtgcattgcctcagcgtgcagagccagtagataccgctgtgccacttaacgtggagctcaaatacgccttattttgcacaaaagactgccaacaacgtgatcagcagctggctataccttgatttatatttctctctctctctctctctctctctctctctctctctctctcttttgtggtgaactgaataaaaacaaacaaaacacatacaaaaacaaaaacaaaaaaaaaagccaagtttagacagatttctgaaatgcctctggttgtttaaatagtgaacttggtcatctttgtatctcgcagtagtcaaccaaaagcagtttgaattttcttgttgcttcctatgaaaaccacacgtgtactccaggccacggatgccgtcgccccctaactcacccacccactgtgggcttcagtgctgctggccctctgccttcttgatttcagaggctctgttgctgatagagaaaaaccctctttccatcccctgtaagtaagtgcaggcactgtggagaatggggaagcctggaacccagtgacccggacgtctggaagcatcctcctgaggcctctggtccttattgtgccatctctgaatcaagggcctggccctgtatctgcaagtggcctgacctacttgggaactgtgggagagaaaaatgtgttgtctctcttactaaaaatgactaagaatgttctagggcgctccgagagcccataaagacaaggacaaggaccttcctttgtcaggcagcttcctgatgacttggcccagcagaaatatcaaactccatgtgcagagatgtcgcaaataacggtgcgcttagttctccggatgacttcaagaaaacagtgttttctggcccagcctctcaaaataaaatttgttgtggggtggggctgaggggaggcagctttcaaaagagagaaggttttcatcttccttgttggagaccctggtaagaacatggagagaatcacctgtttgttgatcttggggtccttctcaaactttctttataattcatgcgtatatgcagacaaaatatgttcttaattgttaacattgtatacaacatagcccaaatatattagaatctgtactagataatcctagataaaaggttagagatgctaggtgatgtaaccacagacacgcccgaggaaaggagcctgtgtctggaggctgggccgctttccccgaggccaaggccatggtggtctggcaatacagggtgtgaggagactgtactgcatcccacggggtggacatgcgctgtacagagctttccttgagagcacaaaggaatcttgagacattctgcctgcctgtcagcttttctttatttttttaattaagtttttgggggaaaaatgtatttttgaaaagtttgtcttgcaatgtatttataaatagtaaataaagtttttttactatttaag

SEQ ID NO: 744 - protein, 292 aa, Rattus norvegicus
  ref <308>: DATABASE ACCESSION NUMBER: Refseq / NP_036720
  ref <309>: DATABASE ENTRY DATE: 2003-01-14
MHPARPALWAAALTALTLLRGPPVARAGAGAVGAGPVVRCEPCDARALAQCAPPPTAPACTELVREPGCGCCLTCALREGDACGVYTERCGTGLRCQPRPAEQYPLKALLNGRGFCANASAASNLSAYLPSQPSPGNTTESEEDHNAGSVESQVVPSTHRVTDSKFHPLHSKMEVIIKGQARDSQRYKVDYESQSTDTQNFSSESKRETEYGPCRREMEDTLNHLKFLNVLSPRGVHIPNCDKKGFYKKKQCRPSKGRKRGFCWCVDKYGQPLPGYDTKGKDDVHCLSVQSQ

SEQ ID NO: 745 - DNA, 430 bp, Rattus norvegicus
  ref <308>: DATABASE ACCESSION NUMBER: EMBL / AI638948
  ref <309>: DATABASE ENTRY DATE: 2000-03-04
gttccatggccctttttttttttttgggaaagggagcttttttttttccatttttttgggggggttgttttcaaggggggggttctgctttttcgccccagatatgttttttttttgggaataagaaaaaaggtttttttttttttttcgggggggtttttgggaaaaaatccaccaagggtggggtttgcaaatgggaattttttttttttttaaagcctctctcctgactttggcttaagtttgggttaccaccgcgcattttggttggggggggcctccccctttttttgttttttcttgtgggagatttttggttagtgatagccctttttcactctttgtgggtgtacgggttccccctttttttttttttatttattttaaaaattttaattttttatttatatttttattttttctttcttaa

SEQ ID NO: 746 - DNA, 6052 bp, Rattus norvegicus
  ref <308>: DATABASE ACCESSION NUMBER: Refseq / NM_022183
  ref <309>: DATABASE ENTRY DATE: 2003-01-13
aaatgaaactagggaagctctcctaaccgacgcacgtctgtggagaagcgtccaagtcgccggtcgcctagcgtttctcactgattttgtcgcttttaggattctcgagccccttcaggacggtcaccatggagttgtcaccgctgcagcctgtaaatgaaaatatgctactcaacaaaaagaagaatgaagatggcaagaaaagactgtccgttgaaagaatctatcagaaaaaaacccaactggaacatatactgctccgcccagatacctacatcggctctgtggagttagtgacccagcaaatgtgggtttacgatgaagatgttggtattaactacagggaagtcacttttgttcctggtttgtataaaatctttgatgaaattctagttaatgctgctgataacaaacaaagggacccaaaaatgtcttgcattagagtcacaatgatgcgaaataatttaattagtatatggaataatggaaagggaattcctgttgttgaacacaaagtggagaaaatgtatgtcccagctctcatatttggacagctcctgacctccagtaactacgatgatgatgagaagaaagtgacaggtggtcgaaatggctatggagctaaactgtgtaacatattcagcaccaaatttactgtggaaacagccagtagggaatacaagaaaatgttcaaacagacatggatggataacatggggagagctggtgacatggagctcaagccctttagcggagaggattacacgtgtattaccttccagcctgacttatctaagtttaaaatgcaaagcctggacaaagatattgtcgcactgatggtcagaagagcatacgatattgctggttccaccaaagatgtaaaagtctttcttaatggaaacaggctgccagtcaaagggttccgtagttacgtggatatgtatttgaaggataaggttgatgaaactgggaacgctctgaaggtggtgcatgaacaagtaaatccccggtgggaagtgtgcttaacaatgagcgagaaaggctttcagcagattagcttcgtcaacagcatcgctacttctaagggtggcagacatgtcgattatgtagccgatcagattgtgagtaaactcgttgatgtggtgaaaaagaagaacaagggaggtgttgcagtgaaggccgatcaggtgaagaatcacatgtggatttttggaaatgcggtaattgaaaacccaacctttgattctcaaacaaaagaaaacatgactttacaagccaagagctttggatcaacttgtcaattaagtgaaaaattcatcaaagctgcaattggttgtggtattgtcgaaagcatactaaactgggtgaagtttaaggcccaaatccaattaaacaagaagtgttcagctgtaaaacataacaggatcaagggaatccccaaacttgacgacgccaatgacgcagggagccgaaactctgctgaatgcacacttatcctgactgaaggggactcagccaaaactctggcagtctcaggacttggagtggttggaagagacaaatatggggtgttccctctcagaggaaaaatactcaatgtgcgagaagcttctcataaacagatcatggaaaatgctgaaattaacaatatcatcaagattgtggggcttcagtacaagaaaaactatgaggatgaagattcattgaaaactcttcgttatgggaagatcatgattatgacagatcaggaccaagatggttcccacatcaaaggcttgctgatcaattttatccatcacaattggccatctcttctgcgacatcgttttctagaagaatttatcactcctattgtaaaggtatctaaaaacaagcaagaaatagcattctacagtcttcccgagtttgaagaatggaagagtacaaatccaaatcacaaaaaatggaaagtcaagtactacaaaggtttgggcacgagcacatcaaaggaagctaaggagtattttgcaaatatgaaacgacatcgtattcagttcaaatactctggccctgaagacgatgctgcgatcagcctggcctttagtaaaaaacaggtcgatgatcgaaaggaatggttaactaatttcatggaagatagaagacagcggaagttacttggccttcctgaggattatttgtatggacaaaccactatgtacctgacctataatgatttcattaacaaggaacttatcctcttttcaaactctgataatgaaagatctatcccatctatggtagatggtttgaaaccaggtcagagaaaggttttgtttacttgtttcaaacggaatgacaagcgagaggtgaaagttgcccagttagctgggtcagtggcagaaatgtcctcttatcaccatggtgagatgtcgctgatgatgaccattatcaatttggctcagaattttgtgggtagcaataatttgaaccttctacagcctattggtcagtttggtaccaggctgcatggtggcaaggactcagccagccctaggtacatctttacaatgctcagccctttggctcggttgttatttccatcaaaagatgatcacacgttacggtttctgtatgacgacaaccagcgtgttgagcctgaatggtacatccctattatacccatggtgctgataaatggtgctgagggaattggtactgggtggtcctgcaaaatccccaactttgatgttcgtgaagtcgtaaataatatcaggcggctgttggatggagaagagcctctgcccatgctcccaagttataagaattacaaaggtactattgaagaactggcttcaaatcagtatgtgattaatggagaagtagctattctgaattccacaaccattgagatcactgagcttcccatcagaacatggacccagacatataaggaacaggttctagaacctatgttgaatggcaccgagaagacaccccctctaataacagactatagggaataccacacagataccactgtgaagtttgtcataaagatgactgaagaaaaattggcagaggcagagagagtgggactacacaaagtcttcaaactccagactagtctcacttgcaactctatggtactttttgaccatgttggttgtttaaagaaatatgacactgtgttggatattctaagagacttctttgagctcaggcttaaatattatggattaagaaaagaatggcttctaggaatgcttggtgcagaatcttctaaactgaataatcaagctcgctttatattagagaaaatagatggcaaaatagtcattgaaaataaacctaagaaagaattaattaaagttctgattcagagaggctatgactccgaccctgtgaaagcctggaaagaagctcagcagaaggtcccagaagaagaggaaaatgaagagaatgaagagagcgagagtgaaagcacgagccctgcagcggagtctggaccgaccttcaactaccttcttgatatgcccctgtggtatctaaccaaggagaagaaggacgagctgtgcaagcaaagggacgagaaggaacaagagctcaacacgttaaagaaaaagactccatcggatttgtggaaggaagacctggctgcttttgtggaagaactggaggttgttgaagccaaggaaaaacaggatgaacaagtaggacttcctggaaagggggtgaaagcgaaggggaagaaagcgcagatatctgaagtcctgccttctcctgtggggaaaagggtcatcccgcaggtgactatggagatgagagctgaggcagagaagaaaatcaggaggaaaattaagagcgagaatgttgagggcacccctgctgaggatggtgctgagccaggactccggcagagactagagaagaggcagaagagagagccaggtaccagggcaaagaagcaaactacattgccatttaagcctatcaaaaaagcccaaaagcaaaacccttggtctgattctgaatcagatatgagcagcaacgaaagcaattttgatgtccctccacgagagaaagagccaagaattgctgcaacaaaagccaaattcacggcggatttagactctgatgacgatttctcaggcttggatgagaaggatgaggatgaagatttcttcccattagatgatactccacctaagaccaaaatgcccccaaaaaatactaaaaaagcactgaagccacagaagagctccacatcagttgatcttgaaagtgatgggaaagacagtgtaccagcttctccaggcgcttctgctgctgacgtcccagctgagactgaaccctccaagccgtcctccaaacagacagtgggagtgaagaggacaataaccaaaggtcagtctttaacctccactgctggcaccaaaaagagagctgtaccaaaggagaccaagtcagattcagccttgaatgctcatgtctccaaaaagcctgctcctgccaaagccaagaacagtcgcaagaggatgccatcttcttctgacagctcggactctgagtttgagaaggcgatttctaaaggtgccacaagcaagaaactcaagggagaggagcgggatttccatgtggacttagatgacactgtggctcctcgagcaaaatccggacgagcaaggaagccgattaagtacctggaggagtcggatgacgacctcttctaaggggtgaggggatttcaggaatggttttactgagccacgttagttttaaagttcttccttaaccactctgaatttaattggcaggaagacttttttttaaataagaatatgcaagtgagcaggcccctgtggccttcacctttgttctcaacatactgtcagtagtggccgtctcgtgggcattgtcgtcttctctgattgtctgttttatgtctgttttctttggtctctgaaacctggcttgaatattttttggattccacataattatatgcttactcagcacagtagcatttatcaatttaaactaaagtggaaatggtttcaaaagcattcctgcctcctttcctatcccactaaatatgaggtaagacagcccttgttttcaattttataggtagaattccggccgggatcccccggcctgcctctgacggcggggactcagcttcggagagtcgggaggcatcaggtggcccgcagctctcgtcctctgcgtccttctcgcggtggctgaccgcgactccgaagaggtggctggccgctgcgcttggcggggtggggcgggatggcggcgtctgatggctggaggcggcctggccgggtactcttctacccgactctgctctacacagtgttcctggggagggtaggcagcccgaccaccgcgattggtaccaccgcatcgaccacacagtgctgctgggcgcagtgccgctgaggagcatgacgcgccggctggtactggacgagacgtgcgacggagtgatcactatgaacgaggagtacgagaccagattcctgtgcaacacctcgaaggaatggaagaatgtgggagttgagcagctacggctcagcacagtcgacatgactggagtccccaccttggccaacctccacagaggagtccagtttgctctcaagtaccagtccctgggccagtgtgtctacgtgcattgtaaggctggtcgatccagaagtgccacaatggtcgaggcctatctgattcaggtacacaactggagcccagaggaggctatagaagctatcgccaaaatccggtcacacatctccatcaggcccagccagttggaaattctcaaagagttccagaaggagattcgtgcaagggcagcaaataactaactactggtctcttgtgctgacatgagtatgaagtctgtggatgacaaagaacttggctctccgagatacagtaacatgttaaaggacaaagcgcttaagctaccaccactgcaaatgtgctgagtataatgtccctcctttgccttccttcctgaaataacacttggatggccacagagaaaaaaaaaaaaaaaaaa

SEQ ID NO: 747 - protein, 1526 aa, Rattus norvegicus
  ref <308>: DATABASE ACCESSION NUMBER: Refseq / NP_071519
  ref <309>: DATABASE ENTRY DATE: 2003-01-13
MELSPLQPVNENMLLNKKKNEDGKKRLSVERIYQKKTQLEHILLRPDTYIGSVELVTQQMWVYDEDVGINYREVTFVPGLYKIFDEILVNAADNKQRDPKMSCIRVTMMRNNLISIWNNGKGIPVVEHKVEKMYVPALIFGQLLTSSNYDDDEKKVTGGRNGYGAKLCNIFSTKFTVETASREYKKMFKQTWMDNMGRAGDMELKPFSGEDYTCITFQPDLSKFKMQSLDKDIVALMVRRAYDIAGSTKDVKVFLNGNRLPVKGFRSYVDMYLKDKVDETGNALKVVHEQVNPRWEVCLTMSEKGFQQISFVNSIATSKGGRHVDYVADQIVSKLVDVVKKKNKGGVAVKADQVKNHMWIFGNAVIENPTFDSQTKENMTLQAKSFGSTCQLSEKFIKAAIGCGIVESILNWVKFKAQIQLNKKCSAVKHNRIKGIPKLDDANDAGSRNSAECTLILTEGDSAKTLAVSGLGVVGRDKYGVFPLRGKILNVREASHKQIMENAEINNIIKIVGLQYKKNYEDEDSLKTLRYGKIMIMTDQDQDGSHIKGLLINFIHHNWPSLLRHRFLEEFITPIVKVSKNKQEIAFYSLPEFEEWKSTNPNHKKWKVKYYKGLGTSTSKEAKEYFANMKRHRIQFKYSGPEDDAAISLAFSKKQVDDRKEWLTNFMEDRRQRKLLGLPEDYLYGQTTMYLTYNDFINKELILFSNSDNERSIPSMVDGLKPGQRKVLFTCFKRNDKREVKVAQLAGSVAEMSSYHHGEMSLMMTIINLAQNFVGSNNLNLLQPIGQFGTRLHGGKDSASPRYIFTMLSPLARLLFPSKDDHTLRFLYDDNQRVEPEWYIPIIPMVLINGAEGIGTGWSCKIPNFDVREVVNNIRRLLDGEEPLPMLPSYKNYKGTIEELASNQYVINGEVAILNSTTIEITELPIRTWTQTYKEQVLEPMLNGTEKTPPLITDYREYHTDTTVKFVIKMTEEKLAEAERVGLHKVFKLQTSLTCNSMVLFDHVGCLKKYDTVLDILRDFFELRLKYYGLRKEWLLGMLGAESSKLNNQARFILEKIDGKIVIENKPKKELIKVLIQRGYDSDPVKAWKEAQQKVPEEEENEENEESESESTSPAAESGPTFNYLLDMPLWYLTKEKKDELCKQRDEKEQELNTLKKKTPSDLWKEDLAAFVEELEVVEAKEKQDEQVGLPGKGVKAKGKKAQISEVLPSPVGKRVIPQVTMEMRAEAEKKIRRKIKSENVEGTPAEDGAEPGLRQRLEKRQKREPGTRAKKQTTLPFKPIKKAQKQNPWSDSESDMSSNESNFDVPPREKEPRIAATKAKFTADLDSDDDFSGLDEKDEDEDFFPLDDTPPKTKMPPKNTKKALKPQKSSTSVDLESDGKDSVPASPGASAADVPAETEPSKPSSKQTVGVKRTITKGQSLTSTAGTKKRAVPKETKSDSALNAHVSKKPAPAKAKNSRKRMPSSSDSSDSEFEKAISKGATSKKLKGEERDFHVDLDDTVAPRAKSGRARKPIKYLEESDDDLF

SEQ ID NO: 748 - DNA, 5698 bp, Homo sapiens
  ref <308>: DATABASE ACCESSION NUMBER: Refseq / NM_001067
  ref <309>: DATABASE ENTRY DATE: 2003-01-15
aggttcaagtggagctctcctaaccgacgcgcgtctgtggagaagcggcttggtcgggggtggtctcgtggggtcctgcctgtttagtcgctttcagggttcttgagccccttcacgaccgtcaccatggaagtgtcaccattgcagcctgtaaatgaaaatatgcaagtcaacaaaataaagaaaaatgaagatgctaagaaaagactgtctgttgaaagaatctatcaaaagaaaacacaattggaacatattttgctccgcccagacacctacattggttctgtggaattagtgacccagcaaatgtgggtttacgatgaagatgttggcattaactatagggaagtcacttttgttcctggtttgtacaaaatctttgatgagattctagttaatgctgcggacaacaaacaaagggacccaaaaatgtcttgtattagagtcacaattgatccggaaaacaatttaattagtatatggaataatggaaaaggtattcctgttgttgaacacaaagttgaaaagatgtatgtcccagctctcatatttggacagctcctaacttctagtaactatgatgatgatgaaaagaaagtgacaggtggtcgaaatggctatggagccaaattgtgtaacatattcagtaccaaatttactgtggaaacagccagtagagaatacaagaaaatgttcaaacagacatggatggataatatgggaagagctggtgagatggaactcaagcccttcaatggagaagattatacatgtatcacctttcagcctgatttgtctaagtttaaaatgcaaagcctggacaaagatattgttgcactaatggtcagaagagcatatgatattgctggatccaccaaagatgtcaaagtctttcttaatggaaataaactgccagtaaaaggatttcgtagttatgtggacatgtatttgaaggacaagttggatgaaactggtaactccttgaaagtaatacatgaacaagtaaaccacaggtgggaagtgtgtttaactatgagtgaaaaaggctttcagcaaattagctttgtcaacagcattgctacatccaagggtggcagacatgttgattatgtagctgatcagattgtgactaaacttgttgatgttgtgaagaagaagaacaagggtggtgttgcagtaaaagcacatcaggtgaaaaatcacatgtggatttttgtaaatgccttaattgaaaacccaacctttgactctcagacaaaagaaaacatgactttacaacccaagagctttggatcaacatgccaattgagtgaaaaatttatcaaagctgccattggctgtggtattgtagaaagcatactaaactgggtgaagtttaaggcccaagtccagttaaacaagaagtgttcagctgtaaaacataatagaatcaagggaattcccaaactcgatgatgccaatgatgcagggggccgaaactccactgagtgtacgcttatcctgactgagggagattcagccaaaactttggctgtttcaggccttggtgtggttgggagagacaaatatggggttttccctcttagaggaaaaatactcaatgttcgagaagcttctcataagcagatcatggaaaatgctgagattaacaatatcatcaagattgtgggtcttcagtacaagaaaaactatgaagatgaagattcattgaagacgcttcgttatgggaagataatgattatgacagatcaggaccaagatggttcccacatcaaaggcttgctgattaattttatccatcacaactggccctctcttctgcgacatcgttttctggaggaatttatcactcccattgtaaaggtatctaaaaacaagcaagaaatggcattttacagccttcctgaatttgaagagtggaagagttctactccaaatcataaaaaatggaaagtcaaatattacaaaggtttgggcaccagcacatcaaaggaagctaaagaatactttgcagatatgaaaagacatcgtatccagttcaaatattctggtcctgaagatgatgctgctatcagcctggcctttagcaaaaaacagatagatgatcgaaaggaatggttaactaatttcatggaggatagaagacaacgaaagttacttgggcttcctgaggattacttgtatggacaaactaccacatatctgacatataatgacttcatcaacaaggaacttatcttgttctcaaattctgataacgagagatctatcccttctatggtggatggtttgaaaccaggtcagagaaaggttttgtttacttgcttcaaacggaatgacaagcgagaagtaaaggttgcccaattagctggatcagtggctgaaatgtcttcttatcatcatggtgagatgtcactaatgatgaccattatcaatttggctcagaattttgtgggtagcaataatctaaacctcttgcagcccattggtcagtttggtaccaggctacatggtggcaaggattctgctagtccacgatacatctttacaatgctcagctctttggctcgattgttatttccaccaaaagatgatcacacgttgaagtttttatatgatgacaaccagcgtgttgagcctgaatggtacattcctattattcccatggtgctgataaatggtgctgaaggaatcggtactgggtggtcctgcaaaatccccaactttgatgtgcgtgaaattgtaaataacatcaggcgtttgatggatggagaagaacctttgccaatgcttccaagttacaagaacttcaagggtactattgaagaactggctccaaatcaatatgtgattagtggtgaagtagctattcttaattctacaaccattgaaatctcagagcttcccgtcagaacatggacccagacatacaaagaacaagttctagaacccatgttgaatggcaccgagaagacacctcctctcataacagactatagggaataccatacagataccactgtgaaatttgttgtgaagatgactgaagaaaaactggcagaggcagagagagttggactacacaaagtcttcaaactccaaactagtctcacatgcaactctatggtgctttttgaccacgtaggctgtttaaagaaatatgacacggtgttggatattctaagagacttttttgaactcagacttaaatattatggattaagaaaagaatggctcctaggaatgcttggtgctgaatctgctaaactgaataatcaggctcgctttatcttagagaaaatagatggcaaaataatcattgaaaataagcctaagaaagaattaattaaagttctgattcagaggggatatgattcggatcctgtgaaggcctggaaagaagcccagcaaaaggttccagatgaagaagaaaatgaagagagtgacaacgaaaaggaaactgaaaagagtgactccgtaacagattctggaccaaccttcaactatcttcttgatatgcccctttggtatttaaccaaggaaaagaaagatgaactctgcaggctaagaaatgaaaaagaacaagagctggacacattaaaaagaaagagtccatcagatttgtggaaagaagacttggctacatttattgaagaattggaggctgttgaagccaaggaaaaacaagatgaacaagtcggacttcctgggaaaggggggaaggccaaggggaaaaaaacacaaatggctgaagttttgccttctccgcgtggtcaaagagtcattccacgaataaccatagaaatgaaagcagaggcagaaaagaaaaataaaaagaaaattaagaatgaaaatactgaaggaagccctcaagaagatggtgtggaactagaaggcctaaaacaaagattagaaaagaaacagaaaagagaaccaggtacaaagacaaagaaacaaactacattggcatttaagccaatcaaaaaaggaaagaagagaaatccctggtctgattcagaatcagataggagcagtgacgaaagtaattttgatgtccctccacgagaaacagagccacggagagcagcaacaaaaacaaaattcacaatggatttggattcagatgaagatttctcagattttgatgaaaaaactgatgatgaagattttgtcccatcagatgctagtccacctaagaccaaaacttccccaaaacttagtaacaaagaactgaaaccacagaaaagtgtcgtgtcagaccttgaagctgatgatgttaagggcagtgtaccactgtcttcaagccctcctgctacacatttcccagatgaaactgaaattacaaacccagttcctaaaaagaatgtgacagtgaagaagacagcagcaaaaagtcagtcttccacctccactaccggtgccaaaaaaagggctgccccaaaaggaactaaaagggatccagctttgaattctggtgtctctcaaaagcctgatcctgccaaaaccaagaatcgccgcaaaaggaagccatccacttctgatgattctgactctaattttgagaaaattgtttcgaaagcagtcacaagcaagaaatccaagggggagagtgatgacttccatatggactttgactcagctgtggctcctcgggcaaaatctgtacgggcaaagaaacctataaagtacctggaagagtcagatgaagatgatctgttttaaaatgtgaggcgattattttaagtaattatcttaccaagcccaagactggttttaaagttacctgaagctcttaacttcctcccctctgaatttagtttggggaaggtgtttttagtacaagacatcaaagtgaagtaaagcccaagtgttctttagctttttataatactgtctaaatagtgaccatctcatgggcattgttttcttctctgctttgtctgtgttttgagtctgctttcttttgtctttaaaacctgatttttaagttcttctgaactgtagaaatagctatctgatcacttcagcgtaaagcagtgtgtttattaaccatccactaagctaaaactagagcagtttgatttaaaagtgtcactcttcctccttttctactttcagtagatatgagatagagcataattatctgttttatcttagttttatacataatttaccatcagatagaactttatggttctagtacagatactctactacactcagcctcttatgtgccaagtttttctttaagcaatgagaaattgctcatgttcttcatcttctcaaatcatcagaggccaaagaaaaacactttggctgtgtctataacttgacacagtcaatagaatgaagaaaattagagtagttatgtgattatttcagctcttgacctgtcccctctggctgcctctgagtctgaatctcccaaagagagaaaccaatttctaagaggactggattgcagaagactcggggacaacatttgatccaagatcttaaatgttatattgataaccatgctcagcaatgagctattagattcattttgggaaatctccataatttcaatttgtaaactttgttaagacctgtctacattgttatatgtgtgtgacttgagtaatgttatcaacgtttttgtaaatatttactatgtttttctattagctaaattccaacaattttgtactttaataaa

SEQ ID NO: 749 - protein, 1531 aa, Homo sapiens
  ref <308>: DATABASE ACCESSION NUMBER: Refseq / NP_001058
  ref <309>: DATABASE ENTRY DATE: 2003-01-15
MEVSPLQPVNENMQVNKIKKNEDAKKRLSVERIYQKKTQLEHILLRPDTYIGSVELVTQQMWVYDEDVGINYREVTFVPGLYKIFDEILVNAADNKQRDPKMSCIRVTIDPENNLISIWNNGKGIPVVEHKVEKMYVPALIFGQLLTSSNYDDDEKKVTGGRNGYGAKLCNIFSTKFTVETASREYKKMFKQTWMDNMGRAGEMELKPFNGEDYTCITFQPDLSKFKMQSLDKDIVALMVRRAYDIAGSTKDVKVFLNGNKLPVKGFRSYVDMYLKDKLDETGNSLKVIHEQVNHRWEVCLTMSEKGFQQISFVNSIATSKGGRHVDYVADQIVTKLVDVVKKKNKGGVAVKAHQVKNHMWIFVNALIENPTFDSQTKENMTLQPKSFGSTCQLSEKFIKAAIGCGIVESILNWVKFKAQVQLNKKCSAVKHNRIKGIPKLDDANDAGGRNSTECTLILTEGDSAKTLAVSGLGVVGRDKYGVFPLRGKILNVREASHKQIMENAEINNIIKIVGLQYKKNYEDEDSLKTLRYGKIMIMTDQDQDGSHIKGLLINFIHHNWPSLLRHRFLEEFITPIVKVSKNKQEMAFYSLPEFEEWKSSTPNHKKWKVKYYKGLGTSTSKEAKEYFADMKRHRIQFKYSGPEDDAAISLAFSKKQIDDRKEWLTNFMEDRRQRKLLGLPEDYLYGQTTTYLTYNDFINKELILFSNSDNERSIPSMVDGLKPGQRKVLFTCFKRNDKREVKVAQLAGSVAEMSSYHHGEMSLMMTIINLAQNFVGSNNLNLLQPIGQFGTRLHGGKDSASPRYIFTMLSSLARLLFPPKDDHTLKFLYDDNQRVEPEWYIPIIPMVLINGAEGIGTGWSCKIPNFDVREIVNNIRRLMDGEEPLPMLPSYKNFKGTIEELAPNQYVISGEVAILNSTTIEISELPVRTWTQTYKEQVLEPMLNGTEKTPPLITDYREYHTDTTVKFVVKMTEEKLAEAERVGLHKVFKLQTSLTCNSMVLFDHVGCLKKYDTVLDILRDFFELRLKYYGLRKEWLLGMLGAESAKLNNQARFILEKIDGKIIIENKPKKELIKVLIQRGYDSDPVKAWKEAQQKVPDEEENEESDNEKETEKSDSVTDSGPTFNYLLDMPLWYLTKEKKDELCRLRNEKEQELDTLKRKSPSDLWKEDLATFIEELEAVEAKEKQDEQVGLPGKGGKAKGKKTQMAEVLPSPRGQRVIPRITIEMKAEAEKKNKKKIKNENTEGSPQEDGVELEGLKQRLEKKQKREPGTKTKKQTTLAFKPIKKGKKRNPWSDSESDRSSDESNFDVPPRETEPRRAATKTKFTMDLDSDEDFSDFDEKTDDEDFVPSDASPPKTKTSPKLSNKELKPQKSVVSDLEADDVKGSVPLSSSPPATHFPDETEITNPVPKKNVTVKKTAAKSQSSTSTTGAKKRAAPKGTKRDPALNSGVSQKPDPAKTKNRRKRKPSTSDDSDSNFEKIVSKAVTSKKSKGESDDFHMDFDSAVAPRAKSVRAKKPIKYLEESDEDDLF

SEQ ID NO: 750 - DNA, 454 bp, Rattus norvegicus
  ref <308>: DATABASE ACCESSION NUMBER: EMBL / AA859680
  ref <309>: DATABASE ENTRY DATE: 2000-03-03
tttttttttttttttttaagttttatttaaaaaaccttcggtgcaatattaaaaagcaatacagccaggtggaacagtcgacagacagaaagggaaggagctagaggacccaaggtcctttacctcacctgttccccagaagctgggggtcaagggggagggtctgggggtggtgggacgaggaaaaaccaccaccaggatgaataggtagaacaaaacacatataagatacatctggctgaactgaagaggggtttggggccacaggaagctcccctggtttttgttgttcaaaaatgtcctggtttggggagaaagggtgacccctggcaaatgagccagccaagtcgtccgaccccacactccactgctgtggagaggggtgaactaaggtcacgggtgtgagaaaagggggaaaatggagaagggaatcccctcactggagtctgttagg

SEQ ID NO: 751 - DNA, 1330 bp, Homo sapiens
  ref <308>: DATABASE ACCESSION NUMBER: Refseq / XM_031299
  ref <309>: DATABASE ENTRY DATE: 2003-01-03
gcagcggcggcgccggcggtcgcctaacccgcggccgcgtgcaggggctgctggaggaggaggcggcggctcgaggccgtctggagcgcacccgtctcggagcgcttgcgctgccccgcggggacaggcccggacgggcgccgccggccgccagcgcccgcccgtctcgcagcaagagaggtggagaagagcgagtacttgagaaagaagaggaagaagatgatgatgaagatgaagatgaagaagatgatgtgtcagagggctctgaagtgcccgagagtgaccgtcctgcaggtgcccagcaccaccagcttaacggcgagcggggacctcagagtgccaaggagagggtcaaggagtggaccccctgcggaccgcaccagggccaggatgaagggcgggggccagccccgggcagcggcacccgccaggtgttctccatggcagccatgaacaaggaagggggaacagcttctgttgccaccgggccagactccccgtcccccgtgcctttgcccccaggcaaaccagccctacctggggccgacgggaccccctttggctgtcctcccgggcgcaaagagaagccatctgatcccgtcgagtggaccgtgatggatgtcgtcgaatattttactgaggctggattcccggagcaggcgacagctttccaagagcaggaaattgatggcaaatctttgctgctcatgcagcgcacagatgtgctcaccggcctgtccatccgcctcgggccagccctgaaaatctacgagcaccacatcaaggtgcttcagcaaggccactttgaggatgatgaccccgatggcttcttaggctgagcgcccagcctcacccctgccccagcccattccggcccccatctcacccaagatcccccagagtccaggagctggacggggacaccctcagccctcataacagattccaaggagagggcaccctcttgtccttatctttgccccttgtgtctgtctcacacacatctgctcctcagcacgtcggtgtggggaggggattgctccttaaaccccaggtggctgaccctccccacccagtccaggacattttaggaaaaaaaaaatgaaatgtggggggcttctcatctccccaagatcctcttccgttcagccagatgtttcctgtataaatgtttggatctgcctgtttattttggtgggtggtctttcctccctcccctaccacccatgccccccttttctctcctccctcttttctttctgttgattgtcgctccagctggctgtattgctttttaatattgcaccgaaggttttttaaataaaatttt

SEQ ID NO: 752 - protein, 132 aa, Homo sapiens
  ref <308>: DATABASE ACCESSION NUMBER: Refseq / XP_031299
  ref <309>: DATABASE ENTRY DATE: 2003-01-03
MAAMNKEGGTASVATGPDSPSPVPLPPGKPALPGADGTPFGCPPGRKEKPSDPVEWTVMDVVEYFTEAGFPEQATAFQEQEIDGKSLLLMQRTDVLTGLSIRLGPALKIYEHHIKVLQQGHFEDDDPDGFLG

SEQ ID NO: 753 - DNA, 596 bp, Rattus norvegicus
  ref <308>: DATABASE ACCESSION NUMBER: EMBL / AA800218
  ref <309>: DATABASE ENTRY DATE: 2000-03-03
aaagcctcttccttccacactctgccctggtgaagccagccgcccgcacgagcccgtcctccagagtgggccaggacaaggtcatggggaagggcataaggccaaggcctcaaagggccagtgggaaggtgaggacttaggcatagtgggtgcccggtgttagagaatggccccctctgtggtccagctggtcctgcaagcgggcaaactcggccagctcgttgagctcctggaactgtcggtccgtcttatggctgaccagtgagcggtagaagtgaacggcaaagacgataaacaccaggccacaggggaccatgatggcagtggaggcgatggcagccgcctcacccggggtgatgccaccgttgttgctgctgttggcgacgacgacggccggttcggtgggtggcttggtggggcttggctgtcccgcctgcctcttgagcggtaagaacttcacccagcagagcagcacgacttcggccaggaaaagcagcgtcccgatgacggtggagaagcccaagccagctcgatgtggcggtgcatgcgctcgtgcggcgactccttgacggagttgaggttgtggacgttgctca

SEQ ID NO: 754 - DNA, 1877 bp, Homo sapiens
  ref <308>: DATABASE ACCESSION NUMBER: Refseq / NM_032790
  ref <309>: DATABASE ENTRY DATE: 2001-12-10
agcaccaccagcggcagccgccggagccgccgccgcagcggggacggggagcccccgggggccccgccaccgccgccgtccgccgtcacctacccggactggatcggccagagttactccgaggtgatgagcctcaacgagcactccatgcaggcgctgtcctggcgcaagctctacttgagccgcgccaagcttaaagcctccagccggacctcggctctgctctccggcttcgccatggtggcaatggtggaggtgcagctggacgctgaccacgactacccaccggggctgctcatcgccttcagtgcctgcaccacagtgctggtggctgtgcacctgtttgcgctcatgatcagcacctgcatcctgcccaacatcgaggcggtgagcaacgtgcacaatctcaactcggtcaaggagtccccccatgagcgcatgcaccgccacatcgagctggcctgggccttctccaccgtcatcggcacgctgctcttcctagctgaggtggtgctgctctgctgggtcaagttcttgcccctcaagaagcagccaggccagccaaggcccaccagcaagccccccgccggtggcgcagcagccaacgtcagcaccagcggcatcaccccgggccaggcagccgccatcgcctcgaccaccatcatggtgcccttcggcctgatctttatcgtcttcgccttccacttctaccgctcactggtcagccataagaccgaccgacagttccaggagctcaacgagctggcggagtttgcccgcttacaggaccagctggaccacagaggggaccaccccctgacgcccggcagccactatgcctaggcccatgtggtctgggcccttccagtgctttggccttacgcccttccccatgaccttgtcctgccccagcctcacggacagcctgtgcagggggctgggcttcagcaaggggcagagcgtggagggaagaggatttttataagagaaatttctgcactttgaaactgtcctctaagagaataagcatttcctgttctcccagctccaggtccacctcctgctgggaggcggtggggggccaaagtggggccacacactcgctgtgtcccctctcctcccctgtgccagtgccacctgggtgcctcctcctgtcctgtccgtctcaacctccctcccgtccagcattgagtgtgtacatgtgtgtgtgacacataaatatactcataaggacacctccttcccgtgtcttgtatttgttgggcctgggctactgctcaccctggttaggtgagcctctaggaaaacttaaaacgaattttaagccaggtatggtggcacatacctgtggtctcagctattcaggaggccaaggcaggaggatctcttgagcccaggagtttgagaccccatctcaaacaaaaaatacaaaaattagccagccacggggcctgcacttccagctcctttgagagactgaggcaggaagattgcctaagcccaggaggccaagtctgcagtgagctatggtaacaccactgcactccaacctgggcaacagagggagactctgtctctaaaaaaatagaaaaatttgccctgcatggtggctcacgcctgtaatcctagccctttggaaggccaaggcgggcagatcacttgaggtcgggagttcgagaccagcctgaccaacatggagaaaccccatctgtactaaaaatacaaaattagctgggtttggtggcgcatgcttgtaatcccagctactcgggaggctgaggcaggagaatcgcttgaacccaggaggcggaggttgcagtgagctgagatcgcgccattgcactccagcctgggcaacaacagtgaaactccgtctc

SEQ ID NO: 755 - protein, 238 aa, Homo sapiens
  ref <308>: DATABASE ACCESSION NUMBER: Refseq / NP_116179
  ref <309>: DATABASE ENTRY DATE: 2001-12-10
MSLNEHSMQALSWRKLYLSRAKLKASSRTSALLSGFAMVAMVEVQLDADHDYPPGLLIAFSACTTVLVAVHLFALMISTCILPNIEAVSNVHNLNSVKESPHERMHRHIELAWAFSTVIGTLLFLAEVVLLCWVKFLPLKKQPGQPRPTSKPPAGGAAANVSTSGITPGQAAAIASTTIMVPFGLIFIVFAFHFYRSLVSHKTDRQFQELNELAEFARLQDQLDHRGDHPLTPGSHYA

SEQ ID NO: 756 - DNA, 5233 bp, Rattus norvegicus
  ref <308>: DATABASE ACCESSION NUMBER: EMBL / E12159
  ref <309>: DATABASE ENTRY DATE: 2000-09-02
aggcagccgccgccgcacttcctgaggccgccgctccgcgtcggcgggcaggtggctggtggccggtccgcagtcgccgctcgggccgcgcgcgtccaggcttcggagggttcggaggctccgggctccggcgcccgctgtcttttgtctgcgcagagccggcgctcgcctcccctcgccggtacctcccgctgcttttcgcctgcttctccctcccgctcacatcttctccccgcccccgccgccggtccgcgccggccgctgacctcctggaccacagcccgaggacgcctctgcccgagtgatgtctcctctctacaaagttgcggccgccgctgcagccgccgtcgcgcgctgaaacaaagtctagcggcgtttccttctggtgcctgagcgcacccttactcagggctggacgccgctggcggtcgtgctgtctcgccgggagcctagaacgtgcttggccatggctgagggcgcggctagcagggaggctccggcgcctctcgacgttgcggggggcgaagacgaccctcgagccggcgccgatgctgcctccggggacgctgcacccgaggcctcggggggccggatgagggaccgtcgcagcggggttgcgctgccgggcaatgcgggggtccccgcggatagcgaggctggcctcctggaggcggcacgagcgaccccccggcgcacgagcatcatcaaggatccttcaaaccaaaaatgtggtggcagaaagaaaacagtgtctttcagcagcatgccatcggagaagaagattagcagtgcccatgactgcattagcttcatgcaggctggctgcgagctgaagaaagtgcgaccgaactctcgcatctacaaccgatttttcaccctagacactgacctccaggctctacgctgggaaccttccaagaaagacctcgaaaaagccaagctggacatttctgccatcaaagagatcaggctggggaagaacacggagacattcagaaacaatggccttgctgaccagatctgtgaagactgtgccttctccatactccatggggaaaattacgagtctctggacctagttgccaattcagcagatgtagcaaacatctgggtgtcggggttacggtacctggtctctcgcagtaagcaaccacttgactttatggagggcaaccagaacacaccacggttcatgtggctgaaaacggtgtttgaagcagcagatgttgatgggaatgggattatgttagaagatacctcggtggagttaataaaacaactcaaccctactctgaaggaatctaagatcaggttaaagtttaaagaaatccagaagagcaaagaaaaactaactacccgggtaacagaagaggaattctgtgaagcgttctgtgaactttgcactagaccagaagtgtatttcttacttgttcagatatctaagaacaaagagtatctggatgctaatgacctcatgctctttttagaagttgagcaaggggtcacccatgtcactgaggatatgtgcttagacatcattaggagatacgaactttctgaagatggccgccagaaaggcttccttgcaattgatggctttacccagtatttattatctccagaatgcgacatttttgatccagagcaaaagaaggttgcccaagacatgacccaacccttatctcactactatatcaatgcgtcccataatacctacctgatagaagatcagttcagggggccagctgatatcaatgggtatgtgagggctttgaagatgggctgtcgaagcattgagcttgatgtaagtgacggtccagataatgaacccatcctgtgcaataggaacaacatggccatgctcctttcctttcgaagtgttctggaggtgataaataagttcgccttcgtcgcttcagagtacccactcattctctgcttggggaatcactgttccctgccacagcagagggtcatggttcagcagatgaaaaaggtgtttggcaataaactttatacagaagcacctctgtcttcagaatcctacctcccgtcgcctgaaaaactaaaacatatgatcattgtgaaaggaaagaaattgccttcggagtcagatctgttagagggagaagtgaccgacgaggatgaagaagctgagatgtcccggagggtgtcgggagattacaacggtgagcagaaacatatctggctctgccgagagctctctgacttggtatccatctgtaaatccgttcagtacagggattttgaactgtctatgaaaacccagaactactgggaaatttgttcatttagtgaaacattggccagccggatcgcaaatgagtatccagaggatttcgtgaattataacaagaagttcttatcaagggtctaccctagtgccatgaggatagattccagtaatttgaacccacaggacttctggaattgtggctgtcagattgtggcaatgaattttcaaactcctggtccaatgatggacctccacaccggctggtttcttcaaaatgggggctgtggctacgtcctcaggccatctatcatgcgagatgaagtttcgtactttagtgcaaacacaaagggcattgtccctggagtgtctcccctgcttcttcacatcaagatcatcagtggtcagaacttcccaaagcccaaaggagcttgtgccaaaggggatgtcatagacccctacgtttgtgtagagattcatggaattccagctgattgctccgagcaaagaactaaaactgtacaacagaacagcgataatcccattttcgatgaaactttcgagtttcaagtcaaccttcccgagctgaccatggtccgttttgtcattttggatgatgattacattggagatgagttcattgggcaatacacgataccgtttgaatgtctgcaacctgggtaccggcatgtccccttgcgctcctttgtgggggatatcatggaacatgtgaccctttttgtccacatagcaataaccaatcggagtggcggaggaaaagcgcagaagcgaagtctttccgtgagaatggggaagaaagttcgagaatacaccatgctcagaaatatcggtcttaaaaccatagatgatatcttcaaaatagcagttcatcctttgcgagaagccatagatatgagagaaaacatgcagaacgccatagtgtctgttaaggagctgtgtggactcccaccgattgccagtctgaaacagtgcctgttaaccctgtcctctcgtctcatcaccagtgatagtactccctccgtgtctctggtgatgaaggactgctttccttacctggagcctctgggcacaattccagatgtgcagaagaggatgctggctgcatatgatctgatgattcaagagagtcgggtcctcatagaaatggctgacacagtccaggaaaaaattgtacagtgtcagaaagcagggatggaattccatgaagaacttcataatctaggggcaaaggaaggcttgaagggaagaaaactcaacaaggccatcgagagcttcgcttggaatattactgtattgaagggacaaggagacctgctgaagaatgccaagaatgaagccgtagagaacataaagcagatccagctggcctgtttgtcttgtggactgagtaaaggccctggcagcgctgcagaggccaagggcaagcgcagcttggaagccatagaggagaaggaaagcagtgaagagaacgggaagttgtgagctgggcagtgcgcaggcccttgtccaacactctggtttctcattcttctcgttttgttttgtttttacattcttcagatgttcacagaaatgatgccctttgcggggtgttgtacataaacatatattttcacagtgtcagtattttactgtagttaatttatctaagttaaaacttttagtagcagtgttttaaactttgagctgtgagtatatacttacatgtggctgcctgtgtgtgtgtgtgtgtgtgtgtttgtgtgtgtgtgtgtgtgtgtgtgtgtgtgtgtgagagagagagagagagagagagagagagagagagagagagagagtaagagttcctgttaaaatattctctgtcgcattgttggttttaataagttattcttttatctttaagatcatttggggatagttgataatctgaattctaatgagcatttattataaccccttgctgtcgttagttttacctctctgcctttgtcatataatttggagatctcagcacagcttatgattgaagaaaaccaaatttataagagcaaaggcgttttatagattacatagagatttaaaagttcctaaacattacattagaaatgaaagtgaatagaaaaatcttttaaaatcataattctggaaagataaacaaattcatttcttcattagcaaaatctttgagatatttattaactaaaatcacatttaggaagtttctgtagctgtttactgagcatgtggtttcggtagaagagctgagtgcagagaacctgtagccactgggcagtactttgaagcccactaaatgctctactgaactagcactgttgatgtgaccataacactcagttgtgcaatttcaaggtttgcagaaagacctcattctcctgggccgggagtatggaattcattttctattaccagtggtgggcagatccaagtgcttggccaggactagatctagtatagattactaaatttaagtgtcaacaccttgttaaaataatatattatcatgttgagctggcataaattctgtaagtccgataacatctttctgatgatttgagaactaactaattagacaacatgtatggtataattttaaaacatacagtaaaaaccaagagcaagtggctaattagggtacatttataattatatctagataatcttaccctaatgtcttcataaacttcttaaatgtcatgttcattcattaccaccaacagaactaaatgttctatgattatgaaagaatatatttgtttaaaacattgcttttattttgaaaagcttcttaattaatttgattaacaaatatattaatttgggggagcctagagaagataatcattgaaattttgcaaatataaacatcctctacagctactatgttatttctgactgttcttaatactactctgttcttgtcgcacattaccaaaagagtaaagatactgaaaacag

SEQ ID NO: 757 - DNA, 511 bp, Rattus norvegicus
  misc_feature (1)..(511): n=a, c, g or t
  ref <308>: DATABASE ACCESSION NUMBER: EMBL / AA894233
  ref <309>: DATABASE ENTRY DATE: 2000-03-03
ctttaggaatcccaggatagagacctgtggctgggggagagcattgctgcnttgatctccagagaccagaggggcaactgagtcctcgagtgatttccaggttaccaccctgcttctttctgcttgcttttggccttggcctctggttatgggtggcaagagtccttgagatagcagcctccgtgggatttccagtccatccccatttggactgtgaccaaggtctgttccacactggagttgagacttgactctctctcccagagactgaccactcaccggcagctctgcccctggctctgctgtcgtgggtgccacccagcaagctcaccctttgttggggcaggatcaactgtctgcaggaagctggccatgtcagagcttcacagagcgtgccaggactctccagtgacaggctttgtgtgatttctttacaatactctggatgaatctatctgcagggaacgcaggtttccaagaggaggggaatatcacaataaagggctatgtt

SEQ ID NO: 758 - DNA, 3851 bp, Rattus norvegicus
  ref <308>: DATABASE ACCESSION NUMBER: Refseq / NM_019384
  ref <309>: DATABASE ENTRY DATE: 2003-01-14
cctaatgataaagatggctctcggtgttgtggcctacaatggaggcgctgctgtcggagtcctcggtcagagcctcgttcacaggagtcagggggtgctgacatggccactgtactggacacagctgcagatagtttccttgtggaggtggtgagcatcctggatccccccgacacctgggttcccagccacctggaccttcagcctggcgaaagtgaggacgtgctagagctggtagctgaggtccgtatcggtgacagggaccccatgcctctacctgtgcccagcctgttgccccgcctcagggcctggaggacaggaaagacggtttctccacagtcccatgcatctcgacctgcctgttcccgtcacctcctcaccttgggcacaggggatggagggcctgccccaccacctgcaccctcctctggctcatcctcgccttccccttccccatcttcgtcttctccttctcctccccctcctcctccacccccaccccctccagctctgcctgccccacgatttgacatctatgatcccttccaccccaccgacgaggcctactccccaccgccagccccagagcaaaaatatgatccctttgaggccacgggctccaaccccagctcatcaggtgggaccccctcgccagaggaggaggaggaagaagaggaggaagaggaagaggagggtctatcacagagcatcagacgaatctcagagaccctggctggcatctatgatgacaacagcttgagccaggacttcccaggtgatgatagcccccaccgggaacccccacccccgcagacgctgggagccccagggacaccaccacaggctgactccactcgggccgaaggggccccacgccgcagggtctttgtggtgggaccggaggctgaggcatgtcttgagggcaaggtttcggtggaagtcgtgacgacggctggtggaccagcgctgccgctgccaccacttcccccgactgatccagagatagaggaaggcgagattgtgcagcctgaggaggagcccagggtggcagtgtcactgttccgtgctgcacgacctcgtcagcctcctgcctctgtagccaccttggcttcagtggccgcccctgctgcgcccccagcctctgctccacgtgcccctgagggtgatgacttcctgtcactacatgctgactctgatggtgagggcgcacttcaagtggacctaggtgagccacctgcaccaccggctgctgatgcccgctggggcggcctggacctgcgccgcaagatcctaacccagcgacgtgagcgctaccgccagcgctctgcctcgccaggcccaccgcctgctcggaagaaggctcgaagagagcggcagcgcagtggcgaccctgcgccaccggattcgcccacctgggaagctaagaagcaccgttcacgtgagcgcaagcttggctcccactccactgcccggcgtcgatcacgctcccgttcccgccgccgttcacgctcccgcagcgccgaccgaagacgtgggagccaccgctcacgttcccgggagaagcgcaggcgccgacggcgttccgcctctccacctccagcggcatcttcgtcatcttcctcgagacgtgagcggcacaggggcaagaggcgtgagggtggcaagaagaagaagaagcgctcgcgctcccgggcagagaagcgctctggggacttagagaagctgcccgcacctgtgcctccctcgggctctgaccgtgacagccgacgccgcggagccgtgccaccttctatccaggacctcacggaccacgacttgtttgccatcaaacgaaccatcacagtgggtcgcccagacaagacggagccacgcgcaccttcgccagcacctgctgtgtccccaaagggggaggtcctgtatgactctgagggtctgagtgcagatgagcgaggtgccaagggtgacaaagatcgcaggcgttcaggggctgcgtcctcatcctcgtcctcaagggagaaagcgtctcgacggaaggccctggatggggaccgggggcgagacagggacaggtcatccaagaagccacggacacctaaggactctgctcctggctcaggggcgctgcccaaagcacccccaagaagtggctcctcgtcctcgtcgtcctcctgctcctctcgaaaagtaaaactgcagtccaaggtggctgtgctcatccgagagggcgtcagcagcaccacccctgccaaggattcctcgtcttcgggcctgggttccattggggtcaagttcagccgagaccgtgagagccgttcaccattcctcaagccggatgagcggtctcctgcagagggggtcaaggtggccccaggcagcaccaagcctaaaaagaccaaggccaaagccaaggctggggccaagaaagccaaggggaccaagggaaagacgaagccgtcgaagactaggaagaaggttcgcagtggaggcagcagcacggccagtggtgggcctggttcactgaagaaatccaaggccgatagctgcagccaggcagccagcgccaaggggacagaggaaacatcatggtctggggaggaacggaccaccaaggcccccagtacccctccacctaaggtagccccacctccacccgcactcaccccggactcccagactgtggatagcagctgcaagacccctgatgtctccttcctagcagaggaagccagtgaggacactggggtccgagtaggggcagaggaggaggaggaagaggaagaagaggaagaggaggaagaggagcagcagcctgccactaccacagccaccagcaccgctgcagctgccccaagcactgcccccagtgcggggtctacagctggagactccggcgcagaggacgggccagctgctagggcctcccagctgccaacgctacccccacccatgccctggaacctacctgctggtgtggactgtactaccagtggtgttctggccttgactgcactcctgttcaagatggaagaagccaacctggccagccgcgcaaaggcccaggagctgatccaggacaccaaccagatcctcaggcaccggaagccaccctctactctgggggtgaccccagctcccgtgcccacttcctttggtctgcccccagccccctccagctacctgcttcctggcagcctccccatagggggctgtggctctacccctcctacccctacagggctagtccctgcatctgacaagagagagggcagcagcagctcagagggacgtggggacactgacaagtatctgaagaagctgcacacacaggagcgggcggtagaggaggtgaagctgtccatcaagccatactaccagaagaaagacatcaccaaggaggagtataaggacatcctgaggaaggctgtccacaagatctgccacagcaaaagcggggagatcaaccctgtcaaggtgagcaacctggtaagggcctacgtccagcgctaccgctacttccgcaagcacggtcgcaagccgggggaccccccaggacctcctcggccacccaaggagccaggccccccagacaagggtggcccaggcctgcccctgccccctctctaagactccttaccctgtccctgtgcctctgagattctggacatatttatggctccacttccccactatgcccccccacagtgggatgatggggaaggttgctgtgaggaagaggagagcccaccctagccctatccctacccgttgacctagcctgcccccacagtcccagcccttctgtcatgccccctccagtttcattaaagatttcataaaaaaaaaaaaaaaaa

SEQ ID NO: 759 - protein, 1173 aa, Rattus norvegicus
  ref <308>: DATABASE ACCESSION NUMBER: Refseq / NP_062257
  ref <309>: DATABASE ENTRY DATE: 2003-01-14
MATVLDTAADSFLVEVVSILDPPDTWVPSHLDLQPGESEDVLELVAEVRIGDRDPMPLPVPSLLPRLRAWRTGKTVSPQSHASRPACSRHLLTLGTGDGGPAPPPAPSSGSSSPSPSPSSSSPSPPPPPPPPPPPALPAPRFDIYDPFHPTDEAYSPPPAPEQKYDPFEATGSNPSSSGGTPSPEEEEEEEEEEEEEGLSQSIRRISETLAGIYDDNSLSQDFPGDDSPHREPPPPQTLGAPGTPPQADSTRAEGAPRRRVFVVGPEAEACLEGKVSVEVVTTAGGPALPLPPLPPTDPEIEEGEIVQPEEEPRVAVSLFRAARPRQPPASVATLASVAAPAAPPASAPRAPEGDDFLSLHADSDGEGALQVDLGEPPAPPAADARWGGLDLRRKILTQRRERYRQRSASPGPPPARKKARRERQRSGDPAPPDSPTWEAKKHRSRERKLGSHSTARRRSRSRSRRRSRSRSADRRRGSHRSRSREKRRRRRRSASPPPAASSSSSSRRERHRGKRREGGKKKKKRSRSRAEKRSGDLEKLPAPVPPSGSDRDSRRRGAVPPSIQDLTDHDLFAIKRTITVGRPDKTEPRAPSPAPAVSPKGEVLYDSEGLSADERGAKGDKDRRRSGAASSSSSSREKASRRKALDGDRGRDRDRSSKKPRTPKDSAPGSGALPKAPPRSGSSSSSSSCSSRKVKLQSKVAVLIREGVSSTTPAKDSSSSGLGSIGVKFSRDRESRSPFLKPDERSPAEGVKVAPGSTKPKKTKAKAKAGAKKAKGTKGKTKPSKTRKKVRSGGSSTASGGPGSLKKSKADSCSQAASAKGTEETSWSGEERTTKAPSTPPPKVAPPPPALTPDSQTVDSSCKTPDVSFLAEEASEDTGVRVGAEEEEEEEEEEEEEEEQQPATTTATSTAAAAPSTAPSAGSTAGDSGAEDGPAARASQLPTLPPPMPWNLPAGVDCTTSGVLALTALLFKMEEANLASRAKAQELIQDTNQILRHRKPPSTLGVTPAPVPTSFGLPPAPSSYLLPGSLPIGGCGSTPPTPTGLVPASDKREGSSSSEGRGDTDKYLKKLHTQERAVEEVKLSIKPYYQKKDITKEEYKDILRKAVHKICHSKSGEINPVKVSNLVRAYVQRYRYFRKHGRKPGDPPGPPRPPKEPGPPDKGGPGLPLPPL

SEQ ID NO: 760 - DNA, 434 bp, Homo sapiens
  misc_feature (1)..(434): n=a, c, g or t
  ref <308>: DATABASE ACCESSION NUMBER: EMBL / AA983900
  ref <309>: DATABASE ENTRY DATE: 2000-03-03
caggggtaatgtttcatgaaatctttaatgaaattggggagaggggcacaacagaaaggagggggccctgggaccagccttggggcaaaggaagttggcaccgggcaaggcaggggaggggggtccccccctcccctgaacaaaccctccccaatcatcccactgacgggggagggaggtggggaggtggaaccataaaatactccagagtttccaaaaaggtgaggggcgaagagctggccaggctctcagagagggggcagggcaggccgggcacccttgtctgggggcctgctccttgggcggccgtgggggcctggggggtccctggcttgcgaccgtgcttcggaagtagcggtagatnggacgtaggccgcaccaggttgctcccttcactgggttgatttcccacttttgctgtggagatcttgtgg

SEQ ID NO: 761 - DNA, 492 bp, Rattus norvegicus
  ref <308>: DATABASE ACCESSION NUMBER: EMBL / AA893180
  ref <309>: DATABASE ENTRY DATE: 2000-03-03
agccacagatgtcaaactacctgaattgtacgagcaccaacttggtaacagcctttcttcatggaaaccagcagcccggatgggatgaggtaggcaccttgccaccctcctacccactgtgggggtgtggcgtgtctgcttgcttgcctgaggatgctcctctgttggcctggctctaacccctggattctggagtgtgcttcccaccagcaacctgagggtctgtcagcagtttaagtgactctgggctctctttgcctgtatagctgtccatagggctcagtggccagaagctctaaaacagcaagagcctgttaggttcaggagctcattagtgtctcgagcaatgtgaggcctggaccaccggacacagagggtgatgagggcacgatggggacggtgaggggagacaagcctccttcctgtcctcaacatccaatcactcccactgctcagtgtagagcgatggcaaaggtgacctctataatgtcc

SEQ ID NO: 762 - DNA, 1133 bp, Rattus norvegicus
  ref <308>: DATABASE ACCESSION NUMBER: Refseq / NM_139089
  ref <309>: DATABASE ENTRY DATE: 2003-01-13
cctcggctgagctgcattccaatcccagctacatccggagcccagctacattcgagcccagccacatcccgagccaaccttccagaagcaccatgaacccaagtgctgctgtcgttctctgcctcgtgctgctgagtctgagtgggactcaagggatccctctcgcaagaacggtgcgctgcacctgcatcgacttccatgaacagacgctgagacccagggccataggaaaacttgaaatcattcctgcaagtctatcctgtccgcatgttgagatcattgccacaatgaagaagaacaatgagaagaggtgtctgaatccggaatctgaggccatcaagagcttattgaaagcggtgagccaaagaaggtcaaaaagagctccgtaactagagagaagccactcgccacagtgctgagaccgatggacagcagagagacggtctctccacctccctttacccagtgtgcggctagtcctaactgtccctgtttctcctgaccatggtcccatcagctggtactcccactacagcgtgatggacaaggcctggtcctgagacaaaagtaactccagcagcaaggcttcccaattctctaagagctggtccgaatcttccctcaggcagctatgacggctctcctagctctgttccgtaagctatgtgcaggtactaatctcttcagcatgtgccatgccccagcctgctccacacaccctccttctccctagctctaagctcatcagttctgagttcacctgagctcctttatttcaaatgcagtccaggtgagatggcaaatcaagtttgtcagaacaaacttaccaccaccttcccaagggaatttcataactcagaatactcacaggaacctagacatgcatgtttaaatattatttaatgaccgactgtacaaagtggaactcctagatgtattttttgtacgattttcattgtatatgtaagaacttgtgtggttaagtatgtatcaatgggtagttaaagtttacataggcaaatgctttgaatgctacatattacaagatgtgttggatggttttcaaaataaaatgtactgtattgaatgtagtatgagacaaaaaagtaataaagtaataataactgacatga

SEQ ID NO: 763 - protein, 98 aa, Rattus norvegicus
  ref <308>: DATABASE ACCESSION NUMBER: Refseq / NP_620789
  ref <309>: DATABASE ENTRY DATE: 2003-01-13
MNPSAAVVLCLVLLSLSGTQGIPLARTVRCTCIDFHEQTLRPRAIGKLEIIPASLSCPHVEIIATMKKNNEKRCLNPESEAIKSLLKAVSQRRSKRAP

SEQ ID NO: 764 - DNA, 2547 bp, Rattus norvegicus
  ref <308>: DATABASE ACCESSION NUMBER: Refseq / NM_017197
  ref <309>: DATABASE ENTRY DATE: 2003-01-23
ggcaaggattatttcttcctagtgagtctgcaggagcccttttctgtactattcagcatctgaaagagaagagtggagagagagagagagagagagagaggttgctgtcgacgagcgagagaaagagagagagagagagagagagagagagagagggtaattacacgcccttaaaactagccaggtgtactctcgtgcggaaattagagtaacggcacagccaacaagatgaacggagctttggatcattccgaccagccagacccagatgccattaagatgtttgtcggacagatccctaggtcctggtcagaaaaggagctgaaagaactttttgagccttatggagctgtctaccagatcaacgtcctccgggaccggagtcagaaccctccccagagcaaaggttgttgtttcgtaacattttatacaagaaaagctgcacttgaggcccagaatgcactgcacaatattaaaactttacctgggatgcatcatcccattcagatgaaacctgcagatagtgaaaagtcaaacgctgtggaagaccgaaaattgttcataggaatggtttccaagaagtgtaacgagaatgacatcagagtgatgttttctcccttcggtcagatagaagaatgccggattctccggggacctgacgggctgagtcgaggctgtgcgtttgtcacattttctaccagggcaatggcacagaatgcaatcaaagccatgcatcagtctcagaccatggagggctgctcttcacctatcgtggtgaagttcgctgacactcagaaggacaaggagcaaaggcgcctccagcagcagcttgcacagcagatgcaacagctcaacactgccacttgggggaacctgacaggactgggtggacttaccccacagtacctggcgcttctgcagcaggccacctcctccagcaacctgggtgcattcagtggcattcagcaaatggctggcatgaatgctttacagttacagaatctggcaacgctggctgcagctgcagctgccgcccaaacctcagccaccagcaccaatgcaaaccctctctccagcacaagcagtgccctgggggccctcacaagtcccgtggctgcttcaacccccaattctactgctggtgcagccatgaactccttgacctctcttgggactctgcaaggattggctggagccactgtcggattgaataatattaatgcactagcagttgctcaaatgctctcaggtatggcggctctgaatggaggacttggcgccacaggcttgacgaatggtacggctggcaccatggacgccctcacgcaggcctactcaggaattcagcagtacgcggcagctgcactgcccactttgtacagccagagcctgctgcagcagcagagcgctgcaggcagccagaaggaaggtccagagggggcaaacctctttatttaccaccttccacaggagtttggagaccaggacattctgcagatgttcatgccctttggaaatgttatctctgctaaagtcttcattgacaaacagaccaatctgagcaagtgctttggttttgttagctatgacaatccagtctctgcacaagctgcaatccaggctatgaacggctttcagatcggcatgaaacgcttgaaggtgcagctgaagcgctccaaaaacgacagcaaaccttactgatcctaaccccagaagctccctgctcttattttagctttcttagggtaagtcccacaagccagcctgttctcaacagggaaggcagaggagggaccacaatgccaacttttaccaagagagacggttatttttacattaaggcctccgtttcttccactaatgccccacccagtctgccataatcaaaacctgggctaccttgttcttattgagtaaaccccacctccaattgtgccactgattctccttggttttgcaatttgaatatccttactcttttaagaaaaatttgttttgcttttttaaagagaaacatataaacaagtaaatgacatcttgagaatttgaaaggcaagcaaacactaacgtgcaattctaactctgaaaccacgggtgccccgagagcactgcctggagaactcaccctccctgcccgcccgcccaccgcccgcccctcggagggccccacgattagagatggcgtggtggccagcagagggagaagccaggagagactctaactccacaaaactccacaaaacaccctcccacctacattggtttcttttaatataagtaggattttattttagggttcaaagaaacatgacatttattggtcagatgattacactggttgtctattttgttattgttttatttttgtttttagaaaggattaatgtaaaaaaagatttagagatctgtttcttaaagctacagggtttaaaaataaaataaaatgagtgaaaatacttgtgtttcttgaaatgataaatttaataataaataaatacataaataatacataaataaaaagaagccacaggcctgtaaattttattt

SEQ ID NO: 765 - protein, 490 aa, Rattus norvegicus
  ref <308>: DATABASE ACCESSION NUMBER: Refseq / NP_058893
  ref <309>: DATABASE ENTRY DATE: 2003-01-23
MNGALDHSDQPDPDAIKMFVGQIPRSWSEKELKELFEPYGAVYQINVLRDRSQNPPQSKGCCFVTFYTRKAALEAQNALHNIKTLPGMHHPIQMKPADSEKSNAVEDRKLFIGMVSKKCNENDIRVMFSPFGQIEECRILRGPDGLSRGCAFVTFSTRAMAQNAIKAMHQSQTMEGCSSPIVVKFADTQKDKEQRRLQQQLAQQMQQLNTATWGNLTGLGGLTPQYLALLQQATSSSNLGAFSGIQQMAGMNALQLQNLATLAAAAAAAQTSATSTNANPLSSTSSALGALTSPVAASTPNSTAGAAMNSLTSLGTLQGLAGATVGLNNINALAVAQMLSGMAALNGGLGATGLTNGTAGTMDALTQAYSGIQQYAAAALPTLYSQSLLQQQSAAGSQKEGPEGANLFIYHLPQEFGDQDILQMFMPFGNVISAKVFIDKQTNLSKCFGFVSYDNPVSAQAAIQAMNGFQIGMKRLKVQLKRSKNDSKPY

SEQ ID NO: 766 - DNA, 3915 bp, Rattus norvegicus
  ref <308>: DATABASE ACCESSION NUMBER: Refseq / NM_031544
  ref <309>: DATABASE ENTRY DATE: 2001-05-02
tgtgtgtgtgtgtgtgtacatgcgcgcgcccgtgtgtgttgggaggggcgggaaggtgattcaagggaccagttcaacacctggagaacaccaacgcttgctggtcggtttagctaccaagaccgagatgcctcgccaattccccaagttgaacatgtccgatttggacgaacatgtccggctgttggcagagaaggtgttcgctaaggtgctccgagaagaggacagcaaagatgttatgtccctgtttactgtccccaaggactgtcccatcggacagaaggaagccaaggagagggagctacagaaggagttggcagagcagaagtctgtggagacagcaaaaagaaagaagagtttcaagatgatccggtcgcagtctatgtccctgcagatgccaacacaagactggaaaggtcctccatctgtcagtccggccatgtctcctacaacccctctggtccttggagctgcttctaagcctgggctggcaccctatgacatgcctgagtatcagcgagccaccatcagtggagattactgtgcagggatcactatggaagactatgaacaggctgccaagagcctggccaaggccctgatgatccgggagaagtatgcacggcttgcctatcaccgcttcccgcggaccacagcccagtacctggctcatcagggggaaagtgtgcctttggaagagggtctcccagacttccaccctcccccactgccccaggaagacccttattgcctggacgatgcgccccccaacctgggctacctggtccgcatgcagggaggtgttctctttgtgtatgacaatcagacgatgttggaacgccaggaaccccacagcctgccctaccctgacctggagacctacatcgtggacatgagccatattctggcactcatcaccgatggccccacgaaaacctattgtcaccggcgactgaactttctggaatccaagtttagccttcatgagatgttaaatgaaatgtcagagttcaaggaattgaagagtaatccccacagagacttttataatgtgagaaaggtagacacacacatccatgcagcggcctgcatgaatcagaagcacctgctgcgtttcatcaagtacacataccagacagagccggacagaactgtggccgagaagctcggccggaagatcaccctgcggcaggtgtttgacagcctgcacatggacccctacgacctcacagtggactcgctggatgttcatgcgggccggcagacatttcacggcttcgacaagttcaactccaagtacaaccctgtgggggccagtgagcttcgggacctgtatttaaaaactgaaaactacctggggggagagtactttgctcgcatggtcaaggaagtggcccgggaattggaggacagcaagtaccagtactcagaaccccggctgtccatctatggtcgcagtcctaaggaatggtctagcctggcccgctggttcattcagcacaaggtctactcgcccaacatgcgttggatcatccaggtgccgcggatctatgatatatttaggtcaaagaaactactgccaagctttgggaagatgctggagaacatcttcctgccccttttccaggctactatcaaccctcaagaccatcgggagcttcacctcttccttaaatacgtgacagggtttgacagcgtggatgatgagtccaagcacagtgaccacatgttctcagacaagagccccagcccagacctctggaccagcgagcagaacccaccctacagttactacctgtactacatgtatgccaacatcatggtgctgaacaacctccgcagggaacgaggcctgagcacattcttgttccgacctcactgtggggaagccggctccatcactcacctagtgtctgccttcctgactgcagacaacatttcccacgggctgctcctcaagaagagtcctgttttgcagtatctctactaccttgctcagattcctattgccatgtctcctctcagcaacaacagcctgtttctggaatattccaagaacccacttcgggaattcctacacaagggattacacgtctctctctctactgatgaccccatgcagttccactacaccaaggaagcgctcatggaggagtacgccatcgcagcccaagtgtggaagttgagtacgtgtgacctgtgtgagattgccaggaacagcgtgctgcagagcggcctctcacatcaggagaagcagaagtttttgggtcagaattattacaaggagggaccggagggcaatgacatccgaaagacaaatgttgcacagatccggatggctttccgctacgagaccctgtgtaacgagctcagctttctgtccgatgccatgaagtcagaggagatcacagccctggcggactaggccagcgatccacacacactttcatcttttggtttaatgtcaggtctgctggggctaacggtgcccagatctcaaaccggggcttccgtctgtgacgaggacacctctgaagaaatctcaagctcccagttttggttgcactttatgaacatgctcacttcattagcgtttctgagccagaggctggctctcttccatggggctctgggagctggcactgtgtacacctgctccttggttgtccgagtctcctgtgattaccaatgtttatatggttggggctgggactttgcaaggctgaatgccaagtgacacaaggcctgtctggtgtctgccacagtcctcccagcagaccctgtagagcaattctctctttggtatctggctggctggctgcctgaacccccaccaaagccccttttataaagggctacctagagaaaatacaaagctccctgctgacgattgtgcacttttaaaacagtttttttccctgtgagcacccctccttcctgtctaggtaggaagcccaacgcaccctctgaggtcatcacttctgttattttcctcatctaggaatgagtcatctcaaaccatgttctgtgaacccatctcatggtccactcctaggcctggggaagatacagggcgaggttctggggctgttctcacttttttgtttttttaaatgaaggcctttgaaaagcataggacctccgctccttttggctctaatgtcctatgattgtagctgtcaccaccttcccccaggagtcagaccagggactgactcctcaggggagtgaaatgtttcaggacatacaggactagagccaagttcctgatccagtcacacccggtccccgactcccctgcttccacctactattttaggcttcacatattttaatttttttttaaagaatcactgtaacagtgcattttattttaaagcagatttcttcagaagctatcatggtcccagggaccaggtagagttaagtttaatgtggactctagctttatcagactactcatctttgttactagtgcctagaacatagtaggtgctcaataaatacatatggagtaattgaattactttctcttttggcatctgtatgtacagaatactgaacaatgttcaaagatcttcctaactgttcacaaggcaggaagtcctgtaccatacttagatgaacctaattgcacctggaagatgctcatgtaactaattacccccgtcctgtgactctgccagccttccagtgttcacacagcgtatggaaggaaccatgtcatgccttactaggcaaataaacataccaccctacatagctgattatgaaaccgaatgaaacctgtcgttatgagggattatttttgaaaagcctccatttgtatacatttgcccaaacatagcaagtattgtacagtttttcattgtatcaaatacttttttaaagactacaaataaagtctgttaggac

SEQ ID NO: 767 - protein, 801 aa, Rattus norvegicus
  ref <308>: DATABASE ACCESSION NUMBER: Refseq / NP_113732
  ref <309>: DATABASE ENTRY DATE: 2001-05-02
MRAPVCVGRGGKVIQGTSSTPGEHQRLLVGLATKTEMPRQFPKLNMSDLDEHVRLLAEKVFAKVLREEDSKDVMSLFTVPKDCPIGQKEAKERELQKELAEQKSVETAKRKKSFKMIRSQSMSLQMPTQDWKGPPSVSPAMSPTTPLVLGAASKPGLAPYDMPEYQRATISGDYCAGITMEDYEQAAKSLAKALMIREKYARLAYHRFPRTTAQYLAHQGESVPLEEGLPDFHPPPLPQEDPYCLDDAPPNLGYLVRMQGGVLFVYDNQTMLERQEPHSLPYPDLETYIVDMSHILALITDGPTKTYCHRRLNFLESKFSLHEMLNEMSEFKELKSNPHRDFYNVRKVDTHIHAAACMNQKHLLRFIKYTYQTEPDRTVAEKLGRKITLRQVFDSLHMDPYDLTVDSLDVHAGRQTFHGFDKFNSKYNPVGASELRDLYLKTENYLGGEYFARMVKEVARELEDSKYQYSEPRLSIYGRSPKEWSSLARWFIQHKVYSPNMRWIIQVPRIYDIFRSKKLLPSFGKMLENIFLPLFQATINPQDHRELHLFLKYVTGFDSVDDESKHSDHMFSDKSPSPDLWTSEQNPPYSYYLYYMYANIMVLNNLRRERGLSTFLFRPHCGEAGSITHLVSAFLTADNISHGLLLKKSPVLQYLYYLAQIPIAMSPLSNNSLFLEYSKNPLREFLHKGLHVSLSTDDPMQFHYTKEALMEEYAIAAQVWKLSTCDLCEIARNSVLQSGLSHQEKQKFLGQNYYKEGPEGNDIRKTNVAQIRMAFRYETLCNELSFLSDAMKSEEITALAD

SEQ ID NO: 768 - DNA, 3915 bp, Homo sapiens
  ref <308>: DATABASE ACCESSION NUMBER: Refseq / NM_000480
  ref <309>: DATABASE ENTRY DATE: 2000-10-31
cccctgctgctctcaagtttcccgttggcgccgcggcccgggcgcttcaggtagcctctcggctctctctgctccgctccgcgcccaggtagggcaccgacgggggctgcacgcggctggccggcttcctccctgctgaggcggccctccctcctcccgcggggccctcctggccggggatccgcagcgctgcgccctctgaacgcccggcccccgcgcctgctgcggggcggggcctggccgggccctggccccggcgggcctcagtgccagcagccccgctccgctctgcccagcgcgtcccctttgctccagccctgcggccgtccctttcggccggcggcatggccctgtcgtccgaacccgctgagatgccgcggcagtttcccaagctgaacatctctgaagtggatgagcaagtccggctcctggcggagaaggtgtttgctaaagtgctccgagaagaggacagcaaagatgccctgtccctgttcactgtcccagaggactgccccatcgggcaaaaggaagccaaggagagggagctgcagaaggagctggcagagcagaagtctgtggagaccgcaaaaagaaagaaaagtttcaagatgattcggtcccagtccctgtctctgcaaatgccgccacagcaagattggaagggccccccggcagccagtccggccatgtctcccacaacccctgtggtcactggagccacttccctgcccacgccagcaccctatgccatgcctgagttccagcgggtcaccatcagcggagattactgtgccgggatcactttggaggactatgagcaggcagccaagagtctggccaaggccctaatgatccgggagaagtatgcgcggctcgcctaccaccgcttcccgcggatcacatcccagtacctgggtcatccgcgggcggatactgcacctccggaagagggccttccagacttccaccctcctccactgccccaggaagacccctactgcctggatgatgcaccccccaacctggattacttggtccacatgcaggggggcatcctctttgtgtatgataacaagaagatgctggagcaccaggagccgcacagcctaccctaccccgacctggagacctacacggtggacatgagccacatcctggctctcatcaccgatggccccacgaaaacctattgtcaccggcgactgaactttctggaatccaagttcagccttcatgagatgttaaacgaaatgtccgagttcaaagagttgaagagtaacccccaccgggacttctataacgtgagaaaggtggacacacacatccatgcggccgcctgcatgaaccaaaagcatctgctgcgcttcatcaagcacacataccagacggagcctgacaggactgtggcagagaagcggggccggaagatcaccctgcggcaggtgtttgacggcctgcacatggacccctacgacctcactgtggactcactggatgtccacgcgggccggcagacattccaccgctttgacaagttcaactccaaatacaaccctgtgggggccagtgagctgcgtgacctgtatttgaaaactgaaaactatctgggaggagagtactttgctcggatggtcaaggaggttgcccgggagctggaggagagcaagtaccagtactcagagccacggctctccatctacggccgcagtcctgaggagtggcccaacctggcctactggttcatccagcacaaggtctactctcccaacatgcgctggatcatccaggtgccccggatttatgacatatttaggtcaaagaagctgctgccaaactttgggaagatgctggagaacatcttcctgccccttttcaaggccactatcaacccccaagatcatcgagagcttcacctcttccttaaatatgtgacggggtttgacagcgtggatgatgagtccaagcacagcgaccacatgttttccgacaagagcccaaacccggacgtctggaccagtgagcagaacccaccctacagctactacctgtactacatgtatgccaacatcatggtgctcaacaacctccgcagggagcgcggcctgagcacgttcctgttccggccgcactgtggggaagccggctccatcacccacctggtgtctgccttcctcactgctgacaacatttcccacgggctgctcctcaagaagagtccggtattgcagtatctctactaccttgctcagatccccattgccatgtctcctcttagcaacaacagtttgttcctcgaatattccaagaaccctctgagggaattcctacacaagggactgcatgtttctctttccaccgatgaccccatgcagttccactacacgaaggaagcacttatggaagaatatgccattgcagctcaagtgtggaagctgagcacctgcgacctgtgtgagatcgccaggaacagcgtgctgcagagcggcctctcgcatcaggaaaagcaaaagtttctgggacaaaattattataaagaaggacctgaaggaaatgatattcgaaagacaaatgtggctcagatccggatggcattccgatatgagaccttatgcaatgagctcagcttcctgtctgatgctatgaaatcagaagagatcaccgccttgaccaactaggtccagcatttgacatgcattttaactttttggttcaatttcaagtctgctgtggctaatagtggtcaagattccgaactaggactttcctctgtgaagaggatgcctctgaagaaattttaaactggtgattttggttgcactgctcactttaagagttaacatgctcacttgttagtatttctgagtaacaagatggtgacttctccttggggatctgggagctgagcacttgtctatacttgttcctaattttccaagtatttctcttgaaactgccagtgcctgaactgttggggccaggattttccctggtcagatgccaagtaacatgtggttttctgccatacttttctccattggcccaggtaggctaattggtagttgttcatttcagcctctggatggctggctgccttaaacacaatcaatttcaaagctccatttcataaaggggctactttgaaggagttaagatggaagacttccttcttgacaaattgtgtttttagtgaatttcttaaaccgttttatttagccctccttccctctttctagttggaagccaaatgtactcatgaaaacagccactcctattctgagtcttggtttcttcacctagaaagtgagggtttggactagatgagtggctttcagggtgttctgtgaatctcctcatgaatactttagggtgggggagggaagggagtgagtgatgctcaggggctgtcaaagtgactgcgttcatcagttttacactggggctgctacataatattttcatttgaacgaagaacttcaaaaagcacaggactagatgatctctgttccttttggctctaatatgctacaactgtaggccaattatcactttaccaattaagagttaggccagataagtgaaatttaacttaagggcacacagctaataagtaataggcctaaactggatttccttattccaaatcctgtcttttccccactattccattagaccccacaaatgttagttgtgtgtgtgtgtgtgtgtgtttttaatcactgtaaccgggtgcatttttttaaggcaaaatttctcccttatctactgtgatgacttcagaagatacaatggtcccaggggccaagtagaaagcatttttaaagattaatctgaattaagctttatcagtgtactctttatctgtgttactagtgcctggtatgtagtaggtgctcaataaatgcatattgaataact

SEQ ID NO: 769 - protein, 776 aa, Homo sapiens
  ref <308>: DATABASE ACCESSION NUMBER: Refseq / NP_000471
  ref <309>: DATABASE ENTRY DATE: 2000-10-31
MALSSEPAEMPRQFPKLNISEVDEQVRLLAEKVFAKVLREEDSKDALSLFTVPEDCPIGQKEAKERELQKELAEQKSVETAKRKKSFKMIRSQSLSLQMPPQQDWKGPPAASPAMSPTTPVVTGATSLPTPAPYAMPEFQRVTISGDYCAGITLEDYEQAAKSLAKALMIREKYARLAYHRFPRITSQYLGHPRADTAPPEEGLPDFHPPPLPQEDPYCLDDAPPNLDYLVHMQGGILFVYDNKKMLEHQEPHSLPYPDLETYTVDMSHILALITDGPTKTYCHRRLNFLESKFSLHEMLNEMSEFKELKSNPHRDFYNVRKVDTHIHAAACMNQKHLLRFIKHTYQTEPDRTVAEKRGRKITLRQVFDGLHMDPYDLTVDSLDVHAGRQTFHRFDKFNSKYNPVGASELRDLYLKTENYLGGEYFARMVKEVARELEESKYQYSEPRLSIYGRSPEEWPNLAYWFIQHKVYSPNMRWIIQVPRIYDIFRSKKLLPNFGKMLENIFLPLFKATINPQDHRELHLFLKYVTGFDSVDDESKHSDHMFSDKSPNPDVWTSEQNPPYSYYLYYMYANIMVLNNLRRERGLSTFLFRPHCGEAGSITHLVSAFLTADNISHGLLLKKSPVLQYLYYLAQIPIAMSPLSNNSLFLEYSKNPLREFLHKGLHVSLSTDDPMQFHYTKEALMEEYAIAAQVWKLSTCDLCEIARNSVLQSGLSHQEKQKFLGQNYYKEGPEGNDIRKTNVAQIRMAFRYETLCNELSFLSDAMKSEEITALTN

SEQ ID NO: 770 - DNA, 2176 bp, Rattus norvegicus; identical to SEQ ID NO: 733
  ref <308>: DATABASE ACCESSION NUMBER: Refseq / NM_053908
  ref <309>: DATABASE ENTRY DATE: 2003-01-13

SEQ ID NO: 771 - protein, 613 aa, Rattus norvegicus; identical to SEQ ID NO: 734
  ref <308>: DATABASE ACCESSION NUMBER: Refseq / NP_446360
  ref <309>: DATABASE ENTRY DATE: 2003-01-13

SEQ ID NO: 772 - DNA, 2304 bp, Homo sapiens; identical to SEQ ID NO: 735
  ref <308>: DATABASE ACCESSION NUMBER: Refseq / NM_080549
  ref <309>: DATABASE ENTRY DATE: 2003-01-15

SEQ ID NO: 773 - protein, 624 aa, Homo sapiens; identical to SEQ ID NO: 736
  ref <308>: DATABASE ACCESSION NUMBER: Refseq / NP_536859
  ref <309>: DATABASE ENTRY DATE: 2003-01-15

SEQ ID NO: 774 - DNA, 1035 bp, Rattus norvegicus
  ref <308>: DATABASE ACCESSION NUMBER: Refseq / NM_021836
  ref <309>: DATABASE ENTRY DATE: 2002-11-05
atgtgcacgaaaatggaacaggctttctatcacgacgactcttacgcagcggcaggatacggtcggagccctggcagtctttctcttcacgactacaaactcctgaaacccaccttagcgctcaacctggcagatccttatcggggtctcaagggtcctggggcgcggggtccaggcccagagggcagtggggcaggcagctacttttcgggtcagggatcagacacaggcgcatctctgaagctagcctccacggaactggagcgcttgatcgtccccaacagcaacggcgtgatcacgacgacgcccacgcctccgggacagtacttttacccccgtgggggcggcagcggcggaggtacagggggcggcgtcaccgaggagcaggagggctttgcggacggttttgtcaaagccctggacgacctgcagaagatgaaccacgtgacgccccccaacgtgtctctgggcgccagcgggggtccccaggccgggccagggggcgtctatgctggtccggagccgcctccggtctacaccaacctcagcagttactccccagcctctgcaccctctggaggttccgggaccgccgtcgggactgggagctcatacccgacggccaccatcagctacctcccacatgcaccaccctttgcgggcggccacccggcacagctgggcttgagccgtggcgcttccgcctttaaagaggaaccgcagaccgtaccggaggcacgcagccgcgacgccacgccgcctgtgtcccccatcaacatggaagaccaggagcgcatcaaagtggagcgaaagcggctgcggaacaggctggcggccaccaaatgccggaagcggaagctggagcgcatcgcgcgcctggaggacaaggtgaagacactcaaggctgagaacgcggggctgtcaagtgctgccggcctcctacgggagcaagtggcgcagctcaagcagaaggtcatgacccacgtcagcaacggctgccagttgctgctaggggtcaagggacacgccttctga

SEQ ID NO: 775 - protein, 344 aa, Rattus norvegicus
  ref <308>: DATABASE ACCESSION NUMBER: Refseq / NP_068608
  ref <309>: DATABASE ENTRY DATE: 2002-11-05
MCTKMEQAFYHDDSYAAAGYGRSPGSLSLHDYKLLKPTLALNLADPYRGLKGPGARGPGPEGSGAGSYFSGQGSDTGASLKLASTELERLIVPNSNGVITTTPTPPGQYFYPRGGGSGGGTGGGVTEEQEGFADGFVKALDDLQKMNHVTPPNVSLGASGGPQAGPGGVYAGPEPPPVYTNLSSYSPASAPSGGSGTAVGTGSSYPTATISYLPHAPPFAGGHPAQLGLSRGASAFKEEPQTVPEARSRDATPPVSPINMEDQERIKVERKRLRNRLAATKCRKRKLERIARLEDKVKTLKAENAGLSSAAGLLREQVAQLKQKVMTHVSNGCQLLLGVKGHAF

SEQ ID NO: 776 - DNA, 2723 bp, Rattus norvegicus
  ref <308>: DATABASE ACCESSION NUMBER: Refseq / NM_022516
  ref <309>: DATABASE ENTRY DATE: 2003-01-13
cgtcccctgcggtctcctctgtgtgccatggacggcatcgtcccagacatagcagtcggtacaaagcggggatccgacgagctcttctccacgtgtgtcagcaacggccccttcatcatgagcagctcggcctcagcagccaacggaaatgatagcaagaagttcaaaggtgataacaggagcacaggagttccttccagagtcatccatgtccgaaagctacctagtgatgtcactgagggcgaggtcatctccctggggctgccctttgggaaagttaccaacctccttatgctgaaggggaagaaccaggccttcattgaaatgagcacagaggaggctgccaacactatggttaactactacacatcggtggcgccagtgcttcgtggacagcccatctacatccagttctccaaccacaaggagctcaaaaccgacagctcgcccaaccaggcacgtgcccaggcagccctgcaggctgtgaactccgtacagtcaggaaacctggccttggcagcctctgctgctgccgtggatgcaggaatggcaatggcaggccagagcccagtgctcaggatcattgtggagaaccttttctacccagtgacactggacgtgctgcaccagatcttctcgaagtttggcacagtcctgaagatcatcacgttcaccaagaacaaccagttccaggcgctgctgcagtatgctgaccctgtgagcgcccagcatgccaagctgtccctggatggccagaacatctacaatgcctgctgcacgctgcgcatcgacttctccaagctcaccagtctcaacgtcaaatacaacaacgacaagagccgagactacacacgccctgacctgccctctggagacagccagccatcactggatcagaccatggcagcagcctttggcctctctgttcctaatgtccatggagccctggcacccctggccataccctctgctgctgctgctgctgctgcagccggccgcattgccatcccagggctggcaggcgccgggaattccgtccttttggtcagcaacttgaaccctgagagagtcacaccccaaagcctctttattctcttcggcgtctacggtgatgtgcagcgggtgaagatcctgttcaacaagaaggagaacgcacttgtcgagatggcagacggcagccaggcccagctggccatgagccacctgaacgggcacaagctgcatgggaagtcagtgcgcatcaccctgtcaaagcaccagagtgtgcagctgcctcgtgagggacaggaggaccagggcctgaccaaggactatggcagctcaccgctgcaccgcttcaagaaacctggctccaagaactttcagaacatctttcctccctcagctaccctgcacctctccaacatcccgccctctgtgtcagaggatgacctcaagagcctcttctccagcaatggcggtgtggtcaaaggcttcaagttcttccagaaggaccgcaagatggcactgatccagatgggctctgtggaggaggcagtgcaggcactaattgagctgcacaaccatgacctgggcgagaaccaccacctgcgagtgtccttttccaagtccaccatctaggtgcctgtgggcctgcgaagcttccgccattccagaaaagccactttaaaaagcagctgaagtgaccttacagaccagagatttatttttttaaagagagatcagtttacctgtttttaaaaaaattaaatctagcccactttgccgtggcaggaaatggcttgggccacagaggcccaggcccagcaaccatgccttgaggggcttaggcgtgaggccacagcggtgccccaacacagccgcttctgtgccttacaaaaccagcgtgcctcacggccgcacacccaccctctaaggccaccagttgtctctagacctgcagtgagccaggcggcctatacttaggctccccaatgccgtgtaagagctggggccactcccctacacccattataatcaagtgacatgattctcccatgtccctggccagcccagagggcccaggccgtcctcagcgccgagccttgtgtgaccttgtattctattccgtggggtcacagacacctgtgcctagcaatctttccacttgaccaaatacccgagtcttttccatttatatgcaagagatagagtttttaagtaactttttatagcagtggtacaattgtatgtgtgtactctaagcttctctgtcccctgcactccttccttccagtgaccaacttgcaggtgggcccaggccagggctggagaagaagctctgaggcttgtgggtgtcctaccttcaaattttggaccaaagttttgttctctgcccgcctctgactatgcccagttgaggggctgacctctaggccttaatgtccttcctggacgcccacctccatcctagcctgtttctatgggaggggttccctgcacctcagtttctgtgaaagtcatggaagagtgtaaatatttatgattttatacctgtggggctgaggcggtgcagcattttttatggtgacagatgtatattttggtaacgactacaggctcagtattgtcctgggccagccctagccacatctaccccagcccagatggtgtattggggggagggggactttccattaaagcagtttataacctttgaaaaaaaaaaaaaaaaaaaaaaaaaa

SEQ ID NO: 777 - protein, 530 aa, Rattus norvegicus
  ref <308>: DATABASE ACCESSION NUMBER: Refseq / NP_071961
  ref <309>: DATABASE ENTRY DATE: 2003-01-13
MDGIVPDIAVGTKRGSDELFSTCVSNGPFIMSSSASAANGNDSKKFKGDNRSTGVPSRVIHVRKLPSDVTEGEVISLGLPFGKVTNLLMLKGKNQAFIEMSTEEAANTMVNYYTSVAPVLRGQPIYIQFSNHKELKTDSSPNQARAQAALQAVNSVQSGNLALAASAAAVDAGMAMAGQSPVLRIIVENLFYPVTLDVLHQIFSKFGTVLKIITFTKNNQFQALLQYADPVSAQHAKLSLDGQNIYNACCTLRIDFSKLTSLNVKYNNDKSRDYTRPDLPSGDSQPSLDQTMAAAFGLSVPNVHGALAPLAIPSAAAAAAAAGRIAIPGLAGAGNSVLLVSNLNPERVTPQSLFILFGVYGDVQRVKILFNKKENALVEMADGSQAQLAMSHLNGHKLHGKSVRITLSKHQSVQLPREGQEDQGLTKDYGSSPLHRFKKPGSKNFQNIFPPSATLHLSNIPPSVSEDDLKSLFSSNGGVVKGFKFFQKDRKMALIQMGSVEEAVQALIELHNHDLGENHHLRVSFSKSTI

SEQ ID NO: 778 - DNA, 4614 bp, Rattus norvegicus
  ref <308>: DATABASE ACCESSION NUMBER: Refseq / NM_017020
  ref <309>: DATABASE ENTRY DATE: 2003-01-14
aattccgtgggcggcgggcggcggagaagctccgagcggggccgggcggcggcagattggagtcgcgacacagccgccgtccgcttcgggctccacgtagaaggaaccatgctggccgtcggctgcaccctgctggtcgccctgctggccgcgcccgcagtcgcgctggtccttgggagctgccgcgcgctggaggtggcaaatggtacggtgacgagcctgccaggggccactgttaccctgatctgccctgggaaggaagcagcaggcaatgctaccattcactgggtgtactcaggctcacagagcagagaatggactaccacgggaaacacactggttctgagggccgtgcaggtcaatgacactgggcactatttgtgcttcctggatgatcatctggttgggactgtgcccttgctggtggatgttcccccagaggagcccaagctctcctgcttccggaagaacccccttgtaaatgccttttgtgagtggcatccaagcagcactccctctccaaccacgaaggctgtgatgtttgcaaagaaaatcaacaccaccaatgggaagagtgacttccaggtgccttgccagtattctcagcagctgaaaagcttctcctgcgaggtggagatcctggagggtgacaaagtgtaccacatagtgtcactgtgcgttgcaaacagtgtcggaagcaggtccagccacaatgtagtatttcagagtttaaaaatggtgcagccggatccacctgccaaccttgtggtatcagccatacctggaagcctcgttggctcaaagtcagttggcaagaccctgagtcctgggacccaagttactacttgttgcaattcgagcttcgataccgacctgtatggtcaaagaacgttcacggtgtggccgctccaggtggcccagcatcaatgtgtcatccatgatgccttgcgaggagtaaagcatgtggtgcaggtccgagggaaggaggagtttgacattggccagtggagcaaatggtccccggaggtcacaggcactccttggctagcagagcccaggaccactccggcagggatcccggggaaccccacacaggtctctgttgaagactatgacaaccacgaggatcagtacggaagttctacagaagcaacgagtgtcctcgccccagtgcaaggatcctcgcctatacccctgcccacattcctggtagctggaggaagcctggcgtttggattgcttctctgtgtcttcatcatcttgagactcaagaagaaatggaagtcacaggctgagaaggaaagcaagacgacttctcccccaccgtatcccttgggaccgctgaagccgaccttcctcctggttcctctcctcaccccatcagggtcccataacagctctgggactgacaacaccggaagccacagctgcctgggtgtcagggacccacagtgccctaatgacaacagcaacagagactacttattccccagataattgtctggagggtacctggcagctggcacgcaagtttctcactgccggccccgtccaccagggctgggggcggggtgggcggggctgcagcttcacgatcccacaggagccttgcaaaggttctgagtgggagaagactggtgtgctgcacgggcttcgaaagaaggggctgtgaggagcacgagccatcatgaagagagcctgtgatgactctgaatagagacgcccgcccatcagctacacacctgatggtggctctcaagctatcctctcaggaagcctctgggaggggcgacaaaggctgccccagttgcctagctctggctcactggcccaagctgccttttagcttgaactcctaaaatccaagcaccttggccattctcttcctaggccaccgaggccgcggggaagcttggttctactttccttctcaacacctggagaagcagctgcccggtggtggtgactaacgtatcagggcctgatggcttatgaggaatgacaattaattcctcataagcagtttttaaatgtgaatagtaatcctaggcactgctgacttgaggttttattttcttcgatctcaggacttcaggagagaagcagagcagaagtagagagaggatgggtgtccattgtccgtgtggtacttgagggggatacagcctggaaaacacgtttcctgtccccctactctcccagaagaggtagggggtggcgcctcttccagggcagagagtataactactttacctggccttgcccatactggtttcaactggacttgagctactaggaaaaatgacattcatgcaaaaagaaaactttaactagcaagaatgcacttccactttggtttctagaggactgttgctcctcttgagacgctggaagaggccgctcactgtaccctggtgtatgagccctcaccccccaccccagggtaagtgcagtaactttagtctaaacaccgagtcaggtaaaaatcgaggaaaaaacaaccctgtttcctgtaacagaaaagcctttggtttcgttttgtattttgattttttttttgtcttaaaaagtgtaaaaatagtctgtccatactctgcttcagggaatgacctgtgaatactccccaggcgtgggcaggaagggtgtctgcttcctgctacacctcactgccacctcggccttccttgctttacattcaactgagttgcctcagctgctttcccctggggcgctgaaaaagccagtgatgttggtggtcaccgagaagaccacagagccacagagtaatgctgtgattgaagcgagttacgcaaccacagcaccccacatttgctgtattatagaactatgctaggagcttgccttttcacaaaataccaccaccacgagacgtggcagagctcggaagctgtcaccttgtgccatctgcttgccagctccaaggggccactgacttaagcagttattttctttgtgggctttgttcatttcagggcctgttgctgtcttagaaaaagctctgtcggttgacaaaaacatcagacaggtagtcatgtttatttattttttttccttctttgctaagtctttgggactcaagggtagtaaaaaatgctgtgaaaagggaaacattagaaacagcgatcttcggggaataggtgactgtgcccacgcactgttcttcagtccctcacgtggctctgcccgagtgctgttccaagccaggcagagcaggctggcggaagattgaaatccagatagctcgttatctctgagagctaaatagctttgatctccaagctgttattgctttcactattgtaacaggatagcctccccccccatgtcaaaaggatgcttttcccttttgactttttataagctaagtcagtgaagtctgtttcatctgagctccagcttcgttcagttcgcacaggtgtatgccctcagctgcttcgggcctcagatctgtgctagttgaatggttgtcccatccttgggtcatccttaccagagtttctgcagcccacaggtctgccttgtcaacagtaccacttaacaccagcattcagtgcccaggcagccagatgtggagggtttacccagagatgatttaaacatgaccttaaacgtgtatggtagaacgaggggaacccataccagctcaggttctaaagagatctttgattcttctggcattagtgaaatagctttaaactatttcaaggaagaagccttggccacacccacgacatttggtgacaatcctttctctccatgagccttgtctttacaccttctcacctggctgaaagctcacactgaatctttcctatgtccctggtgtcttgggagaaaggaaactggtatgggcttcactgctggaattggcttggagccagcgtgtggcgcagccctggcagggtgggccaggcttagttatggtgtgctggtttaaggaatgcctggcttgcctggttgcttgggttctgagctgcagagtttcctagcagttctttatggctgacctagttggggaagattcccacactcaactgcaggtggaggtggtgagaaagctgttttcatttggagaggcaggatcagcccaagaagctttcagtgggagagcctacagtgaggctgtacctcactgtgggaggaggcaggccagctggctcaggtcctgggactggcactggggagggtctgccaaaggtccctccagcctgtagtcctagcatagtcgggtgccagttccaggaagtttctatggcaaccttagtgctcattaaggaacattgtcagttttgtgaacatatgctcagatggagatcttgttttcagagaaaggactggtacagtgtgtaacaagctggagcagacagagagactttttggcaagagatcacatccgttaagcagaatacctcagtgctacatgtttttgtctttgagacaatgtttttaaggtttttatgctctgttacctgtaagctgatacctaaaactttctgcaaagtcagggtttttcaatgccttttttttttttttgccattgtttgctttaaagtgaagattgtaactgtttgaaataaataatttctaaaactg

SEQ ID NO: 779 - protein, 462 aa, Rattus norvegicus
  ref <308>: DATABASE ACCESSION NUMBER: Refseq / NP_058716
  ref <309>: DATABASE ENTRY DATE: 2003-01-14
MLAVGCTLLVALLAAPAVALVLGSCRALEVANGTVTSLPGATVTLICPGKEAAGNATIHWVYSGSQSREWTTTGNTLVLRAVQVNDTGHYLCFLDDHLVGTVPLLVDVPPEEPKLSCFRKNPLVNAFCEWHPSSTPSPTTKAVMFAKKINTTNGKSDFQVPCQYSQQLKSFSCEVEILEGDKVYHIVSLCVANSVGSRSSHNVVFQSLKMVQPDPPANLVVSAIPGSLVGSKSVGKTLSPGTQVTTCCNSSFDTDLYGQRTFTVWPLQVAQHQCVIHDALRGVKHVVQVRGKEEFDIGQWSKWSPEVTGTPWLAEPRTTPAGIPGNPTQVSVEDYDNHEDQYGSSTEATSVLAPVQGSSPIPLPTFLVAGGSLAFGLLLCVFIILRLKKKWKSQAEKESKTTSPPPYPLGPLKPTFLLVPLLTPSGSHNSSGTDNTGSHSCLGVRDPQCPNDNSNRDYLFPR

SEQ ID NO: 780 - DNA, 645 bp, Rattus norvegicus
  ref <308>: DATABASE ACCESSION NUMBER: Refseq / NM_031836
  ref <309>: DATABASE ENTRY DATE: 2003-01-13
atgaactttctgctctcttgggtgcactggaccctggctttactgctgtacctccaccatgccaagtggtcccaggctgcacccacgacagaaggggagcagaaagcccatgaagtggtgaagttcatggacgtctaccagcgcagctattgccgtccaattgagaccctggtggacatcttccaggagtaccccgatgagatagagtatatcttcaagccgtcctgtgtgcccctaatgcggtgtgcgggctgctgcaatgatgaagccctggagtgcgtgcccacgtcggagagcaacgtcactatgcagatcatgcggatcaaacctcaccaaagccagcacataggagagatgagcttcctgcagcatagcagatgtgaatgcagaccaaagaaagatagaacaaagccagaaaaaaaatcagttcgaggaaagggaaagggtcaaaaacgaaagcgcaagaaatcccggtttaaatcctggagcgttcactgtgagccttgttcagagcggagaaagcatttgtttgtccaagatccgcagacgtgtaaatgttcctgcaaaaacacagactcgcgttgcaaggcgaggcagcttgagttaaacgaacgtacttgcagatgtgacaagccaaggcggtga

SEQ ID NO: 781 - protein, 214 aa, Rattus norvegicus
  ref <308>: DATABASE ACCESSION NUMBER: Refseq / NP_114024
  ref <309>: DATABASE ENTRY DATE: 2003-01-13
MNFLLSWVHWTLALLLYLHHAKWSQAAPTTEGEQKAHEVVKFMDVYQRSYCRPIETLVDIFQEYPDEIEYIFKPSCVPLMRCAGCCNDEALECVPTSESNVTMQIMRIKPHQSQHIGEMSFLQHSRCECRPKKDRTKPEKKSVRGKGKGQKRKRKKSRFKSWSVHCEPCSERRKHLFVQDPQTCKCSCKNTDSRCKARQLELNERTCRCDKPRR

SEQ ID NO: 782 - DNA, 982 bp, Rattus norvegicus
  ref <308>: DATABASE ACCESSION NUMBER: Refseq / NM_020074
  ref <309>: DATABASE ENTRY DATE: 2003-01-14
ttgctaatcaagaggctgcgaggggctgagctggtcaggatgcggcaggttcctgtgggcaccaggcttgtcctggctctcgccttcgtcctggtttggggatcttcagttcaaggttatcctgctcggagagccaggtaccaatgggtccgctgtaaaccagatggcatttttgcaaactgcattgaggagaaaggaccacggttcgacctaatagcagaggaatccaacgttggccccccgatgaccgatcctgttttgatgagaggattcccgaatgatttcttccccatttctgatgactattctggctccggctctggctctggctctggctccggctccggctctggctctggctctggctctggctcaggttccggctccggttccggttctggctctggctcgggttctggctccggctcgggctctggctcaggaagcggctccctagctgacatggaatgggaataccagccaacagatgaaaacaatattgtctatttcaactatgggccttttgataggatgctcaccgagcaaaaccaagaacaaccaggagattttattatatgaaagtaaccgtctgtttccccacctccacatgaaacaatgtgttcagtatactttgtgtaccacgtttaaatgagcagtctcaggataagttttacagaaaatttaaaatgcttggaaaagactcttgaatcctgttacccctttcctcattaattgataaggaattatgctttaatgctgttatctatcttattgttctggaaaatatccgcagctatatgtgtattgaatcataactttaaaagccatactggtttcgaaaactttattttgatagcaagttgatgaacaatacttcatacctaaactgttccattgtgaattaaagatatattcctatgtgattaaaaagaaaataaaatgaaacacagtggcctcctaccgtggctatgtgatgtggttt

SEQ ID NO: 783 - protein, 179 aa, Rattus norvegicus
  ref <308>: DATABASE ACCESSION NUMBER: Refseq / NP_064459
  ref <309>: DATABASE ENTRY DATE: 2003-01-14
MRQVPVGTRLVLALAFVLVWGSSVQGYPARRARYQWVRCKPDGIFANCIEEKGPRFDLIAEESNVGPPMTDPVLMRGFPNDFFPISDDYSGSGSGSGSGSGSGSGSGSGSGSGSGSGSGSGSGSGSGSGSGSGSGSGSLADMEWEYQPTDENNIVYFNYGPFDRMLTEQNQEQPGDFII

SEQ ID NO: 784 - DNA, 6331 bp, Rattus norvegicus
  misc_feature (1)..(6331): n=a, c, g or t
  ref <308>: DATABASE ACCESSION NUMBER: Refseq / NM_053770
  ref <309>: DATABASE ENTRY DATE: 2003-01-13
gaattcggcacgaggaaaaatctttggagagaagagagccacagtgagcacgctagtgcacaattattgcagccacgtgtgcccgcaagctggccctgcgacaagctgttgagtgctgttgcaattagctgattggagaacggggactgcagggtgataatgctgcgtctccgctcgcgggcaccaggaaagggttttgtctcgggaaggcaagtcttccctgcacagttatctcagcagctccctagctgaagagaactgggggctctaaagggagggggtcgcactgtgcgagcacagattctgtgccaggctgttgcttatgaaccgcacgtctgggaaagcaggtgtgtgctcggacgggcactgggctggaacgcaggcggcggctctcgggttcacctgcttcctgttaacagactgttggctcacagagcatctgctcttacacgctgaaactgcggctgagaaagggttcccggcatcccacttgactgacggaggcacttggattggacttaatcttaaacctctggaggtcaagaccttttaaaaagggctaaataaacaatctacatgttaaaggccagcgactcctacttcctctgttggagcaactgtgaagtccagcctcttctaggaaaactgaagactttaataacacaccgttcaaggtgaaaatgaatacagatagcggtgggtgtgctcgcaaacgtgccgccatgtctgtcacgttaacatctgtgaagagagttcaaagttctccaaacctattggctgcagggcgtgagtctcactctccggactcagcttggagatcttacaatggtcgaaatccagagacactgaacggagatgccacatattcctctcttgcagcaaaaggttttagaagcgttcgaccaaacctgcaagacaaaaagtcaccaacccagagccatatcactatcaacggcaactctggtggcgccgtgagtccagtgagttactatcagaggccattctccccttctgcatactccctcccagcctcactcaactccagcattatcatgccacacggcaggtcgcttgattctgcggagacatattcccagcatgcccagtcgctagacggcaccatgggaagctccatcccactctacagatcctccgaggaagagaagagggtcacagtcatcaaagccccgcattacccagggatcggccctgtggatgagtctggaatccccacagccattagaacgacagttgaccggccgaaggactggtacaagacaatgtttaaacaaattcacatggtacacaagccggatgaggacacagacatgtataatactccttacacatacaatgcaggtctgtacaactcgccctacagtgctcagtcacatcctgctgcaaagacccagacctacagacctctttccaaaagccactcggacaatggcaccgatgcttttaaggaggcaccctcaccagtgcctcccccacacgttccaccacgaccaagagatcagtcttcaacagaaaagcatgactgggatcccccagacagaaaggtggacaccaggaaatttcgatcggagccaaggagtatttttgaatacgagcctgggaagtcatccatcctgcagcacgaaagacccgtctccgtctaccagtcttccatagacagaagcttggaaagacccagcagctctgcaagcatggcgggtgactttagaaaacggaggaagagtgaacctgcagtgggcccgcccaggggcttgggggatcacagttcaagcaggaccagccccggccgggcagacctcccaggatcaagttccacctttaccacgtctttcattagttcttctccttcctctccctcgagagcacaaggtggggatgatagcaaaatgtgtccgcccctttgcagttactcggggctcaatggctcgccctctagtgagttagagtgctgcggcgcttatagaaggcacttggacgtcccccaggactctcaaagggccatcactttcaagaacggctggcaaatggcccggcaaaatgcagagatctggagtagcactgaagaggcggtttcccccaaaatcaaatcacgaagctgtgacgatctcctgaatgatgactgcggcagcttcccagaccctaaaaccaagtcagaaagcatgggttctctgttatgtgacgaaggctccaaagagagcgaccccatgacgtggacttccccctacatcccggaagtgtgcgggaacagcagatctaggctcaaacataggtcagcccataacgccccaggcttcctcaaaatgtacaagaaaatgcaccgcatcaaccgcaaggatttgatgaactcggaggtcatttgctctgtgaaatccaggatccttcagtacgagaaggaacagcagcacagggggctgctccatggatggagccagtcgtccaccgaggaggtgcccagggacgtggtacccactcgcatctcggagtttgagaagctgattcagaagtcaaagtctatgcccaatctaggagatgaaatgttatctcctgtaaccctagaacccccacaaaatggtttgtgccccaagaggcgattttctattgagtctctgctggaggaggaaactcaggtccgacacccttctcagggtcagcgaagctgcaagtcgaacaccctggtacccatccacatcgaggtcaccagcgatgagcaacctagaacacatatggagttttccgacagtgaccaagatggggttgtgtctgaccacagcgataacgtccacgtcgaaaggtcgtccttttgtagtgaaagtgacttcgaccacttttcattcacatcctctgaaagtttctacggatccagccatcaccaccaccatcaccaccaccatcacggacacttcatcagttcctgcaaaggccgatgccccgcttcttacactcgatttaccacgatgttaaaacacgaaagagctaagcatgaaaatattgaccgacccagaaggcaagacatggatcctggcctatctaaactcgcgtttctagtcagccctgtgcctttccgaaggaaaaaagttttgactccccaaaaacaaactgagcaggcaaaatgcaaagcctcggtagttgaggctctggactctgcccttaaagacatttgcgaccaaataaaagctgaaaagcggagaggaagcttgccggacaacagcatcctgcacaggcttattagtgaactgctgccacagattcctaagaggaattcatctcttaatgctctaaaaaggagccccatgcaccagcctttccacccactgcctcaagatggtgctattcattgtcccctgtaccaaaatgattgtgggagaatgcctcacagtgcctctttcccagacgtggacacgaccagcagctaccacgcacaggactatggtagtgtgctgagtctccaagatcacgagtcccctagaagttactcgtctactctgactgacttgggaagaagtgtatcacgggaacgaagaggaactccagaaaaagaggtaaaattgcctgcaaaagctgtctatgatttcaaagctcagacttctaaggagctgtcatttaagaaaggagacaccgtctacatcctcaggaaaattgaccagaactggtatgagggggagcaccacggaagagtgggcattttcccaatctcatacgtagagaaactaacacccccagaaaaagcgcagcccgcgagaccaccacccccagtccagccgggagagattggagaagccatagccaagtacaacttcaatgcagacacaaatgtggaactctccctgagaaagggtgacaggattattcttctcaaaagagttgatcaaaactggtatgaaggtaaaatcccaggaaccaacagacaaggcatcttccctgtctcctacgtagaagttgtcaagaggaacacgaaaggttctgaggattaccccgaccctcctctaccccacagctactccagtgatagaatttacagcctaagctccaataagccacagcgtcctgtgttctctcacgaaaacattcaaggtggaggagaaccgtttcaggctctgtataactatactcctaggaatgaagatgagctggaactcagagaaagtgatgtcgtagatgtcatggaaaagtgtgatgacggatggttcgtgggaacttcaagaagaaccaaattctttggtacttttcctggaaactatgtcaaaaggctgtgactcacctcactcctaatttatgccacatttcagccacacatctgcattaacccacctgaaacgtcccaggaggcctgttgctgcctcgccttatggtttcccaatagcccattaccatctccatctgctgccaccaaatcaccagcagagggactgccgctgtgagccttagggaggctgggagccttagagaaaagtggcaaaacttacacccacataaatattcagtctcctgctttctgccctgaactttgaaatgcctgtatatggaatcagaatgaaaatgatcatactttcaaaaaagtgaaataattaaggaagaaagaaagagaaaagaaatagagagactcttcaggaggctgtctggcctcatggctgaatctccacctctctggaaggtgtactgtcctcaggaagcctgaagattgttttttttctgaaatgctatggttccagttctcactctcatctaggcggtatattttcctttcacgagtttgcctagcgctcgggtttacactacatgacaactatacttcggctgttgtttgcttgcacttattattccttgtttcatgcacagtgatcacaaaatccagagtgcctagggaaggttcactggttccactggttcgagtgtgatttttgttgactgcattatattttcacacggggaggggggtctttcccctgcccacttttttgtgcttattagaagtgcaaacagtgagcaactgagagctcagccacaccacaggacaaatccgtgttgtgaattcgcattgctgttttgtgtattaaggtgtaatcatcagcttcatggacaacaagctattagtgatttctttacctgttaaaacttacaggcagtgctagtgagttaggcagaaagntgacagtaataccagtaggtgagcttcactgcgtgcatgctcacacgtttgagnttgtatgaggacatataattcatatgctatgttgtacattttatggaaatataagagaatcccacattattttatagagtacttcaggagcatcctaagtgttaaggctggctttagcaaggattatgatcaatacaactatttttactacaataattatttttcttctatgagacccagaatcctgactccacttgcagacaggaatatatatgttgagcctgacttttttttctggtatatgtaaaatacttcccaggaatacattgggcacttttgggaataatggttaaatcattcaggttgtgcttcctgcccccaaaacagatctacaaaatgataccaaacctgaaagatttaacggatttacggtgcctgcattccacacaacctcacacttagctttgtatttcaaatgaatttgcataaaanctgttcactttancaccttatagtcaaaactttttatggctttcctcccatgggcaatgcttgatcttcccaacatataaactctggcatattttgttcatatgtttgttcctttttggttgtacagactatttacttgttcagaaaacatcgagatctcccaatttgttctttaccccgcccttaaaaggaatttaaactctttcagaagatcgcccttcaccacatctccacagatcacaagctaaggtgaatctggaatatancgtctgcacaaaattttgtgactcagaaaganctttgtaactacnctgaaatacatataataacaatgttccagttacagaggaatattgttggggcaggaagtgaagaaacancttcaagaaacccactttacnctccagttcacaactagctttatattagaaaaacttgggattggaaagtcagccagccagccggccacctgcagcnttgttgataaatgaatactttttcacaccatttatgaaaacaaancttcaactctgttgcctgttatatttaagaaaaattgctgtttctactcnctgtatctgattttaaaaggaaaaaaatattcacgcctggctttcaggacattgactttgaatncttacgagcaaaggncgttgtgtttttcttgcncgtgccgaattc

SEQ ID NO: 785 - protein, 1196 aa, Rattus norvegicus
  ref <308>: DATABASE ACCESSION NUMBER: Refseq / NP_446222
  ref <309>: DATABASE ENTRY DATE: 2003-01-13
MNTDSGGCARKRAAMSVTLTSVKRVQSSPNLLAAGRESHSPDSAWRSYNGRNPETLNGDATYSSLAAKGFRSVRPNLQDKKSPTQSHITINGNSGGAVSPVSYYQRPFSPSAYSLPASLNSSIIMPHGRSLDSAETYSQHAQSLDGTMGSSIPLYRSSEEEKRVTVIKAPHYPGIGPVDESGIPTAIRTTVDRPKDWYKTMFKQIHMVHKPDEDTDMYNTPYTYNAGLYNSPYSAQSHPAAKTQTYRPLSKSHSDNGTDAFKEAPSPVPPPHVPPRPRDQSSTEKHDWDPPDRKVDTRKFRSEPRSIFEYEPGKSSILQHERPVSVYQSSIDRSLERPSSSASMAGDFRKRRKSEPAVGPPRGLGDHSSSRTSPGRADLPGSSSTFTTSFISSSPSSPSRAQGGDDSKMCPPLCSYSGLNGSPSSELECCGAYRRHLDVPQDSQRAITFKNGWQMARQNAEIWSSTEEAVSPKIKSRSCDDLLNDDCGSFPDPKTKSESMGSLLCDEGSKESDPMTWTSPYIPEVCGNSRSRLKHRSAHNAPGFLKMYKKMHRINRKDLMNSEVICSVKSRILQYEKEQQHRGLLHGWSQSSTEEVPRDVVPTRISEFEKLIQKSKSMPNLGDEMLSPVTLEPPQNGLCPKRRFSIESLLEEETQVRHPSQGQRSCKSNTLVPIHIEVTSDEQPRTHMEFSDSDQDGVVSDHSDNVHVERSSFCSESDFDHFSFTSSESFYGSSHHHHHHHHHHGHFISSCKGRCPASYTRFTTMLKHERAKHENIDRPRRQDMDPGLSKLAFLVSPVPFRRKKVLTPQKQTEQAKCKASVVEALDSALKDICDQIKAEKRRGSLPDNSILHRLISELLPQIPKRNSSLNALKRSPMHQPFHPLPQDGAIHCPLYQNDCGRMPHSASFPDVDTTSSYHAQDYGSVLSLQDHESPRSYSSTLTDLGRSVSRERRGTPEKEVKLPAKAVYDFKAQTSKELSFKKGDTVYILRKIDQNWYEGEHHGRVGIFPISYVEKLTPPEKAQPARPPPPVQPGEIGEAIAKYNFNADTNVELSLRKGDRIILLKRVDQNWYEGKIPGTNRQGIFPVSYVEVVKRNTKGSEDYPDPPLPHSYSSDRIYSLSSNKPQRPVFSHENIQGGGEPFQALYNYTPRNEDELELRESDVVDVMEKCDDGWFVGTSRRTKFFGTFPGNYVKRL

SEQ ID NO: 786 - DNA, 1569 bp, Homo sapiens
  ref <308>: DATABASE ACCESSION NUMBER: EMBL / AF396457
  ref <309>: DATABASE ENTRY DATE: 2001-07-31
atgaaagcaacaacacctttgcagacagtcgaccggcccaaggactggtacaagacgatgtttaagcaaattcacatggtgcacaagccggatgatgacacagacatgtataatactcctacacctcacatgaaatatacatacaatgcaggtctgtacaacccaccctacagtgctcagtcacaccctgctgcaaagacccaaacctacagacctctttccaaaagccactccgacaacagccccaatgcctttaaggatgcgtcctccccagtgcctcccccacatgttccacctccagtcccgccgcttcgaccaagagatcggtcttcaacagaaaagcatgactgggatcctccagacagaaaagtggacacaagaaatttcgggtctgagccaaggagtatttttgaatacgaggacagaaaagtggacacgagaaaatttcgatcggagccacggtctatttttgaatacgagcctgggaagtcatccatcctgcagcacgaacgacccgtctaccagtcttccatagacagaagcttggaaagacccagcagctctgcaagcatggcgggtgactttagaaaacggaggaagagtgaacctgcagtgggcccgcccaggggcttgggggatcacagttcaagcaggaccagccccggccgggcagacctcccaggatcaagttccacctttaccacgtctttcattagttcttctccttcctctccctcgagagcacaaggtggggatgatagcaaaatgtgtccgcccctttgcagttactcggggctcaatggctcgccctctagtgagttagagtgctgcggcgcttatagaaggcacttggacgtcccccaggactctcaaagggccatcactttcaagaacggctggcaaatggcccggcaaaatgcagagatctggagtagcactgaagaggcggtttcccccaaaatcaaatcacgaagctgtgacgatctcctgaatgatgactgcggcagcttcccagaccctaaaaccaagtcagaaagcatgggttctctgttatgtgacgaaggctccaaagagagcgaccccatgacgtggacttccccctacatcccggaagtgtgcgggaacagcagagaattcatgttaagcaaatggatattcgtggaatctctggatggaggaccattttggaaagtgctaaaggaatatctagagcgagtgaggaatctatgagaaagatgtaaagtgcaagacgtaaattttttggttgaggagatgatcactgatttaaatgtataacagagtagatgccccccccctcaaaaacgcataaccccccccttaccctgacatttagctttgaatatgcacaaaatagtttgtggggagaatagaaccctatgtctgaaagtatatgtgttgggatttcatcccatatatggtggtagccgccaactcagagataggtcgttctgtaagattctcacaacaaaatgtataacacaaacattcctgagtcaaaatgtacaacacaaggtcacgaaaccgcaagcagggcgccgtgataagtcc

SEQ ID NO: 787 - protein, 409 aa, Homo sapiens [sequence omitted]

SEQ ID NO: 788 - DNA, 557 bp, Rattus norvegicus
  ref <308>: DATABASE ACCESSION NUMBER: EMBL / AA891759
  ref <309>: DATABASE ENTRY DATE: 2000-03-03
tcctgatgctgatcatgtgcagctccgctgtccgggccctggagcttatcaggtctctgacagcattcaaaggagatgccaaagttatgaaattatttgcaaaacacataaaggtccaggagcaggtgaagttgctggagaagcgagcgatacacctgggcgtggggactccagggagaatcaaagaacttgtcaaacaagatggccttaatttgaaccccttaaagtttctggtttttgactggaactggagagatcagaagctgaggagaatgatggacattcccgagataagaaaggaggtttttgagcttctagatatgggagtgttcagcctatgcaaatcggactccttgaagctgggccttttctgagccagggtcctgatggagagtccagttgccgacatattgcaaatactcagaatatcctactctgtcgtagttatgttaacttcatcgcccagtggatcactgaagatgcttcatgaggatgctttgacaactgtgggcctgtcctttggctcgtaccctcagataataaagctctgcctgtgt

SEQ ID NO: 789 - DNA, 992 bp, Homo sapiens
agaagcatcagatggtgaaggagaaggagacacagaagtgatgcagcaggagacagttccagttcctgtaccttcagagaaaaccaaacagcctaaagaatgttttttgatacaaccaaaggaaagaaaagagaataccaccaagaccaggaaaagaagaaagaagaaaattactgatgttcttgcaaaatcagaaccaaaaccagggttacctgaagacctacagaagctgatgaaggactattatagcagcagacgcttggtgattgaattagaagaactgaacctgccagactcctgtttcctcaaggccaatgatttgactcacagtctttcttcatacctaaaagaaatttgtcctaagtgggtaaaacttaggaagaaccacagtgagaagaaatcggtcctgatgctgatcatctgcagctcggccgtccgagccctggagctcattaggtcgatgacagcattcagaggagacggcaaagttataaaattatttgcaaagcacataaaggtccaggcgcaggtaaagttgctggagaagcgtgtggtgcacctgggtgtaggaactccggggagaattaaagaacttgttaaacaaggtggccttaatttgagccccttaaaatttctggtttttgactggaactggagagatcagaagttgaggagaatgatggacattcccgagataagaaaggaggtattcgaacttctggaaatgggagtgctcagtctgtgcaagtcagaatccttgaaactgggccttttctaagtctgtgtcctaatgaagattccagttttcacagtagaagttgcatcttatttaatgactctgatacattgcaagcactcagtaaatatcagcaaatagtttatgttaattgtgtcaacagatggatcactggaatgtggggattctgaaacagaaatgaaactgtccttttgacaactctcttatataataaagtatcaccggcttgtgtatg

SEQ ID NO: 790 - protein, 245 aa, Homo sapiens
MQQETVPVPVPSEKTKQPKECFLIQPKERKENTTKTRKRRKKKITDVLAKSEPKPGLPEDLQKLMKDYYSSRRLVIELEELNLPDSCFLKANDLTHSLSSYLKEICPKWVKLRKNHSEKKSVLMLIICSSAVRALELIRSMTAFRGDGKVIKLFAKHIKVQAQVKLLEKRVVHLGVGTPGRIKELVKQGGLNLSPLKFLVFDWNWRDQKLRRMMDIPEIRKEVFELLEMGVLSLCKSESLKLGLF

SEQ ID NO: 791 - DNA, 249 bp, Rattus norvegicus
  ref <308>: DATABASE ACCESSION NUMBER: EMBL / AA891851
  ref <309>: DATABASE ENTRY DATE: 2000-03-03
gacttaactggatttggaatcatgtaaatacaacgtgtacatgaaggtgttttcaaaaaagttttaagtggggagagaagactgatctttaacgtaggtgacaccattccatggggtagggccccagactgaataaaaagaagggaatgatcagatcatcaggtctgtcaaacatggaatatatgccttcaaattgtgagccaagataaacccttccttacataagttgcttttagcaggtcttttgtc

SEQ ID NO: 792 - DNA, 588 bp, Rattus norvegicus
  ref <308>: DATABASE ACCESSION NUMBER: EMBL / AA891938
  ref <309>: DATABASE ENTRY DATE: 2000-03-03
caaacccaaaatgcagcctttcagccaaatcagtaccagatgctggctgggcccggaggatatccacccagacgtgatgaccatcgaggagggcgacagggatatcccagagaaggaaggaagtaccctttgccaccgccctcgggaagatacagttggaattaggcttttgtaaagcttcccacattcctttcaccattttacactttcatgctatttgtggaaaggtttctttctcaagtagtagtttttaataaaactatagtactttgtgtatttcttttaactgtgtgtatatttttactgatctgatctcactgttttatgttgctttctagagatgtgtattgcataatacagtgggtctgaatttattattgcttgtaaacacatttgatgaaattaggagtcctgggttttcattatggttaaaactcaaaacagctctatgctgattttaatgcacattaataattaggtatggacatttgaactgcacattctgcagactagagcatatattgttcaacatttctttgaaaacatttcattaaagtacttgtcttacagaaatttgtggactttagt

SEQ ID NO: 793 - DNA, 402 bp, Rattus norvegicus
  ref <308>: DATABASE ACCESSION NUMBER: EMBL / AA893004
  ref <309>: DATABASE ENTRY DATE: 2000-03-03
gatccatcccatcagcatttgtgttgataactagcacgacccatgcccatcatggaattccacgggcgtgaagatgaacttcagctccacatgtgaccatggatgacggacgcatgatgtaatgatgttcccaaaagtcaagccacaggaggatttatccattgtgattcgctttggtaaaggtctaaacaggctgttaaaaatacacggtaaacaaaagtgaagcaaagagttgatgtgcagatcatgcttagcggctactttgagaatgaccttggaggacaaaggggttttcagaggaatggccaccgctctttctcaaactggatgggcgctttttgaaatgtatgtttctgtgcttttgtgtatatgctatttcttaataaaaattttttaagtggg

SEQ ID NO: 794 - DNA, 1568 bp, Rattus norvegicus
  ref <308>: DATABASE ACCESSION NUMBER: Refseq / NM_031082
  ref <309>: DATABASE ENTRY DATE: 2003-01-13
ggacagcgcatggcggccacagaggatgacagactggcggggagcggagaaggagaacggctggatttcctgcgggaccgacacgtgcggttcttccagcgctgcctccaggtcttgccggagcggtattcttcgctggagaccagcaggctgacaattgcattttttgcactctctgggctggatatgttggactccttggatgtggtgaacaaagacgatataatagagtggatttattccttgcaggttcttcccacagaagacaggtcaaatctggatcgctgtggtttccgaggttcttcatatttgggtattccattcaacccatcaaagaatccaggcacagctcatccttatgacagtggacacatagcgatgacttacactggtctttcctgtttaattattcttggagatgatttaagccgagtagataaagaagcttgcttagcaggcttgagagcacttcagctggaagatgggagcttctgtgctgttcctgaaggcagtgagaatgacatgaggtttgtgtactgtgcttcctgcatttgctatatgctcaacaactggtcaggcatggatatgaagaaagccatcagctacattagaagaagtatgtcctatgacaatggcctggcacagggggcaggacttgagtctcatggaggatccaccttttgtggcattgcgtcactgtgcctgatgggtaaactggaagaagttttttcagagaaagaactgaaccggataaagaggtggtgcataatgaggcagcagaacgggtaccacggaagacctaacaagcctgtcgacacctgttactctttctgggtgggagcaacactaaagcttttgaaaattttccagtacactaactttgagaagaataggaattacatcttatcaactcaggatcgccttgttgggggatttgctaaatggccagacagtcatccagatgctttgcatgcgtacttcgggatctgtggcctgtcactaatggaggagagtggaatttgtaaagttcatcctgctctgaatgtaagcacacgaacttctgagcgcctccgagatctccatcaaagctggaagaccaaggactctaaacagtgctcagacaatgtccatatttccagttgactaaccctggggtaaagggtgtgtagcatacgtgtagctcaaggttaaaagccatgtgtaaccaagtgtgctcttctttaagggttagtcgtaaaagtcagaagcgtgtactgctagttcttcaggatatgctcttaggccagtgaccactgtcatggatttcaagaaaatccttgttgacgtgtggacatcagcagaactctggtatggttcttaactgttacactgtgtttctgagacctttcatggggcagatatgtttgtaggttatcttcttaaaaccctcagtacaagttctggcttacaaaatgtacgtaaaccttcaaaacaagtttacactccatatggcattgataatcttcaggtgagcatttaacgatcacttaaaaatcgctactgctgatgggaagaaatttgtttatccg

SEQ ID NO: 795 - protein, 377 aa, Rattus norvegicus
  ref <308>: DATABASE ACCESSION NUMBER: Refseq / NP_112344
  ref <309>: DATABASE ENTRY DATE: 2003-01-13
MAATEDDRLAGSGEGERLDFLRDRHVRFFQRCLQVLPERYSSLETSRLTIAFFALSGLDMLDSLDVVNKDDIIEWIYSLQVLPTEDRSNLDRCGFRGSSYLGIPFNPSKNPGTAHPYDSGHIAMTYTGLSCLIILGDDLSRVDKEACLAGLRALQLEDGSFCAVPEGSENDMRFVYCASCICYMLNNWSGMDMKKAISYIRRSMSYDNGLAQGAGLESHGGSTFCGIASLCLMGKLEEVFSEKELNRIKRWCIMRQQNGYHGRPNKPVDTCYSFWVGATLKLLKIFQYTNFEKNRNYILSTQDRLVGGFAKWPDSHPDALHAYFGICGLSLMEESGICKVHPALNVSTRTSERLRDLHQSWKTKDSKQCSDNVHISS

SEQ ID NO: 796 - DNA, 1969 bp, Homo sapiens
  ref <308>: DATABASE ACCESSION NUMBER: Refseq / NM_005023
  ref <309>: DATABASE ENTRY DATE: 2003-01-11
gaataaaatgaacaattcagttcctcagtcacatgagctgtgtgtcaaatgcacaacagccgtatgtggctcgtggcccctgtaccggacactcccatccctgcagagttactggacagtgctgatctagggattctgttacaaaatccatgaaagtgttcagcacaatgccgggcccatataaacgtcagtagttgttgttattataattagtcttgacccaacggcaaattcactttgagaccttagataaatcactctacctctctgagcctggtttccttgccctaaaaggatggcaaggggctgggcatggtggccactgaggatgagaggctagcagggagcggtgagggagagcggctggatttcttacgggatcggcacgtgcgatttttccagcgctgcctccaggttttgccggagcgctattcttcactcgagacaagcaggttgacaattgcattttttgcactctccgggctggatatgttggattccttagatgtggtgaacaaagatgatataatagagtggatttattccctgcaggtccttcccacagaagacagatcaaatctaaatcgctgtggtttccgaggctcttcatacctgggtattccgttcaatccatcaaaggctcctggaacagctcatccttatgatagtggccacattgcaatgacctacactggcctctcatgcttagttattcttggagacgacttaagccgagtaaataaagaagcttgcttagcgggcttgagagcccttcagctggaagatgggagtttttgtgcagtacctgaaggcagtgaaaatgacatgcgatttgtgtactgtgcttcctgtatttgctatatgctcaacaactggtcaggcatggatatgaaaaaagccatcacctatattagaaggagtatgtcctatgacaatggactggcacagggagctggacttgaatctcatggaggatcaactttttgtggcattgcctcactatgtctgatgggtaaactagaagaagttttttcagaaaaagaattgaacaggataaagaggtggtgtataatgaggcaacaaaatggttatcatggaagacctaataagcctgtagacacctgttattctttttgggtgggagcaactctgaagcttctaaaaattttccaatacactaactttgagaaaaatagaaattacatcttatcaactcaagatcgccttgtagggggatttgccaagtggccagacagtcatccagatgctttgcatgcatactttgggatctgtggcctgtcactaatggaggaaagtggaatttgtaaagttcatcctgctctgaatgtaagcacacggacttctgaacgccttctagatctccatcaaagctggaaaaccaaggactctaaacaatgctcagagaatgtacatatctccacatgactgattttagattgggagggtgggggggatttgtagcataactgtagctcaagtttaaaagccatgtataaccaagtgtgctctttttttaaaaggtagagtcttacaatcaaatctcctgctgatttcactttgggatatggtcttgagccagtaatctttatactgggtttcaagaaaatctttgttgaagtttgaaccacaactttgtcgtggttcttaaatgtttatactgtatttctaagaagttgtttgaggcaaattaactgtatgtgtgtaggttatctttttaaaaactcttcagtgcaaattgtatcttattataaaatggacacaaattttcaagtttacacttcatatagcattgataatcttcaggtgaacacttagtgatcatttaaaaagctcactgctgatcgtagaaaatttgctttaattaattaagtatctgggattattctttgaaaacagatgaccataattttttttaaagaagagtgacttattttgtcttattcttaag

SEQ ID NO: 797 - protein, 377 aa, Homo sapiens
  ref <308>: DATABASE ACCESSION NUMBER: Refseq / NP_005014
  ref <309>: DATABASE ENTRY DATE: 2003-01-11
MVATEDERLAGSGEGERLDFLRDRHVRFFQRCLQVLPERYSSLETSRLTIAFFALSGLDMLDSLDVVNKDDIIEWIYSLQVLPTEDRSNLNRCGFRGSSYLGIPFNPSKAPGTAHPYDSGHIAMTYTGLSCLVILGDDLSRVNKEACLAGLRALQLEDGSFCAVPEGSENDMRFVYCASCICYMLNNWSGMDMKKAITYIRRSMSYDNGLAQGAGLESHGGSTFCGIASLCLMGKLEEVFSEKELNRIKRWCIMRQQNGYHGRPNKPVDTCYSFWVGATLKLLKIFQYTNFEKNRNYILSTQDRLVGGFAKWPDSHPDALHAYFGICGLSLMEESGICKVHPALNVSTRTSERLLDLHQSWKTKDSKQCSENVHIST

SEQ ID NO: 798 - DNA, 1744 bp, Rattus norvegicus
  ref <308>: DATABASE ACCESSION NUMBER: Refseq / NM_053886
  ref <309>: DATABASE ENTRY DATE: 2002-11-05
agaatccaagatggcggtgtccaggcggcggggtccccaggctggagcgcagtcgttcttctgcgccctgctgctgtctttcagccaattcgtcgggagcgacggcatgggaggagatgctgcggctcccggcgccgcaggcacccaggccgagttgccacaccgccgtttcgagtacaaatacagctttaaggggccgcatctggtgcagagcgatgggaccgtgcccttttgggcccacgcggggaatgctattccaagtgcagatcagatccgaatagcaccgtccttaaagagccaaagaggttccgtgtggaccaaaacaaaagcagccttcgagaactgggaagtggaagtgacattccgagtgaccggaagaggtcgaattggagctgatggcttagcaatttggtatacagaaaaccaaggcttggacggccctgtgtttggatcagctgatatgtggaatggtgttggaatattttttgattcttttgacaatgacggaaagaaaaacaatcctgctatagtagttgtaggcaacaatggacaaatcaattatgaccaccaaaatgatggtgccactcaagccttagcgagttgtcagagggacttccgtaataaaccctatcctgtccgggcaaagattacctattaccagaaaacactgacggtcatgatcaataatggctttacaccagataaaaatgattatgaattctgtgccaaagtggaaaatatggttatccccacgcaagggcattttgggatatctgctgcaacaggaggtcttgcagatgaccacgatgttctctctttcctgactttccaactaaccgagcccggaaaagagccacctacgccagaaaaagacatttcagaaaaagaaaaggaaaagtatcaagaggagtttgaacacttccagcaagaattagacaagaagaaggaggaattccagaagggccaccctgacctccaggggcagccagcggatgacatctttgagagcataggggatcgggagctgagacaagtgtttgaaggacaaaatcgcattcatctggagatcaagcaacttaaccggcagctggatatgattctcgatgaacagaggagatacgtgtcttctctgacagaggagatttccaggagaggagcagggaccccaggacagcctgggcaggtctcccaacaggaactggacactgttgtgaggacccagctggagattttgagacaagtgaatgagatgaagaactccatgcgtgagaccatgcggctggttagtggcgtccagcacccaggctcggccggcgtctacgagacaacccagcacttcatggacatcaaggagcacctgcacatcgtgaagagagatatcgacagcctcgcgcagcgcagcatgtcatctaatgaaaaaccaaaatgcccagatctaccagcattcccgtcgtgtctgtccacagtccactttgtgatatttatagtggtgcagacggtgttgttcattggctacatcatgtacaggactcagcaagaagcagctgccaaaaaattcttctgaccttgattttcctatgtgtacgtcatgtatctgggctagactttcgctggcttcaagacaatttacctcttattaaagtaatggtctcgtttgctttgggatccagaacaacactgtttagtatatatgctactaaattgttgtaagcctttgtaagtttcctctcagatgtcatttggg

SEQ ID NO: 799 - protein, 517 aa, Rattus norvegicus
  ref <308>: DATABASE ACCESSION NUMBER: Refseq / NP_446338
  ref <309>: DATABASE ENTRY DATE: 2002-11-05
MAVSRRRGPQAGAQSFFCALLLSFSQFVGSDGMGGDAAAPGAAGTQAELPHRRFEYKYSFKGPHLVQSDGTVPFWAHAGNAIPSADQIRIAPSLKSQRGSVWTKTKAAFENWEVEVTFRVTGRGRIGADGLAIWYTENQGLDGPVFGSADMWNGVGIFFDSFDNDGKKNNPAIVVVGNNGQINYDHQNDGATQALASCQRDFRNKPYPVRAKITYYQKTLTVMINNGFTPDKNDYEFCAKVENMVIPTQGHFGISAATGGLADDHDVLSFLTFQLTEPGKEPPTPEKDISEKEKEKYQEEFEHFQQELDKKKEEFQKGHPDLQGQPADDIFESIGDRELRQVFEGQNRIHLEIKQLNRQLDMILDEQRRYVSSLTEEISRRGAGTPGQPGQVSQQELDTVVRTQLEILRQVNEMKNSMRETMRLVSGVQHPGSAGVYETTQHFMDIKEHLHIVKRDIDSLAQRSMSSNEKPKCPDLPAFPSCLSTVHFVIFIVVQTVLFIGYIMYRTQQEAAAKKFF

SEQ ID NO: 800 - DNA, 2764 bp, Homo sapiens
  ref <308>: DATABASE ACCESSION NUMBER: Refseq / NM_005570
  ref <309>: DATABASE ENTRY DATE: 2000-11-01
ctctaaagcttagagccaagatggcgggatccaggcaaaggggtctccgggccagagttcggccgctgttctgcgccttgctgctgtcactcggtcgcttcgtccggggcgacggcgtgggaggagaccccgcggtcgcgttgccacatcgccgtttcgagtacaaatacagcttcaaggggccgcacctggtgcagagcgacgggaccgtgcccttctgggcccacgcggggaatgctattccaagttcagatcaaattcgagtagcaccatctttaaaaagccaaagaggctcagtgtggacaaagacaaaagcggcctttgagaactgggaagttgaggtgacatttcgagtgactggaagaggtcgaattggagctgatggcctagcaatttggtatgcagaaaatcaaggcttggagggccctgtgtttggatcagctgatctgtggaatggtgttggaatattttttgattcttttgacaatgatggaaagaaaaataatcctgctatagtaattataggcaacaatggacaaatccattatgaccatcaaaatgacggggctagtcaagctttggcaagttgccagagggacttccgcaacaaaccctatcctgtccgagcaaagattacctattaccagaacacactgacagtaatgatcaataatggctttacaccagataaaaatgattatgaattttgtgccaaagtggaaaatatgattatccctgcacaagggcattttggaatatctgctgcaactggaggtcttgcagatgaccatgatgtcctttcttttctgactttccagttgactgaacctggaaaagagccgcccacaccagataaagaaatttcggaaaaggaaaaagaaaagtatcaggaggaatttgagcactttcaacaagaattggataaaaaaaaagaggaattccagaagggccaccccgacctccaagggcagcctgcggaggaaatatttgagagtgtaggagatcgagagctaagacaagtctttgaaggacagaatcgtattcatcttgaaatcaagcagctgaaccggcagttagatatgattcttgatgaacagagaagatatgtctcttccttaacagaggaaatctctaaaagaggagcaggaatgcctgggcagcatgggcagattactcaacaagaactggatactgttgtgaaaactcagcatgagattctgagacaagtaaatgaaatgaaaaattccatgagtgaaaccgtcagactggtcagtggaatgcagcaccctggctctgctggaggcgtctatgagacaacacagcacttcattgacatcaaagagcacctgcacatagtaaagagggacatagataacttagtgcagcgaaatatgccatcaaatgaaaagccgaaatgcccagaactaccaccatttccatcatgtttgtctacggtccacttcattatatttgttgtggtgcaaactgtattattcattggttatatcatgtataggtctcagcaagaagcagctgccaaaaaattcttttgactaccattttcctgtgtacttcatctatttgtgtacaaaatgatgtcgttttgagggaatttaagtatttaaattgcttcatagtctaaattattaattttcttaataaaataactgtttaaacattgatttgcagttaagaataaaccttaaagcaaagacaaccacattttaatttgttcacagtatgtaaatctgtctaaatttcagtgaatttctggtcagtatgatgcagcctctgagcagatattgaccagtaagagggtaaataaagtgggggcaacccctggatatgaatgttaccccctaagtctccaatattgcaggtttccctgtataacgtaaacacacttgccctcatgcctcccagaatatgaggtctaattaagaagtcccatcaggtttattttgtaaccaaagtcttttttagaggtcagacttcctaatcaaaggcctgggcctgcagtcctttcatcttaatgcaacttcctttgaaatcaaagaatattttgtctgagagctttaaggatctggtaatagacttcaaaatgttaagtgaaattttttttcctctatttatcaatgatatatttcacttttaaaggaaattttggaggaaaatatagctgctttttgcctaaaaaaccttgtgggtggaaatattcctctgagaatggcttttataggtattttgcctggtaatgtattcattcatgattgcccatattcttgaatgtttcttcattccaatggggtcaggtcaatattatgaaaataatttttatatttatatttgtaactaagaatttatttctccctttactacacgatgtaaattcacgtcaaattcgatgatctgaggatttaaattcacaaaacctgccactacattctggtttacattagttacttcatgctggctggggttagtgaccatttgcatactcttttaaatcaaggaggctgtagtagaggcagttttaagattcttgaaggcaaaatttgaaaaacagtgaatacttctaattgtttccttttagtgccagaactaagacattgtgaagcacttgttagtaaacttaaccttgaaatgtcagactggaaggagtttttatgtctttgtgcatacttctgggtattacagaaacagtctgtaaataacattttaagatgcaaatttaattctgttcacagctgatttatactgattt

SEQ ID NO: 801 - protein, 510 aa, Homo sapiens
  ref <308>: DATABASE ACCESSION NUMBER: Refseq / NP_005561
  ref <309>: DATABASE ENTRY DATE: 2000-11-01
MAGSRQRGLRARVRPLFCALLLSLGRFVRGDGVGGDPAVALPHRRFEYKYSFKGPHLVQSDGTVPFWAHAGNAIPSSDQIRVAPSLKSQRGSVWTKTKAAFENWEVEVTFRVTGRGRIGADGLAIWYAENQGLEGPVFGSADLWNGVGIFFDSFDNDGKKNNPAIVIIGNNGQIHYDHQNDGASQALASCQRDFRNKPYPVRAKITYYQNTLTVMINNGFTPDKNDYEFCAKVENMIIPAQGHFGISAATGGLADDHDVLSFLTFQLTEPGKEPPTPDKEISEKEKEKYQEEFEHFQQELDKKKEEFQKGHPDLQGQPAEEIFESVGDRELRQVFEGQNRIHLEIKQLNRQLDMILDEQRRYVSSLTEEISKRGAGMPGQHGQITQQELDTVVKTQHEILRQVNEMKNSMSETVRLVSGMQHPGSAGGVYETTQHFIDIKEHLHIVKRDIDNLVQRNMPSNEKPKCPELPPFPSCLSTVHFIIFVVVQTVLFIGYIMYRSQQEAAAKKFF

SEQ ID NO: 802 - DNA, 894 bp, Rattus norvegicus
  ref <308>: DATABASE ACCESSION NUMBER: EMBL / D89070
  ref <309>: DATABASE ENTRY DATE: 1999-05-26
catgtcttccgacagacccgtggcactggtgactggtgctaacaaaggaatcggattcgcgatcatgcatgatctgtgtcataaattcttgggggacgtggtgctcacggcacgggacaagtcacagggccacaaggcggtgcagcagctgcagacagagggcctgagccaacgcttccaccagctggacatcgacaacccacagagcatacgcgcgctgcgtgactttctgcttaaggagtacagaggactggacgtgctagtcaacaatgcgggcatcgccttcaaagttgttgaccccacccccttccacattcaagcagaggtgacaatgaaaaccaacgtttttgatgcccaagatgtctgcaaagagctactccctataataaatccccaaggcagagtggtgaatgtatcaagcagcttgagtctctgggccctgaaaaactgcagcccggagctgcagcagaagtttcacagtgagaccatcactgaggaggtgctggtggagctcatgaacaagtttgtagaggatgcaaagaaaagagtccacgcgaaagaaggctggcccaatagtgcatatagggtccccaagatagacgtgacagtcctgtccagaatccacgccaggagactcaatgagaagagaggggacaagatcctcctgaacgcctgctgccctgggtgggtcagaaccaacatggcaggaccaaaagccaccaaaagcacagaagaaggagcagagacccccgtgtacttggcccctttgcctccagatgcagaggtgcctcacgggcagtttgttcaagataaaaaagttgaacaatggtgaatccaactcttaccacccccccaaccccttctatcctgacttggtgaaagccaagggacatg

SEQ ID NO: 803 - protein, 277 aa, Rattus norvegicus
  misc_feature (1)..(277): Xaa=Unknown amino acid
MSSDRPVALVTGANKGIGFAIMHDLCHKFLGDVVLTARDKSQGHKAVQQLQTEGLSQRFHQLDIDNPQSIRALRDFLLKEYRGLDVLVNNAGIAFKVVDPTPFHIQAEVTMKTNVFDAQDVCKELLPIINPQGRVVNVSSSLSLWALKNCSPELQQKFHSETITEEVLVELMNKFVEDAKKRVHAKEGWPNSAYRVPKIDVTVLSRIHARRLNEKRGDKILLNACCPGWVRTNMAGPKATKSTEEGAETPVYLAPLPPDAEVPHGQFVQDKKVEQWX

SEQ ID NO: 804 - DNA, 296 bp, Rattus norvegicus
  misc_feature (1)..(296): n=a, c, g or t
  ref <308>: DATABASE ACCESSION NUMBER: EMBL / AA684963
  ref <309>: DATABASE ENTRY DATE: 2000-03-08
gtgcctacagagacatgaggctgagctggntcctgacagtactgttcatttgcntgantgccctggtcacagccacaggggccgaagaagcggaagctgcagattggagtgaagaaacgtgtggttcactgtcccatcaagtctagaaagggagatgtcttacacatgcattacacgggaaagctagaagatgggacggagtttgacagcagcctaccacagaaccagccctttnttttctcccttggcactggccaggtcatcaagggctgggaccaggggctacttggggatgt

SEQ ID NO: 805 - DNA, 714 bp, Homo sapiens
  ref <308>: DATABASE ACCESSION NUMBER: Refseq / NM_057092
  ref <309>: DATABASE ENTRY DATE: 2003-01-17
gggtgagcaaaggggcgggtccctggctgctgtggcctcccctgaccccctccccccgctgctggggtcctcggccaagcccccttctcactggactgagacatgaggctgagctggttccgggtcctgacagtactgtccatctgcctgagcgccgtggccacggccacgggggccgagggcaaaaggaagctgcagatcggggtcaagaagcgggtggaccactgtcccatcaaatcgcgcaaaggggatgtcctgcacatgcactacacggggaagctggaagatgggacagagtttgacagcagcctgccccagaaccagccctttgtcttctcccttggcacaggccaggtcatcaagggctgggaccaggggctgctggggatgtgtgagggggaaaagcgcaagctggtgatcccatccgagctagggtatggagagcggggagctcccccaaagattccaggcggtgcaaccctggtgttcgaggtggagctgctcaaaatagagcgacgaactgagctgtaaccagactggggaggggcagggggagaggcccccatcagggaccagactgttccaaaaaaaaaacaaaaaacaaaaacaaacaaaaaaacacttaaaagcccaaggagtaagcctgtgtgtttgtgggccctgagagactcagagacctcagctccagcataccccaccaccttctcctttccc

SEQ ID NO: 806 - protein, 142 aa, Homo sapiens
  ref <308>: DATABASE ACCESSION NUMBER: Refseq / NP_476433
  ref <309>: DATABASE ENTRY DATE: 2003-01-17
MRLSWFRVLTVLSICLSAVATATGAEGKRKLQIGVKKRVDHCPIKSRKGDVLHMHYTGKLEDGTEFDSSLPQNQPFVFSLGTGQVIKGWDQGLLGMCEGEKRKLVIPSELGYGERGAPPKIPGGATLVFEVELLKIERRTEL

SEQ ID NO: 807 - DNA, 265 bp, Rattus norvegicus
  misc_feature (1)..(265): n=a, c, g or t
  ref <308>: DATABASE ACCESSION NUMBER: EMBL / AA685112
  ref <309>: DATABASE ENTRY DATE: 2000-03-08
cctgggccagggacggagccgctgcacttcaagatgtaccgcctgagctcgtcagtnctgccccgggccttggccaggccatgcgcacaggacatcttaatggccaaagccttcatagcagtgcagtggccgctacgtacaagtatgtgnaatatgaaggcacaggaacttggatgtggacatgaantctgcgactgacagtgcagctcgggattctaatgtggacagaactnttccgaggcctgggcatgaccctaagctacct

SEQ ID NO: 808 - DNA, 779 bp, Homo sapiens
  ref <308>: DATABASE ACCESSION NUMBER: Refseq / NM_002496
  ref <309>: DATABASE ENTRY DATE: 2002-11-05
cccgctggcccaatggcagcgtcctacagtgtagcctccgcctcccgattgactggcctgcttggcaaggcaagtagcggcggcgcttcaagatgcgctgcctgaccacgcctatgctgctgcgggccctggcccaggctgcacgtgcaggacctcctggtggccggagcctccacagcagtgcagtggcagccacctacaagtatgtgaacatgcaggatcccgagatggacatgaagtcagtgactgaccgggcagcccgcaccctgctgtggactgagctcttccgaggcctgggcatgaccctgagctacctgttccgggaaccggccaccatcaactacccgttcgagaagggcccgctgagccctcgcttccgtggggagcatgcgctgcgccggtacccatccggggaggagcgttgcattgcctgcaagctctgcgaggccatctgccccgcccaggccatcaccatcgaggctgagccaagagctgatggcagccgccggaccacccgctatgacatcgacatgaccaagtgcatctactgcggcttctgccaggaggcctgtcccgtggatgccatcgtcgagggccccaactttgagttctccacggagacccatgaggagctgctgtacaacaaggagaagttgctcaacaacggggacaagtgggaggccgagatcgccgccaacatccaggctgactacttgtatcggtgacgccccaccggcctgcagcccctgctgcccaataaaaccactccgaccccacgg

SEQ ID NO: 809 - protein, 210 aa, Homo sapiens
  ref <308>: DATABASE ACCESSION NUMBER: Refseq / NP_002487
  ref <309>: DATABASE ENTRY DATE: 2002-11-05
MRCLTTPMLLRALAQAARAGPPGGRSLHSSAVAATYKYVNMQDPEMDMKSVTDRAARTLLWTELFRGLGMTLSYLFREPATINYPFEKGPLSPRFRGEHALRRYPSGEERCIACKLCEAICPAQAITIEAEPRADGSRRTTRYDIDMTKCIYCGFCQEACPVDAIVEGPNFEFSTETHEELLYNKEKLLNNGDKWEAEIAANIQADYLYR

SEQ ID NO: 810 - DNA, 1288 bp, Rattus norvegicus
  ref <308>: DATABASE ACCESSION NUMBER: Refseq / NM_031149
  ref <309>: DATABASE ENTRY DATE: 2003-01-15
gccgaaagagggaagatggcgcttgatgggccagagcagatggaactggaagaggggaaggcaggcagtggactccgtcaatattatctgtccaagattgaagaactccagttgattgtgaatgacaagagtcagaacctccggagactgcaggcccagaggaatgagctcaatgcaaaagttcgtctgttgcgggaggaactgcagctgctgcaggaacagggctcctacgttggagaagtcgtgagggccatggataagaaaaaagtgttggtcaaggtccatcctgagggcaaatttgttgttgatgtggacaagaacattgatatcaatgatgtgacacccaattgtcgggtggctctaagaaatgacagctacactctgcataagatcctgcctaacaaagtggaccctttggtatcactaatgatggtggaaaaggtgccagactcaacctacgagatgattggcgggctagacaagcagatcaaggagatcaaagaagtgattgagctgcctgtgaagcaccctgagctctttgaagccctgggcattgcacagccaaagggagtcctgctatatggacccccgggcactgggaagacgttgttggcccgggctgtggctcatcatacggactgtacctttattcgtgtctctggctctgaactggtacagaaattcattggggaaggggcaagaatggtgagggagctgtttgtcatggcccgagaacatgctccctccatcatcttcatggacgagatcgactctatcggttcttcacggctggagggaggctctggaggcgacagtgaggtacagcgcacaatgctggaactgctcaaccagctggatggctttgaggccactaagaatatcaaggttatcatggctactaataggattgatatcctggactctgccctgcttcgtcctgggaggattgacaggaaaattgaattcccacctcccaatgaggaggcccggctggacattttgaaaatccactctcggaaaatgaacttgaccagggggatcaacctgaggaaaattgctgagttgatgccaggagcttcaggggctgaagtgaagggcgtgtgcacagaggccggcatgtatgctctgcgggaacggcgtgtccacgttactcaggaggactttgagatggcagtagccaaggtcatgcaaaaggatagtgagaaaaacatgtccatcaagaagctttggaagtgagggtgtgtcctttgtgtggatccctcaaataaaggtctgtgcgataaactcc

SEQ ID NO: 811 - protein, 406 aa, Rattus norvegicus
  ref <308>: DATABASE ACCESSION NUMBER: Refseq / NP_112411
  ref <309>: DATABASE ENTRY DATE: 2003-01-15
MALDGPEQMELEEGKAGSGLRQYYLSKIEELQLIVNDKSQNLRRLQAQRNELNAKVRLLREELQLLQEQGSYVGEVVRAMDKKKVLVKVHPEGKFVVDVDKNIDINDVTPNCRVALRNDSYTLHKILPNKVDPLVSLMMVEKVPDSTYEMIGGLDKQIKEIKEVIELPVKHPELFEALGIAQPKGVLLYGPPGTGKTLLARAVAHHTDCTFIRVSGSELVQKFIGEGARMVRELFVMAREHAPSIIFMDEIDSIGSSRLEGGSGGDSEVQRTMLELLNQLDGFEATKNIKVIMATNRIDILDSALLRPGRIDRKIEFPPPNEEARLDILKIHSRKMNLTRGINLRKIAELMPGASGAEVKGVCTEAGMYALRERRVHVTQEDFEMAVAKVMQKDSEKNMSIKKLWK

SEQ ID NO: 812 - DNA, 698 bp, Rattus norvegicus
  ref <308>: DATABASE ACCESSION NUMBER: Refseq / NM_031318
  ref <309>: DATABASE ENTRY DATE: 2003-01-13
gcgctagagggaagatggaagacttccaggcctccgaggagactgcatttgttgtggatgaagtgagcaacattgtaaaggaggctatagaaagtgccatcggcggtaacgcctaccagcacagcaaagtcaaccagtggaccactaatgttgtagaacagactttgagccaactcaccaaactggggaaaccatttaaatacattgtgacctgtgtgatcatgcagaagaatggtgctgggttacacaccgcaagttcctgcttctgggacagctccacggacgggagctgcacagtccgatgggagaacaagaccatgtactgcatcgtcagtgccttcggactgtccatctgaccgcctgactgcctcagcctccggttccagcgtttctagtccatcttaccaccagctatgttgggcggataccttcctcctctttaagttgttctgaggcactcccaaaatgtagagaaataaaccaaatgaccctggccacaggaaccacacgacggacactaggcagatgagcagccacctgtcatccaaggcaggcagtaccagttgtcttaactgtcttctcaaaggtgctaagatctcaagtctgctagtggaaacttctctactttctgaaatgattcagatacactaattttccacactttatacttttgttagaataataaattattcagaatt

SEQ ID NO: 813 - protein, 113 aa, Rattus norvegicus
  ref <308>: DATABASE ACCESSION NUMBER: Refseq / NP_112608
  ref <309>: DATABASE ENTRY DATE: 2003-01-13
MEDFQASEETAFVVDEVSNIVKEAIESAIGGNAYQHSKVNQWTTNVVEQTLSQLTKLGKPFKYIVTCVIMQKNGAGLHTASSCFWDSSTDGSCTVRWENKTMYCIVSAFGLSI

SEQ ID NO: 814 - DNA, 713 bp, Homo sapiens
  ref <308>: DATABASE ACCESSION NUMBER: Refseq / NM_006519
  ref <309>: DATABASE ENTRY DATE: 2000-11-01
atggaagactaccaggctgcggaggagactgcttttgttgttgatgaagtgagcaacattgtaaaagaggctatagaaagcgcaattggtggtaacgcttatcaacacagcaaagtgaaccagtggaccacaaatgtagtagaacaaactttaagccaactcaccaagctgggaaaaccatttaaatacatcgtgacctgtgtaattatgcagaagaatggagctggattacacacagcaagttcctgcttctgggacagctctactgacgggagctgcactgtgcgatgggagaataagaccatgtactgcatcgtcagtgccttcggactgtctatttgacctgcagtccagcctatggcctttctccttttgtctctagttcatcctctaaccaccagccatgaattcagtgaactcttttctcattctctttgttttgtggcactttcacaatgtagaggaaaaaaccaaatgaccgcactgtgatgtgaatggcaccgaagtcagatgagtatccctgtaggtcacctgcagcctgcgttgccacttgtcttaactctgaatatttcatttcaaaggtgctaaaatctgaaatctgctagtgtgaaacttgctctactctctgaaatgattcaaatacactaattttccatactttatacttttgttagaataaattattcaaatctaaaaaaaaaaaaaaaaaaact

SEQ ID NO: 815 - protein, 113 aa, Homo sapiens
  ref <308>: DATABASE ACCESSION NUMBER: Refseq / NP_006510
  ref <309>: DATABASE ENTRY DATE: 2000-11-01
MEDYQAAEETAFVVDEVSNIVKEAIESAIGGNAYQHSKVNQWTTNVVEQTLSQLTKLGKPFKYIVTCVIMQKNGAGLHTASSCFWDSSTDGSCTVRWENKTMYCIVSAFGLSI

SEQ ID NO: 816 - DNA, 1910 bp, Rattus norvegicus
  ref <308>: DATABASE ACCESSION NUMBER: EMBL / AB022209
  ref <309>: DATABASE ENTRY DATE: 1999-10-15
accctgtcaagtgtccatgatgctgggccctgagggaggtgaaggctatgtggtcaaactccgtggcctaccctggtcctgctcaattgaggacgtacaaaacttcctctccgactgcacaattcatgatggggtcgcaggtgttcatttcatttatactagagaaggcaggcagagtggtgaggcttttgttgaacttgagtcagaagatgatgtaaaattggctctgaaaaaagacagggaaagcatgggacaccggtatattgaggtgttcaagtcacacagaaccgagatggattgggtgttgaagcacagtggtccaaacagcgccgacagtgccaatgatggctttgtgaggcttcggggactcccgtttggatgcacaaaggaagaaatcgttcagttcttctcagggttggaaattgtgccaaacgggatcacactacctgtggacccggaaggcaagattacaggggaggccttcgttcagtttgcctcacaagagttagccgagaaagctttagggaagcacaaggagagaatagggcacaggtatattgaagtgttcaagagcagtcaggaggaagttaggtcatactcagatccacctctgaagtttatgtctgtgcagaggcctgggccttatgacaggcctggcacagcccggaggtacattggcattgtgaaacaggcaggcctggataggatgaggtctggtgcctatagtgcaggctatgggggctatgaagaatacagtggcctcagtgatggctatggcttcaccactgacctgtttgggagagacctcagctattgtctctcaggaatgtatgatcacagatacggagacagcgagttcacagtgcagagcaccaccggccactgcgtccacatgagagggctgccctacaaagcaacggagaacgacatttacaacttcttctctccactcaaccctgtgagagttcatattgagattggtcctgatggaagagtgaccggagaagctgatgttgagtttgctactcatgaagaagcagtggcagctatgtccaaggacagggccaacatgcagcacagatacatagaactcttcctgaattcaacaacaggagctagcaatggggcttatagcagccaggtgatgcagggcatgggtgtgtcagctgcccaggcaacttacagtggcctggagagccagtcagtgagtggctgttacggggccggctacagcggtcagaacagcatgggtggatatgattagtattgtaggaacatttgggttatttcaatcagaaaatttcacaggcagccaataaacagtcaagagcagtttataactctagaggaagctgggggacccactttgcaccatgagtttgtgaaatctggattaaaaaattacctcttcagtgtttctcatgcaaacttttcttctagcatgtaatattgagtaaactaaaaactattttcttccgcttttctcaattaacatttttggtagtatacttaagagtgatgttatctgagttaagtagtttaagtatgttgagtggatctttcagcacaccacagtgaacacactgggggcatgtacttttctggagaactcaaggtgctagatccctgatgcaaagagaagcatttctcatgttcattctagtttatattttcatttaaaatctttaggttaagtttaagctttttaaaagttagttttgagaattgagacacaatactaatactgtaggaattggtgaggccttgacttaaagctttctttgtactgtgatttccttttgggtgtattttgctaagtgaaacttgttaaattttttgttaactaaatttttttcttaaaataaagactttttcgcggccgcgaattcctgcagcccgggggatccact

SEQ ID NO: 817 - protein, 416 aa, Rattus norvegicus
  misc_feature (1)..(416): Xaa=Unknown amino acid
MMLGPEGGEGYVVKLRGLPWSCSIEDVQNFLSDCTIHDGVAGVHFIYTREGRQSGEAFVELESEDDVKLALKKDRESMGHRYIEVFKSHRTEMDWVLKHSGPNSADSANDGFVRLRGLPFGCTKEEIVQFFSGLEIVPNGITLPVDPEGKITGEAFVQFASQELAEKALGKHKERIGHRYIEVFKSSQEEVRSYSDPPLKFMSVQRPGPYDRPGTARRYIGIVKQAGLDRMRSGAYSAGYGGYEEYSGLSDGYGFTTDLFGRDLSYCLSGMYDHRYGDSEFTVQSTTGHCVHMRGLPYKATENDIYNFFSPLNPVRVHIEIGPDGRVTGEADVEFATHEEAVAAMSKDRANMQHRYIELFLNSTTGASNGAYSSQVMQGMGVSAAQATYSGLESQSVSGCYGAGYSGQNSMGGYDX

SEQ ID NO: 818 - DNA, 1452 bp, Rattus norvegicus; identical to SEQ ID NO: 681
  ref <308>: DATABASE ACCESSION NUMBER: Refseq / NM_057188
  ref <309>: DATABASE ENTRY DATE: 2003-01-13

SEQ ID NO: 819 - protein, 345 aa, Rattus norvegicus; identical to SEQ ID NO: 682
  ref <308>: DATABASE ACCESSION NUMBER: Refseq / NP_476536
  ref <309>: DATABASE ENTRY DATE: 2003-01-13

SEQ ID NO: 820 - DNA, 1464 bp, Homo sapiens; identical to SEQ ID NO: 683
  ref <308>: DATABASE ACCESSION NUMBER: Refseq / NM_006877
  ref <309>: DATABASE ENTRY DATE: 2002-11-05

SEQ ID NO: 821 - protein, 345 aa, Homo sapiens; identical to SEQ ID NO: 684
  ref <308>: DATABASE ACCESSION NUMBER: Refseq / NP_006868
  ref <309>: DATABASE ENTRY DATE: 2002-11-05

SEQ ID NO: 822 - DNA, 2304 bp, Rattus norvegicus
  misc_feature (1)..(2304): n=a, c, g or t
  ref <308>: DATABASE ACCESSION NUMBER: EMBL / AF093139
  ref <309>: DATABASE ENTRY DATE: 1998-10-08
attccatcctaatacgactcactatagggctcgagcggccgcccgggcaggtccaaggcgtccgggtgtttggtggcgtcaggttctgcgcctgagcccgcccctgtacctgcctgtgccatggcggacgaagggaagtcatacaacgaacatgatgaccgtgttagtttcccacaaagaagaaagaaaggtcgggggcctttccgatggaagtgtggtgtggggaatcgtaggtctggaagaggtggttctggtatacggtcttcccggtttgaggaagatgatggagatgtggcaatgaatgatccccaggatggcccccgagtgagattcaacccctataccacccgacctaaccgtcggagagatacttggcatgatcgagatcggattcatgttactgtacggagagacagagctcctcaagaaagaggaggtgctggcaccagtcaagatgggaccaccaagaactggttcaagattacaattccttatggcaaaaagtatgataaaatgtggcttctgagcatgattcaaagcaagtgcagtgtccccttcaaccccattgagtttcactatgaaaatacacgggcccatttttttgtggaaaatgccactaccgcttctgcattaaaggctgtcaactataagattcaggatcgagaaaacggaaggatatctatcatcatcaactcttctgctccaccctatattgtacagaatgaactgaagcctgaacaagtagagcagctcaagctgatcatgagcaaacgatatgatggctcccagcaagcacttgacctcaagggcctccgctcagacccagatttggtggcccagaacatcgatgttgttctaaaccgtagaggctgtatggcagccgccctgaggatcattgaagagaacattcctgagctattgtctttgaacttgagtaacaacaggctgtacaagcttgatgacatgtccagcattgtacagaaggcaccaaacttaaagatcctgaatctctctggaaacgaattgaagtccgagtgggaattagacaagataaaagggctgaagctggaagagctgtggcttgacagaaaccccatgtgtgacaccttcctagaccagtccacctatatcagcaccattcgcgaacgatttcccaagttattacgcctggatggccatgagctaccccctccaattgcctttgatgtcgaagcccctactatgttaccaccctgcaagggaagctattttggaacagagaacctaaagagtctggtcctgcacttcttgcagcagtactatgcaatttatgactcaggagaccgccagggtcttctggatgcctaccatgatggcgcctgttgctcgctaagcactccttccaaccctcagaaccctgtccgacacaacttagccaaatacttcaatgacagcagaaatgtgaagaagattaaagataccaccacgcggttccggctattaaagcatacacgtcttaatgtcgttgccttcctcaatgagttacctaaaactcaccatgacgttaactcctttgtggtagatataagtgcccaaacaagcacattgttgtgtttttctgtcaatggagtcttcaaggaagtggacgggaagtctcgagattctttacgtgctttcacgagaacgttcattgctgttcctgccagcaattcagggctatgtattgtaaatgacgaattatttgtgcggaacgccagccctgaagaaatccaaagagccttcgccatgcctgcacccacaccttcttccagcccagtacccacactctcccaagaacagcaggatatgttacaagcattttctacccagtctggcatgaacctcgagtggtctcagaagtgccttcaagacaataactgggactacaccagatctgcccaggccttcactcatctcaaggccaagggagagattccagaagtagcgtttatgaaatgatctcaagaaaagtccccttgtaaatagcccttggataatattgtctggctgtcatctgcggactcctgtccagcccgaggccacnctgtaactgtgactggggaggaagggctgcntcatccktcctcacctaccttctggaagncttagcagaagacttccggaagattgagcctctatggtgccaggaagccaaagcttactttgtagagctdgacnctaaattaccggaaggacttaggtgctctgtgtacttaaccccagnattccctttactttttaagataaagagtgatattgtagtgtgtgtcccaaaaaaaaaaaaaa

SEQ ID NO: 823 - protein, 619 aa, Rattus norvegicus
  misc_feature (1)..(619): Xaa=Unknown amino acid
MADEGKSYNEHDDRVSFPQRRKKGRGPFRWKCGVGNRRSGRGGSGIRSSRFEEDDGDVAMNDPQDGPRVRFNPYTTRPNRRRDTWHDRDRIHVTVRRDRAPQERGGAGTSQDGTTKNWFKITIPYGKKYDKMWLLSMIQSKCSVPFNPIEFHYENTRAHFFVENATTASALKAVNYKIQDRENGRISIIINSSAPPYIVQNELKPEQVEQLKLIMSKRYDGSQQALDLKGLRSDPDLVAQNIDVVLNRRGCMAAALRIIEENIPELLSLNLSNNRLYKLDDMSSIVQKAPNLKILNLSGNELKSEWELDKIKGLKLEELWLDRNPMCDTFLDQSTYISTIRERFPKLLRLDGHELPPPIAFDVEAPTMLPPCKGSYFGTENLKSLVLHFLQQYYAIYDSGDRQGLLDAYHDGACCSLSTPSNPQNPVRHNLAKYFNDSRNVKKIKDTTTRFRLLKHTRLNVVAFLNELPKTHHDVNSFVVDISAQTSTLLCFSVNGVFKEVDGKSRDSLRAFTRTFIAVPASNSGLCIVNDELFVRNASPEEIQRAFAMPAPTPSSSPVPTLSQEQQDMLQAFSTQSGMNLEWSQKCLQDNNWDYTRSAQAFTHLKAKGEIPEVAFMKX

SEQ ID NO: 824 - DNA, 2264 bp, Homo sapiens
  ref <308>: DATABASE ACCESSION NUMBER: Refseq / NM_006362
  ref <309>: DATABASE ENTRY DATE: 2001-09-07
ggcacgagggagcgcttgggagttaggttgtttgccggcgtagcggccagcgcctgagcccgccgttgatcttcgctgtggcatggcggacgaggggaagtcgtacagcgaacacgatgatgaacgcgttaatttccctcaaagaaagaagaaaggccggggtcccttccggtggaaatatggtgaaggaaaccgtaggtctggaagaggcggttctggtattcggtcttcccgccttgaggaagatgatggagatgtggcaatgagtgatgcccaggatggtccccgagtacgatacaacccctataccacccgacctaaccgtcggggtgatacttggcatgatcgagatcgcattcatgttactgtgcggagagacagagctcctccagagagaggaggggctggcaccagccaggatgggacctcaaagaactggttcaagattacaattccttatggcagaaagtatgacaaggcatggctcctgagcatgattcagagcaagtgcagtgtgcccttcacccctattgagtttcactatgagaatacacgggcccagttcttcgttgaagacgccagtactgcctctgcattgaaggctgtcaactataagattttggatcgggagaaccgaaggatatctatcatcatcaactcttctgctccaccccacactatactgaatgaactgaagccagaacaagtagaacagctaaagctgatcatgagcaaacgatacgatggctcccaacaagcccttgacctcaaaggcctccgttcagacccagatttggtggcccagaacattgacgttgtcctgaatcgcagaagctgtatggcagctaccctgaggatcattgaagagaacatccctgagctattgtccttgaacttgagcaacaacaggctgtacaggctggatgacatgtctagcattgttcagaaggcacccaacctgaagatcctaaacctttctggaaatgaattgaagtctgagcgggaattggacaagataaaggggctgaagctagaagagctctggctcgatggaaactccctgtgtgacaccttccgagaccagtccacctacatcagcgccattcgcgaacgatttcccaagttactacgcctggatggccatgagctacccccaccaattgcctttgatgttgaagcccccacgacgttaccgccctgcaagggaagctattttggaacagaaaacttgaagagtctggtcttgcacttcctgcaacagtactatgcaatttacgactctggagaccgacaagggctcctggatgcctaccatgatggggcctgctgttccctgagcattcctttcattcctcagaaccctgcccgaagcagcttagccgagtatttcaaggatagcagaaatgtgaagaagcttaaagaccctaccttgcggttccggctgctgaagcacacgcgtctcaacgttgttgccttcctcaatgagttgcccaaaacccagcacgacgtcaattccttcgtggtagacataagcgcccagacaagcacattgctgtgtttttctgtcaatggagtcttcaaggaagtggacggaaagtcccgggattctttgcgagccttcacccggacattcattgctgttcctgctagcaattcagggctatgtattgtaaatgatgagctatttgtgcggaatgccagttctgaagagatccaaagagccttcgctatgcctgcacccacgccttcctccagcccggtgcccaccctctctccagagcagcaggaaatgttgcaagcattctctacccagtctggcatgaacctcgagtggtcccagaagtgccttcaggacaacaactgggactacaccagatctgcccaggccttcactcatctcaaggccaagggcgagatcccagaagtggcattcatgaagtgatcgtagtcatgcctcagaagcagtcccccctgtaaatagtccttggatattaccgtctggttgtcgtctgtcatctcctcctgtctggcccgaggccgccccgtgactgtgaccgagggagggagggctgcctgatccctctcctcgcctgccttctggaagacttcagaagattgagcctcactggtgccaggaagccaaagcttactttgtagaactgacactaaactacccgaaggacttaggtgctttgtgtacttaaccccaggacctccttactttttaatataaagagtgatgttgtaaaaaaaaaaaaaaaaaa

SEQ ID NO: 825 - protein, 619 aa, Homo sapiens
  ref <308>: DATABASE ACCESSION NUMBER: Refseq / NP_006353
  ref <309>: DATABASE ENTRY DATE: 2001-09-07
MADEGKSYSEHDDERVNFPQRKKKGRGPFRWKYGEGNRRSGRGGSGIRSSRLEEDDGDVAMSDAQDGPRVRYNPYTTRPNRRGDTWHDRDRIHVTVRRDRAPPERGGAGTSQDGTSKNWFKITIPYGRKYDKAWLLSMIQSKCSVPFTPIEFHYENTRAQFFVEDASTASALKAVNYKILDRENRRISIIINSSAPPHTILNELKPEQVEQLKLIMSKRYDGSQQALDLKGLRSDPDLVAQNIDVVLNRRSCMAATLRIIEENIPELLSLNLSNNRLYRLDDMSSIVQKAPNLKILNLSGNELKSERELDKIKGLKLEELWLDGNSLCDTFRDQSTYISAIRERFPKLLRLDGHELPPPIAFDVEAPTTLPPCKGSYFGTENLKSLVLHFLQQYYAIYDSGDRQGLLDAYHDGACCSLSIPFIPQNPARSSLAEYFKDSRNVKKLKDPTLRFRLLKHTRLNVVAFLNELPKTQHDVNSFVVDISAQTSTLLCFSVNGVFKEVDGKSRDSLRAFTRTFIAVPASNSGLCIVNDELFVRNASSEEIQRAFAMPAPTPSSSPVPTLSPEQQEMLQAFSTQSGMNLEWSQKCLQDNNWDYTRSAQAFTHLKAKGEIPEVAFMK

SEQ ID NO: 826 - DNA, 3008 bp, Rattus norvegicus; identical to SEQ ID NO: 657
  misc_feature (1)..(3008): n=a, c, g or t
  ref <308>: DATABASE ACCESSION NUMBER: Refseq / NM_022297
  ref <309>: DATABASE ENTRY DATE: 2002-05-01

SEQ ID NO: 827 - protein, 285 aa, Rattus norvegicus; identical to SEQ ID NO: 658
  ref <308>: DATABASE ACCESSION NUMBER: Refseq / NP_071633
  ref <309>: DATABASE ENTRY DATE: 2002-05-01

SEQ ID NO: 828 - DNA, 2494 bp, Homo sapiens; identical to SEQ ID NO: 659
  ref <308>: DATABASE ACCESSION NUMBER: Refseq / NM_018150
  ref <309>: DATABASE ENTRY DATE: 2002-11-05

SEQ ID NO: 829 - protein, 245 aa, Homo sapiens; identical to SEQ ID NO: 660
  ref <308>: DATABASE ACCESSION NUMBER: Refseq / NP_060620
  ref <309>: DATABASE ENTRY DATE: 2002-11-05

SEQ ID NO: 830 - DNA, 1548 bp, Rattus norvegicus
  ref <308>: DATABASE ACCESSION NUMBER: Refseq / NM_017068
  ref <309>: DATABASE ENTRY DATE: 2000-11-01
gtcggtggtcgcccgtgctttcgctttctcagggctgtgagggtgttcgttggaattgtcggtccagtcgtcacttgtcctgagggatcacgatgcgccttcctctctccggttacggctcgaagctcgtcctgctctttctgttcctgggagcagttcggtccgatgcattgaaacttaatttgacagattcaaagggtacttgcctttatgcagaatgggagatgaatttcacaataacatatgaagctctaaaagtcaatgaaactgtaaccattacagtgcctgacaaggtgacatacaatggaagcagttgtggcgatgataagaatggtgccaaaataatgatacaatatggatccactctctcttgggctgtgaatttcaccaaggaagcatctcagtattttattaacaacatcacgctttcttacaacactaatgataccaaaacatttcctggtgctgtacctaaaggaatccttactgttatcattcctgtgggatcccagcttccattgggtgtcatctttaagtgcagtagtgttttaactttcaacctgagtcctgttgttcagcactattggggcattcacctgcaagcttttgtccaaaatggtacagtgagtaaacatgaacaagtgtgtaaggaggacaaaactgctaccactgtagcacccatcattcacaccaccgtgccatcgcctactacgacactcactccaacttcaatacccgttccaactccaacggttggaaactacaccatttctaatggcaatgctacctgtctgctggctaccatggggctgcagctgaacatcaccgaggagaaggtgcctttcatttttaacatcaaccctgccacaaccaacttcaccggcagctgtcagccccaaacagctcaacttaggctgaacaacagccaaattaagtatctcgactttatctttgctgtgaaaaatgaaaaacggttctatctgaaggaagtgaatgtcaacatgtatttggctaatggctcagctttccatgtttcaaataacaaccttagcttctgggatgctcctctgggaagttcttatatgtgcaacaaagagcaggtggtttccgtgtctcgaacatttcagataaatacctttaacctgaaggtgcaaccttttaatgtgacgaaaggagagtattctacagctcaagactgcagtgcagatgaagacaacttccttgtgcccatagcggtgggagcagccctgggaggagtacttattctagtgttgctggcttattttattggtctcaagcgccatcatactggatatgagcaattttagcacctacaatctgattgaatatattacaaaatacatacaaataacaaagttgtcttacctgtcagtttatgaaacactttgctacttaagacagactccttggaacttttatttggaaatcagtccccacaatttgagataaggctttttttgaaaaaaaacaaaaaacaacaaaaaaacaaaaaacaaaaaaatcattctctgatctgcttaaaatgca

SEQ ID NO: 831 - protein, 411 aa, Rattus norvegicus
  ref <308>: DATABASE ACCESSION NUMBER: Refseq / NP_058764
  ref <309>: DATABASE ENTRY DATE: 2000-11-01
MRLPLSGYGSKLVLLFLFLGAVRSDALKLNLTDSKGTCLYAEWEMNFTITYEALKVNETVTITVPDKVTYNGSSCGDDKNGAKIMIQYGSTLSWAVNFTKEASQYFINNITLSYNTNDTKTFPGAVPKGILTVIIPVGSQLPLGVIFKCSSVLTFNLSPVVQHYWGIHLQAFVQNGTVSKHEQVCKEDKTATTVAPIIHTTVPSPTTTLTPTSIPVPTPTVGNYTISNGNATCLLATMGLQLNITEEKVPFIFNINPATTNFTGSCQPQTAQLRLNNSQIKYLDFIFAVKNEKRFYLKEVNVNMYLANGSAFHVSNNNLSFWDAPLGSSYMCNKEQVVSVSRTFQINTFNLKVQPFNVTKGEYSTAQDCSADEDNFLVPIAVGAALGGVLILVLLAYFIGLKRHHTGYEQF

SEQ ID NO: 832 - DNA, 1174 bp, Rattus norvegicus
  ref <308>: DATABASE ACCESSION NUMBER: Refseq / NM_017278
  ref <309>: DATABASE ENTRY DATE: 2003-01-14
ccgcagccttctttgacgatcaccgaaccgtagttgaggccgtgttcctgtgtccgctgctgtgtctggttgtaacctcgccggagctatgtttcgcaaccagtatgacaacgatgtcactgtttggagccctcagggcaggattcatcaaatcgaatatgcaatggaagctgtaaagcaaggctcagcgacagtcggcctgaagtcgaagacacatgcagtgctggtcgcgctgaagagagcacagtcagagcttgccgctcaccagaagaaaattctccacgttgacaaccatattggtatctcaattgcgggtctaactgctgatgccagactgttatgtaactttatgcgccaggagtgtttggattccagatttgtatttgacagaccacttcccgtatctcgccttgtgtctctaattggaagcaagacccagataccaacacagcgatatggccggagaccgtatggtgttgggctgctcattgctggttatgatgacatgggccctcacgttttccaaacctgcccatctgctaactattttgactgcagagctatgtccatcggagcccgttcccagtcagctcgcacttacctggagagacacatgtctgaatttatgcagtgcaatttggatgaactggttaagcatggtcttcgcgccttaagagaaacactccctgcagaacaggacctgaccacaaagaatgtttccattgggattgttggtaaagacttggaatttactatctatgatgatgatgatgtgtctccattcctggatggtcttgaagaaagaccacagagaaaagcacagccttcacaggctgctgatgaacctgcagaaaaagctgatgaaccaatggaacattaagtgataaaggttatgaggacatgaggatgcaggggcatacactggtgacaataatctgtattttaaaccaacagctgtaatgtattgggtggtatgttttagaaatcagtccaactgtgagttttctctaagcagcttcacagaaaccatataatggggtgcattttctttgaaagggtctacataatcattttctaggacgtataggtatctatatcaatgtttttatatgaagaaaataagtgtctttgcagttttaaagacaactgtgaaataaaattgtttcaccacctg

SEQ ID NO: 833 - protein, 263 aa, Rattus norvegicus
  ref <308>: DATABASE ACCESSION NUMBER: Refseq / NP_058974
  ref <309>: DATABASE ENTRY DATE: 2003-01-14
MFRNQYDNDVTVWSPQGRIHQIEYAMEAVKQGSATVGLKSKTHAVLVALKRAQSELAAHQKKILHVDNHIGISIAGLTADARLLCNFMRQECLDSRFVFDRPLPVSRLVSLIGSKTQIPTQRYGRRPYGVGLLIAGYDDMGPHVFQTCPSANYFDCRAMSIGARSQSARTYLERHMSEFMQCNLDELVKHGLRALRETLPAEQDLTTKNVSIGIVGKDLEFTIYDDDDVSPFLDGLEERPQRKAQPSQAADEPAEKADEPMEH

SEQ ID NO: 834 - DNA, 654 bp, Rattus norvegicus
  ref <308>: DATABASE ACCESSION NUMBER: EMBL / E02315
  ref <309>: DATABASE ENTRY DATE: 2000-09-02
acgcacaacgcaggtagcgcgttagcagcagcagcgaggcatctcggcgtcacagcccctgcgctgtgcagcccaccctcgcctgccgctcttccttccttcgctcgcaccatggctgatcagctgactgaagaacagattgctgaattcaaggaagctttctccctatttgataaagatggggacggcaccatcacaacaaaggagctggggactgtcatgcggtcactgggtcagaacccaacagaggctgaactgcaggatatgatcaacgaggtggatgccgacgggaatggcaccattgacttcccagagttcttgactatgatggctagaaaaatgaaagacacagatagcgaagaagaaatccgtgaggcattccgagtctttgacaaggatggcaatggctacatcagtgcggcagaactgcgccacgtcatgacaaacctcggggaaaagctaacagatgaagaagtagacgaaatgatcagagaagcagatattgatggagacggacaggtcaactatgaagaattcgtacagatgatgactgcaaaatgaagacctactttcaactactttccccctctagaagaatcaaattgaaatcttttacttacctcttacaaaaaaaaaaaaagaaaaaagaaaaaa

SEQ ID NO: 835 - DNA, 1055 bp, Rattus norvegicus; identical to SEQ ID NO: 473
  ref <308>: DATABASE ACCESSION NUMBER: Refseq / NM_017014
  ref <309>: DATABASE ENTRY DATE: 2003-01-13

SEQ ID NO: 836 - protein, 218 aa, Rattus norvegicus; identical to SEQ ID NO: 474
  ref <308>: DATABASE ACCESSION NUMBER: Refseq / NP_058710
  ref <309>: DATABASE ENTRY DATE: 2003-01-13

SEQ ID NO: 837 - DNA, 1589 bp, Rattus norvegicus; identical to SEQ ID NO: 343
  ref <308>: DATABASE ACCESSION NUMBER: Refseq / NM_017005
  ref <309>: DATABASE ENTRY DATE: 2003-01-14

SEQ ID NO: 838 - protein, 507 aa, Rattus norvegicus; identical to SEQ ID NO: 344
  ref <308>: DATABASE ACCESSION NUMBER: Refseq / NP_058701
  ref <309>: DATABASE ENTRY DATE: 2003-01-14

SEQ ID NO: 839 - DNA, 615 bp, Rattus norvegicus
  ref <308>: DATABASE ACCESSION NUMBER: EMBL / K02816
  ref <309>: DATABASE ENTRY DATE: 2000-03-04
tttcttcgagctcttcaggcagtgattctgacagcgaagttgaaaaaaagttaaagaggaaaaagcaagttgttccagagaaacctgtgaagaagcaaaagcctagtgagagttctagagcactggcatcctccaagcagagtagcagcagcagagatgataacatgttccagattggaaagatgagatatgtcagtgttcgggactttaaaggaaaaattctaattgatattagagaatattggatggactcagaaggtgaaatgaaaccaaggagaaaaggtatttctttaaacatggaacaatggagccagctgaaggaacagatctctgacatagatgacgcagtaagaaagctgtaaagtctgagccatatcaagcctgtactgtcgtagctgttttacttcgctgtcttttcacattggcttttgttttctaaaatgttgtttttcacgctgttgtatatttggattgcagaacaatttgtaagacaaatacttttttttaatgtgcattattaaaatgttctaagtgaagctaattgtcgactttattaaagaggattgctttgtgccccttacctagtgtaaaataaagtcagatcattacaatctt

SEQ ID NO: 840 - DNA, 3974 bp, Rattus norvegicus
  ref <308>: DATABASE ACCESSION NUMBER: EMBL / L38482
  ref <309>: DATABASE ENTRY DATE: 2000-03-04
tcgactacccatattccccaccagccaaccggttcctcaccaagatgtggcacccaaacatctatgaggtaagacactagaggcctgcttcaggcacactccaccacacacttctctgcctcccttgcacatgctccacccctcctctaaccctggtcactcttgcagacaggggacgtatgcatctccatccaccatcccccagttgatgacccacagagtgggagctaccctcagagcggtggaaccccacgcagaatgtcaggtgagaattgccatggaactgcaccgtgggcacccgcaaacaccctgtaccctaagatccacccttccctgctccagtcaggggttcccagagtctggggagctgagcttgcacctacggccctacaggaccatcctcctgagtgtgatctccctgctgaatgagcccaacaccttctcgcctgccaacgtggacgcctcggtgatgtacagaaaatggaaggagagcaaggggaaggaccgcgagtacacggacatcatccggtgagtgcttcctactgtgaagagtgatctggggtgtgggtggggtggggacttgttgtatgtttccattttttgcatcccgggctggatgtgtggaggactctggggcccccagagcacggagttgaccacccagggtggccaagatcccctctgccttgttgttgacttaactccatgagcaactgggctctctgggccacaccctcactgtctgacagagagcatcaatcacttgcatttcgtgcttctgaaacttagagcttttttttttttttttgcaaagtgggaagggggctgagcccactgtgagtctgtcctcagttagggaccagggctgcgacctgttgctgtctatgagtggcagtgtccacacctatcatcgcttcttagcaggagctcctggcctgtctggggccaggcagtctcccctacacccctcacgttgggtatgaagttgcacttgaggggttcagtctttgtcgcttagcttctgtgttttctgagacaggctttcatataactccgtatctccttgtggtccctctgatgtcaggatgacaacacacattcctcggaagtgaccccagtgcttgtctacacagtgacccaaacacagggcctgtcctgtccccaagcctgccctctcagagttggtacaggccgcagctcggtaggcagtgctggtctagcatgtgcacacacacagggttagtctctgtcttaggcaaggtggatgtagccagcatggtccttcatggaggtataagttactcaggaaggtctgagcgctgcactacggaggtgtccccttcaccatggtcaggtcagcaacggtcccggtcactggaagtccctgcagactgtcccctttgttttctgttcagactggctgaacagaactttgttcctcctgctcttcctcagctgagaggaaggctggctgccctagctgttctatatagttctggctgtcctggaagaggagaccctgggtctggccctgtcactgcactctccaccctcctggcagcctttaatccacttctggctgcttcctccctggatccctggcccagagcaggagcccaggctatttttaccattctgactccaggagccacttgctctgaccaggaggcctgtaccactcctggaactcaacctgagccagtatctagtcatgtccctgcctgagcacaaggacaggatagctaggagcctgtgagaaggaccttgagatggatctaggctattgggtgtgctgctgtcccacgtgcccctccaccatagccttgtccccattcccctattccttctgggcagctgaaaacagtgtctgctctgcttgactgcactgggacctgtgccccaagactctggcctgacggtggcctggcctctcaggcacctagttaattgctgcctgccctgtgcaaggaagcccttacatgttgcttcacccatggcctgtgggacctggaacctcagttgttccggaactgcccttcatcatggtgccctcaggtcaggctgcaatttgttgttggtgtgaggaggtgcatgttacctagcccacaactagggtagtgccccccacagtctgggattacagctgtttctgtggtgctgggagctggacatgggtccttatgcttacagaaggagcactctggctgcccctgttgtcggttatagccgaggtcagcctgaatctcatagtagttctcctgcctccgcctccaaggactgggtgacagaccgtctcccacagctggctgtggttacatttctgctggagttggtcactgagccactccttgtcgcctggccctctcctcccacctgctccctgcccccattcatctcatcgtcctgggccgtggcctcacccgccctgtctccccaggaagcaggtcctggggaccaaggtggacgcagagcgcgatggcgtgaagtgcccaccacgctggccgagtactgcgtgaagaccaagcgccggcgcccgacgagggctcagacctcttctacgacgactactatgaggacggtgaagtggaggaggccgacagctgctttggggatgaagaggatgactctggcaccgaggagtcctgacccacgtccctgaaataaacttacaaattttacctcagcaggacccgtgtgggcctcaggcgacagactacctcaccgaggttcaatgtgggctcccatcccatgatccttaggtcctcttaccctgtattccccatgggttttcctcggctttggagaagagctgtggtgcagggcagacaccccactcagccttcagaggatgacaagcctgggaggctgggaaccgactgcccaggggagccagagactccagcccaaagagggccagccccacagtctcctctctgcttttggtgtgtgtgaaatccaaataaaatagctttctgagaagctgagagaagcagccaggacgccggtggcactgggtactgagggctacctgggtacccaggcagggctgtgggatgggcaggaagaggtagcgatggtggcctgtttgttggggctcagtagcatacaggagccccaggcccagaagaaacttgctgcctgcaaatcccacccgcctgcatcgggcactgtggttgcgtccaccccaagcctgtgttcaggaggcctgggtcctgaggcctacaggggattggtattcccaacagtccttgtgttctgggcacttcctcagccctggaaactagtgctgcctgaggagtccctctgatacctgagctgcagcctggtgactccacagcaggggcaggctgagtgaattctctgaccacaccatgctgtgcagggcacctgcagtgaccccgtgctgagatagcagatctgctctgccacctgcatgtttacgggtgctgtggaaagaaagtgtcacttcctcttatgcgggcctgttaatgtccaaagttccagtcaacccatgccagtcagaactgatcagagaaggacacatcggaaaaaggtgttcaggcgatcctctgcccatacaatttgctgccagcctgatctacagttgcaaaaccagcgggaaggctcagtgggcaaaggcctgcaccaagcctagcagaggacccacttggctccaggtggtccctgtgggggttgaggtcagttgagacaaatcccccccccccccccggagttcaccccagtgctaaaaggagcagtgtgccaggagagggagcatcgcttggctgtagttgctgcccccagacacagggcaactttgacagcagagttgctttctaaaaccacacagcagggtgtgaaggaggaggagctgacacgtgggtaaggtgggtggtgcttggaaggccacttgtctccaccggaagagaaagtgtggggccccttcccccagggaccaccagtcctgtgccagg

SEQ ID NO: 841 - protein, 134 aa, Rattus norvegicus
  misc_feature (1)..(134): Xaa=Unknown amino acid
MLHPSSNPGHSCRQGTYASPSTIPQLMTHRVGATLRAVEPHAECQVRIAMELHRGHPQTPCTLRSTLPCSSQGFPESGELSLHLRPYRTILLSVISLLNEPNTFSPANVDASVMYRKWKESKGKDREYTDIIRX

SEQ ID NO: 842 - DNA, 2460 bp, Rattus norvegicus; identical to SEQ ID NO: 54
  ref <308>: DATABASE ACCESSION NUMBER: Refseq / NM_031134
  ref <309>: DATABASE ENTRY DATE: 2003-01-13

SEQ ID NO: 843 - protein, 492 aa, Rattus norvegicus; identical to SEQ ID NO: 55
  ref <308>: DATABASE ACCESSION NUMBER: Refseq / NP_112396
  ref <309>: DATABASE ENTRY DATE: 2003-01-13

SEQ ID NO: 844 - DNA, 1821 bp, Rattus norvegicus
  ref <308>: DATABASE ACCESSION NUMBER: EMBL / M31322
  ref <309>: DATABASE ENTRY DATE: 2000-03-04
gaattcgttacctcctccatctcagagaaccctgtggatgtccgggtgagctctgaggaaagtgaggagatcccgccgttccaccctttccatcccttcccatccttgtctgagaacgaagacactcagccggagttgtaccacccaatgaaaaaaggatctggaatggcagagcaagatgggggcctgattggtgcagaagaaaaggtgatcaacagtaagaataaaatggatgaaaatatggtcattgacgagactctggatgttaaggaaatgattttcaatgctgagagagttgggggtctggaggaagagccggactctgtggggcctctacgggaggacttcagtttgagcagcagtgcccttattggcttgctggtcatcgcggtggccattgctacagtcatcgtcatcagcctggtgatgctgaggaagaggcaatacggcaccatcagccatggcattgtggaggttcatccaatgctcaccccagaagagcgtcacttgaacaagatgcagaaccacggctatgaaaacccaacctacaaatacctggagcagatgcagatttaaggacagcagcgtgtgcgacaccctggctgaggctgctgcaggtgggctggaagagcctcagcgtttgtgcttgactgctgaccaccagcggtgccagaggcctcatcctacatcctgctctcctggattgttaagactataaagtactactgtaggattgcaatttccattcttttaaatgggtttaaaagatgttaatataacaatatatgatatataaaccttaagtgaaaaaaagatctattgcagatatctgatggatgtagttttctttttttaaattagaaatgccacttctattgtattgtctcacacatgctctatataaatggaaaatgttgatttttcaatgatagactatatacacaggctgttcccgttatgtaagtctgttctttaggctcgtttgctgggctggttttgtcgtcatttgttttaatgtataaaggcagtattccccttttcaggttgctgagaaatgtaagtggaactgaagtacattgtatgcagttactgactgttttaggcatagtctccttggaagcctagagcttccagtgccgggtgtccagtgcctgtcaccaaagcaagggctaagtcaccttgagctagctggatgcaaactagatccactgtgctttccttcaaatccagttcttccacagcaaccagcccatagttgttctgtgttcttccacagctgtttacggtagcctcctagccactctcctcagcaagtgcatccaagagtgcaccacccccttctttggacgtctccgtcccatgcactgaccctctgcttgccttcgtacctcacttcctccaccgctcttcagcccctttgatgtcccctcagagaataccgatatacacatggctaaggacccaggagacttcacgggaggcctcattaggtgaaaggacgatgttctgggctgtacatgaaattggatctgtagacactgtgtttccttcactgacttgtaatgtcacgcagctggagttgatgccacaacccttagtgctttgttgctgttttgtttttcagggttctggtaacctgctactgtttttgttttggttttggtttggttttttttgtatttttctgtgatttccctccccttcccccccatgcctcttcccactatgcacagatggaaactttacctacaaactccttcgtatgatctgtggagaatgtacagaacttattacatcaataaaacactttaacttcccccg

SEQ ID NO: 845 - DNA, 3727 bp, Homo sapiens
  ref <308>: DATABASE ACCESSION NUMBER: Refseq / NM_016160
  ref <309>: DATABASE ENTRY DATE: 2002-11-04
gtcgcggtgtgctaagcgaggagtccgagtgtgtgagcttgagagccgcgcgctagagcgacccggcgagggatggcggccaccgggaccgcggccgccgcagccacgggcaggctcctgcttctgctgctggtggggctcacggcgcctgccttggcgctggccggctacatcgaggctcttgcagccaatgccggaacaggatttgctgttgctgagcctcaaatcgcaatgttttgtgggaagttaaatatgcatgtgaacattcagactgggaaatgggaacctgatccaacaggcaccaagagctgctttgaaacaaaagaagaagttcttcagtactgtcaggagatgtatccagagctacagatcacaaatgtgatggaggcaaaccagcgggttagtattgacaactggtgccggagggacaaaaagcaatgcaagagtcgctttgttacacctttcaagtgtctcgtgggtgaatttgtaagtgatgtcctgctagttccagaaaagtgccagtttttccacaaagagcggatggaggtgtgtgagaatcaccagcactggcacacggtagtcaaagaggcatgtctgactcagggaatgaccttatatagctacggcatgctgctcccatgtggggtagaccagttccatggcactgaatatgtgtgctgccctcagacaaagattattggatctgtgtcaaaagaagaggaagaggaagatgaagaggaagaggaagaggaagatgaagaggaagactatgatgtttataaaagtgaatttcctactgaagcagatctggaagacttcacagaagcagctgtggatgaggatgatgaggatgaggaagaaggggaggaagtggtggaggaccgagattactactatgacaccttcaaaggagatgactacaatgaggagaatcctactgaacccggcagcgacggcaccatgtcagacaaggaaattactcatgatgtcaaagctgtctgctcccaggaggcgatgacggggccctgccgggccgtgatgcctcgttggtacttcgacctctccaagggaaagtgcgtgcgctttatatatggtggctgcggcggcaacaggaacaattttgagtctgaggattattgtatggctgtgtgtaaagcgatgattcctccaactcctctgccaaccaatgatgttgatgtgtatttcgagacctctgcagatgataatgagcatgctcgcttccagaaggctaaggagcagctggagattcggcaccgcaaccgaatggacagggtaaagaaggaatgggaagaggcagagcttcaagctaagaacctccccaaagcagagaggcagactctgattcagcacttccaagccatggttaaagctttagagaaggaagcagccagtgagaagcagcagctggtggagacccacctggcccgagtggaagctatgctgaatgaccgccgtcggatggctctggagaactacctggctgccttgcagtctgacccgccacggcctcatcgcattctccaggccttacggcgttatgtccgtgctgagaacaaagatcgcttacataccatccgtcattaccagcatgtgttggctgttgacccagaaaaggcggcccagatgaaatcccaggtgatgacacatctccacgtgattgaagaaaggaggaaccaaagcctctctctgctctacaaagtaccttatgtagcccaagaaattcaagaggaaattgatgagctccttcaggagcagcgtgcagatatggaccagttcactgcctcaatctcagagacccctgtggacgtccgggtgagctctgaggagagtgaggagatcccaccgttccaccccttccaccccttcccagccctacctgagaacgaagacactcagccggagttgtaccacccaatgaaaaaaggatctggagtgggagagcaggatgggggactgatcggtgccgaagagaaagtgattaacagtaagaataaagtggatgaaaacatggtcattgacgagactctggatgttaaggaaatgattttcaatgccgagagagttggaggcctcgaggaagagcgggaatccgtgggcccactgcgggaggacttcagtctgagtagcagtgctctcattggcctgctggtcatcgcagtggccattgccacggtcatcgtcatcagcctggtgatgctgaggaagaggcagtatggcaccatcagccacgggatcgtggaggttgatccaatgctcaccccagaagagcgtcacctgaacaagatgcagaaccatggctatgagaaccccacctacaaatacctggagcagatgcagatttaggtggcagggagcgcggcagccctggcggagggatgcaggtgggccggaagatcccacgattccgatcgactgccaagcagcagccgctgccaggggctgcgtctgacatcctgacctcctggactgtaggactatataaagtactactgtagaactgcaatttccattcttttaaatgggtgaaaaatggtaatataacaatatatgatatataaaccttaaatgaaaaaaatgatctattgcagatatttgatgtagttttcttttttaaattaatcagaaaccccacttccattgtattgtctgacacatgctctcaatatataataaatgggaaatgtcgattttcaataatagacttatatgcaggctgtcgttccggttatgttgtgtaagtcaactcttcagcctcattcactgtcctggcttttatttaaagaaaaaaaaggcagtattccctttttaaatgagctttcaggaagttgctgagaaatggggtggaatagggaactgtaatggccactgaagcacgtgagagaccctcgcaaaatgatgtgaaaggaccagtttcttgaagtccagtgtttccacggctggatacctgtgtgtctccataaaagtcctgtcaccaaggacgttaaaggcattttattccagcgtcttctagagagcttagtgtatacagatgagggtgtccgctgctgctttccttcggaatccagtgcttccacagagattagcctgtagcttatatttgacattcttcactgtctgttgtttacctaccgtagctttttaccgttcacttccccttccaactatgtccagatgtgcaggctcctcctctctggactttctccaaaggcactgaccctcggcctctactttgtcccctcacctccaccccctcctgtcaccggccttgtgacattcactcagagaagaccacaccaaggaggggccgcggctggcccaggagagaacacggggaggtttgtttgtgtgaaaggaaagtagtccaggctgtccctgaaactgagtctgtggacactgtggaaagctttgaacaattgtgttttcgtcacaggagtctttgtaatgcttgtacagttgatgtcgatgctcactgcttctgctttttctttctttttattttaaaaaatctgaaggttctggtaacctgtggtgtatttttattttcctgtgactgtttttgttttgtttttttcctttttcctcccctttagccctattcatgtctctacccactatgcacagattaaacttcacctacaaactccttaatatgatctgtggagaatgtacacagtttaaacacatcaataaatactttaacttccaa

SEQ ID NO: 846 - protein, 763 aa, Homo sapiens
  ref <308>: DATABASE ACCESSION NUMBER: Refseq / NP_057244
  ref <309>: DATABASE ENTRY DATE: 2002-11-04
MAATGTAAAAATGRLLLLLLVGLTAPALALAGYIEALAANAGTGFAVAEPQIAMFCGKLNMHVNIQTGKWEPDPTGTKSCFETKEEVLQYCQEMYPELQITNVMEANQRVSIDNWCRRDKKQCKSRFVTPFKCLVGEFVSDVLLVPEKCQFFHKERMEVCENHQHWHTVVKEACLTQGMTLYSYGMLLPCGVDQFHGTEYVCCPQTKIIGSVSKEEEEEDEEEEEEEDEEEDYDVYKSEFPTEADLEDFTEAAVDEDDEDEEEGEEVVEDRDYYYDTFKGDDYNEENPTEPGSDGTMSDKEITHDVKAVCSQEAMTGPCRAVMPRWYFDLSKGKCVRFIYGGCGGNRNNFESEDYCMAVCKAMIPPTPLPTNDVDVYFETSADDNEHARFQKAKEQLEIRHRNRMDRVKKEWEEAELQAKNLPKAERQTLIQHFQAMVKALEKEAASEKQQLVETHLARVEAMLNDRRRMALENYLAALQSDPPRPHRILQALRRYVRAENKDRLHTIRHYQHVLAVDPEKAAQMKSQVMTHLHVIEERRNQSLSLLYKVPYVAQEIQEEIDELLQEQRADMDQFTASISETPVDVRVSSEESEEIPPFHPFHPFPALPENEDTQPELYHPMKKGSGVGEQDGGLIGAEEKVINSKNKVDENMVIDETLDVKEMIFNAERVGGLEEERESVGPLREDFSLSSSALIGLLVIAVAIATVIVISLVMLRKRQYGTISHGIVEVDPMLTPEERHLNKMQNHGYENPTYKYLEQMQI

SEQ ID NO: 847 - DNA, 451 bp, Rattus norvegicus
  ref <308>: DATABASE ACCESSION NUMBER: EMBL / M34331
  ref <309>: DATABASE ENTRY DATE: 2002-04-09
tcctctttctctcgaaccgggcggcctcatccgcgaacagcgcagcaatggccaagattaaggctcgggacctgcgcggcaagaagaaggaggagctgttgaaacaactggatgatctgaaggtggaactgtcccagcttcgcgtggccaaagtgacaggcggcgccgcgtccaagctctccaagatacgagtcgtacgcaaatccatcgcccgtgtcctcactgtcattaatcagactcaaaaggaaaacctcaggaaattctacaagggaaagaagtacaagcccctggacctgcgacccaagaagacaagagccatgcgccgccggctcaccaagcatgaagagaagctgaagaccaagaagcagcagcggaaggagcggctgtacccactgcgcaagtacgcagtcaaggcctgagacgacgacaataacaataaagtccaaaactg

SEQ ID NO: 848 - protein, 124 aa, Rattus norvegicus
  misc_feature (1)..(124): Xaa=Unknown amino acid
MAKIKARDLRGKKKEELLKQLDDLKVELSQLRVAKVTGGAASKLSKIRVVRKSIARVLTVINQTQKENLRKFYKGKKYKPLDLRPKKTRAMRRRLTKHEEKLKTKKQQRKERLYPLRKYAVKAX

SEQ ID NO: 849 - DNA, 970 bp, Rattus norvegicus
  ref <308>: DATABASE ACCESSION NUMBER: Refseq / NM_013104
  ref <309>: DATABASE ENTRY DATE: 2003-01-14
gcgccatgacctgggacggactgcccacacagccgctgttgatgctgttaatgctgttgttcgctgcgggctccgagtccgccttagcggggtgcccgggctgcgggccgggggtgcaggaggaagacgcggggtcgcctgcagacggctgtgcagagaccggaggctgtttcaggagagaggggcaaccgtgcggggtctacatccctaagtgcgccccaggactgcagtgccaaccccgagagaacgaagagacacctttgcgggcgctgctgatcggccagggccgctgtcaacgcgccagagggccgtcggaagagactaccaaggagagcaaaccccatggaggcgcctcccgcccacgtgacagagaccggcaaaagaatccacggacctcggctgcccctataaggcccagtcctgttcaagatggtgaaatgggcccctgccgcagacacttggattcagtactgcagcagctccagactgaggtcttcagaggcggagcaaatgggctctatgtgccaaactgtgacctcagaggtttctaccgcaagcagcagtgtcgttcctcgcaggggaatcgccgtggtccctgctggtgtgtggatccgatgggccagcctttgccagtgtctccagatggccagggaagctctcagtgctctgccaggagcagcgggtgaaacctggtgggagcctccaggaccctggcaggagcatggggctgtcatttgagctctatgtgaagtgatgataactctgtgccccgagatgagacccaccttcaagccctaccccattgtccctgtcacccctgggcctttacacagcaagttagaaagattgttgttggcttgtgtactaataaagctggacacaagggtttgtctttcaatagatcgcagcgagggagctgctctgctacgtacgaaaccccgacccagaagcaggtcgcccgtcacgccgc

SEQ ID NO: 850 - protein, 226 aa, Rattus norvegicus
  ref <308>: DATABASE ACCESSION NUMBER: Refseq / NP_037236
  ref <309>: DATABASE ENTRY DATE: 2003-01-14
MTWDGLPTQPLLMLLMLLFAAGSESALAGCPGCGPGVQEEDAGSPADGCAETGGCFRREGQPCGVYIPKCAPGLQCQPRENEETPLRALLIGQGRCQRARGPSEETTKESKPHGGASRPRDRDRQKNPRTSAAPIRPSPVQDGEMGPCRRHLDSVLQQLQTEVFRGGANGLYVPNCDLRGFYRKQQCRSSQGNRRGPCWCVDPMGQPLPVSPDGQGSSQCSARSSG

SEQ ID NO: 851 - DNA, 1898 bp, Rattus norvegicus
  ref <308>: DATABASE ACCESSION NUMBER: EMBL / M89945
  ref <309>: DATABASE ENTRY DATE: 2000-03-04
taagtacctgagggtaaggtgttgttctctctcatatggtcatatagtcttctgagtagtctaaacctcattatatgacccaaactggctttgaactctttttttttttttttttttttttttggttctttttttcggagctggggaccgaacccagggccttgcgcttcctaggcaagcgctcactgagctaaatccccaaccccggctttgaactcttgatcttgttgcctcaccacttcgaagggctggaaaaataagtgacctcacctagctagaatcagagatgtaagaagtgctttgccagagttggaaataggaagctgcgaggctggttattccaggatcttaataacaacatcagccagaagtacttgaagtgctacaaacaggaagtagatagccgaattcccagacttttggtctggatgtactgacaccgcccaccgctcggtgggctgatggccctcgcgccaccctttcattggccagtcgtcacaaggcccatactcacacgaggtcattcagccaatcagcgaactcggcctcgcccatcatgaggcgcaagtgtcttacttgcggcttggtccgcggcaggctgggagtcgtagtattatatttgggttctgcctactgagccgggagtctgggaactacaactcccagagtgctgagcggatgcacgctctgcttttaggtgtaagccgcaaacatcttggaccccgggagaatccgcgttgaagcacagagcatttagctcctctgtcagaatgaatggggaccagaaactggatgttcataaccaagaaaagcagaatttcatccagcacttctcccagattgtcaaggtgctgactgaggatgaactgggacacccagagaagggagatgctattacccggatcaaagaggtcctggagtacaacactgtaggaggcaagtacaatcggggtctgacggtggtacagaccttccaggaactggtggaaccaaggaaacaggatgctgagagcctacagcgggccctgacggtgggctggtgtgtagaactgctccaggctttcttcctcgtgttagatgacatcatggactcttcctacactcgccgggggcagatctgctggtatcagaagccgggcataggcttggatgccatcaacgatgctctgcttctggaagccgctatctaccgcctgcttaagttctactgcagggagcagccctactacctcaacctgctggagctctttctacagagttcctatcagactgagatcgggcagactctcgacctcatcacagcaccccagggccaagtggatcttggtagatacactgaaaagaggtacaaatctatcgtcaagtacaagacagctttctactctttctacctgcctatcgcggctgccatgtacatggctggaattgatggggagaaggaacacgctaatgccctgaagatcctgctggagatgggcgagttcttccagaaccaggacgactaccttgatctctttggagaccccagtgtgaccggaaaggtcggcactgacatccaggacaacaaatgcagctggctggtggttcagtgtctgctacgagccactcctcagcagcgccagatcttagaggagaattatgggcagaaggacccagaaaaagtggcgcgggtgaaagcactgtacgaggagctggatctgcggagtgtgttcttcaagtacgaggaagacagttacaaccgcctcaagagtctcatagagcagtgctccgcgcccctgcccccatccatcttcctggaactagcaaacaagatctacaagcggagaaagtaacctcgaattgtagaggctgcgagggaggggtctcaataaattattgttcaacaaaaaaaaaaaaaa

SEQ ID NO: 852 - DNA, 1490 bp, Rattus norvegicus
  ref <308>: DATABASE ACCESSION NUMBER: Refseq / NM_017288
  ref <309>: DATABASE ENTRY DATE: 2003-01-14
cgcagcctggatgcgccctgtggcgcacgcacgcagcatcccgagcctcccgccgcgcgcgggatgcctgctctccgggccccggggcttggccccggcggtaaccggagcgggggggcgcgcccccccagcagcagctgcggcgcccgcgcccgggccagtcgccgccggggcccatctcctgtcgccgcgctctgcgacccaccgccttgcgcggccatggggacgctgctggctctcgtggtgggcgcggtgctggtatcctcagcctgggggggctgcgtggaggtggattctgagaccgaggcagtgtatgggatgaccttcaaaatcctgtgtatctcctgtaagcgtcgtagtgagaccaccgccgagaccttcacggagtggaccttccgccagaagggcacagaggaatttgtcaagatcctacgctatgagaatgaggtgctgcagctggaggaagatgagcgctttgagggccgtgtggtgtggaacggtagtcggggcaccaaggacctgcaggacctgtccatcttcatcaccaatgtcacctacaaccactctggcgactacgaatgtcacgtctaccgtctcctcttctttgataattacgagcacaacaccagcgtcgtcaagaagatccacctggaggtggtggacaaggccaacagagatatggcatccatcgtgtcagagatcatgatgtacgtgctcattgtggtgttaaccatatggctcgtggcggagatggtgtactgctacaagaagattgctgctgccacggaagctgctgcacaagagaatgcctcggaatacctggccattacttccgagagcaaagagaactgtacaggcgtccaggtggctgaatagcgctggctctgggctccgcctcaaggaagagccagcctacgggtaccctccagccctgcagtggggatcagcccctggtgggtaccctcccctggcagtggggatcagcccatcggtctccccagcctcacagttctgcagtggagccaccagggtgggagcgggcagggactgatcccacctcacccaccgcctcccacctaccctcccaccgccatgcatgatgggtgaagcaatatggccgccccaccctgcttttgctgcctgtttgggggagggggcggtgaggcgagggggcaggccccgcccccttctttttgctgatttgcacataggccacttccacacgcactgccaggccagccggcccacccctgcttgatggggtgaagaggggtcgggacagggacagtagtgggcagggggttctgggcctcatctcccctccgcttcctccggctggacctggggttcccttcctgtgacacctcctagccctggcccacccgccctctctcaccagccttcaattgtggtctcttgggaaggcctcttcggcctcctatctttacagaagtagtttttgttcatgaaataaagattcttggactcga

SEQ ID NO: 853 - protein, 218 aa, Rattus norvegicus
  ref <308>: DATABASE ACCESSION NUMBER: Refseq / NP_058984
  ref <309>: DATABASE ENTRY DATE: 2003-01-14
MGTLLALVVGAVLVSSAWGGCVEVDSETEAVYGMTFKILCISCKRRSETTAETFTEWTFRQKGTEEFVKILRYENEVLQLEEDERFEGRVVWNGSRGTKDLQDLSIFITNVTYNHSGDYECHVYRLLFFDNYEHNTSVVKKIHLEVVDKANRDMASIVSEIMMYVLIVVLTIWLVAEMVYCYKKIAAATEAAAQENASEYLAITSESKENCTGVQVAE

SEQ ID NO: 854 - DNA, 604 bp, Rattus norvegicus
  ref <308>: DATABASE ACCESSION NUMBER: EMBL / AA799340
  ref <309>: DATABASE ENTRY DATE: 2000-03-03
aaaagtgcaaagtctaatgctacaaaaggcataaacacagcacaagaatgctcacggcaaacatcagaaacaaaccagaacatgtcaagaggtcagcagaaacgggcactgttacatgtgataccacggcacaggaagcaaacaggcagggtgggatagactgcagggtcttgtgggctggtccaggacagcatcctagggagaacatcactgcacaacatgaaaatgccctcaggtagggcaggctgattcctgggtgtcctcccagtctgtcttgaaagggctggccaggtcctggtacgtgggtgtgggtagggagagtctgaggggggtggtccttaacagtttctttggggtttctgatggttaggacagggttggagcgaagaggtttttggaagcatctcacaaaagggccattcacaggccgcgcagacgtcgagagtctgtgtctgtgtgtgagcatttacatgcatgtttggataatacacacttgtgtccttgggacggcttattgtttttaagacacaggcagaatgaagagtgactgtctctattgtaggtgataaagttctgcctggccttaacccccatcctattaaca

SEQ ID NO: 855 - DNA, 637 bp, Rattus norvegicus
  misc_feature (1)..(637): n=a, c, g or t
  ref <308>: DATABASE ACCESSION NUMBER: EMBL / AA799518
  ref <309>: DATABASE ENTRY DATE: 2000-03-03
cataccagctcaattttaattttaaagtgaaaaatgtacaggtgggaaagttaagcaacgccctgcagattcataacaaggagctgacctagttgtcccactacaagctgacagctctccagcagtgattgatttgtcacagcacagaaatgccaccctggacttgtggtccgcttactaactggaggaagcagttttaagtcttaccacggcctgtgctcaaagtgagcactgcactttgagaaagttgtttgaccagtcagcaatgtctgctagctgacttacccgactggccatgagtctcatctgcacgttgactcgcctaggggagggtcctggtctgtgtcaaactctctggtaccataaaaaccaagtaacggtggatctgacaggttaccctgagagcttaagaagcagagtatttaacttcatttgtaganaagaagggagtagtacaggctataggctgaggtagccttcatttaaagtgcaatctacttgcgataaatatagtaactaggacccgttccaagcagctatcatagtcatgttgatgctagctaactagaacctggttggtcagttctcacacacatcacaagcagaagcccttgcagtaagctatcagtgagaagag

SEQ ID NO: 856 - DNA, 533 bp, Rattus norvegicus
  ref <308>: DATABASE ACCESSION NUMBER: EMBL / AA799570
  ref <309>: DATABASE ENTRY DATE: 2000-03-03
acggggtcacaggcaaatggctttattggcttatcatttaaaatgggcttgtcatcacaaggcttgggaagttcagacacttccaagagagatgttcaaacaaacccctttctaaccagtcaaggggaaagaacagtaggcccgagattgactgcagcgtgagttcagcctactcagtataaccaggcatgccaggcctactgcaagccacatgtgcttttactacctaagagttctagagtctggattcagaactgttactagcagacctgagctcataccctcggtgactctgccaagggaggagggggaggggaacacagattagagaaggtggcccgacacccaccttctaggcctttgttaggggccaagtgtggctctctgggcctactgtgggaacaaaccatggcaaagccactaagaagcacaaaaagttagtgtggtactggcatctccaaaatatgtcctgaaagtacaaatgagcagattccatattcagacacgaaggcatccaactaaaacatttaaat

SEQ ID NO: 857 - DNA, 419 bp, Rattus norvegicus
  ref <308>: DATABASE ACCESSION NUMBER: EMBL / AA799762
  ref <309>: DATABASE ENTRY DATE: 2000-03-03
ggaagacacagttatggggtcaggaaagctcagtgctgtaaactaataggctctctccagctcctgctcatgtctgtttagccttcctagtttacagggagggttgagagtgtgggctcttgtctagcaccacttaaacttgggcagtctgctgattctgacaggtcaggacggggccctgctgttggtctggctaagatgcatgactggctgcttcttcatggtttcaggagccaggccacaggaaattgggcttctggaggcctggggggattctgccgagctgtagggagagcataagtcgctgggtcagcatttgttttaattggggccacccccacaaccacacggtaagatggactcactgctcaggagactccaacactgcggccatgaatgggagggtggatttcccgaaa

SEQ ID NO: 858 - DNA, 591 bp, Rattus norvegicus
  ref <308>: DATABASE ACCESSION NUMBER: EMBL / AA800191
  ref <309>: DATABASE ENTRY DATE: 2000-03-03
gattctttattcctctgctgcacagcagtgtacaaggtggacttcgcctgactccatttcttgcagaggccgccttcagtctgcccacttcagccaatgcatgaagcagaatgcttgctcagaaacgttttttttttttttccaagtcattttcacagggatgtggggtcaaggggcaacattacacccaagaacaggaatccaagcctcagaggaaaggcactgcaccagaccccctgcttctagggaagactgatgcagagagggggaactcaacagcagattgtagaaccaaggcagaggaatgtgagtgtgacgctgagtagaaggaacacagcaaggcaaacaccattaggccctttccttcctcagttctgagcataaacttttctagggactaaagtagttttagttccaaggtctggttttgctccagggtgacagaggccacaccaggcaaagatctcacaggtgatacaggcagagaggtgtggtacagacctagagagatgttctcaggaccacgtgcaggtatagcagcttggaggctgaaggccagatcagggtaaaggatgcacttcataactccaa

SEQ ID NO: 859 - DNA, 1610 bp, Rattus norvegicus
  ref <308>: DATABASE ACCESSION NUMBER: Refseq / NM_022934
  ref <309>: DATABASE ENTRY DATE: 2003-01-13
ggccgggcggaactttccagaacgctcggtgggtggtagaggagcagcgtctggccgagctgcgctgtgctacgctcctctttccgctctccggcgccggcccgctcaccggctgtaaaaaatggtgaaagaaactacttactatgatgttctgggggtcaaacccaatgccacccaggaagaattgaaaaaggcatatagaaaattggccttgaagtaccaccctgataaaaatccaaatgaaggagaaaagtttaaacagatttctcaagcttatgaagttcttgctgattccaagaaaagggaactatatgataaagggggcgagcaggcgattaaggagggcggagcaggtggaggttttggctcgcccatggatatctttgatatgttctttggaggaggaggaaggatgcaaagagaaaggagaggtaaaaatgtcgtgcatcagctctcagtgaccttagaagacttatataatggtgcaacaaggaaactggctctgcaaaaaaatgtgatttgtgacaaatgtgaaggccgaggtggtaagaaaggagcagtagagtgctgtcccaactgccgggggactggcatgcagatcaggattcatcagattggaccaggaatggttcagcaaattcagtcagtgtgcatggagtgccagggtcatggagaacgcatcagtcctaaagacagatgtaaaagctgcaatggaagaaagatagttcgagagaagaaaattttagaagttcatattgataaaggcatgaaagatggtcagaagataacattccacggtgaaggagaccaagaaccaggactggagccaggagatattatcattgtgttagatcagaaggaccatgctgtttttacaaggcgaggagaagaccttttcatgtgtatggacatacagctggttgaagcattgtgtggcttccaaaagccaatatctactcttgacaaccgaaccatagtcatcacctctcatccaggtcagattgtcaagcatggggatataaaatgtgtgctaaatgaaggtatgccaatataccgtcggccatatgaaaagggacgtctaatcattgagtttaaggtaaactttcctgaaaatggctttctctctcctgataaactctctttgctggaaaaactccttcctgaaaggaaggaagtagaagagactgatgaaatggatcaggtagaactggtggactttgatccaaatcaggaaagacggcgtcattataatggagaagcgtatgaggatgatgagcatcaccccagaggtggcgttcagtgtcagacctcttaatgggccagtcactctttgaccttgtgtatgcagtagtgaatgtgggaaggactgtaatcataatatgctcactacttggctgttgtttttgttttaatattcaactatagtagtgttttaaaagttaaatgaagaataaacacaaatataaaagctctgactttgccctgtatgtatgatgactttaatgttcaagatgaaaatgaatacttgtaaaaaactagtttaaaaaatgccctagcatctgttaggccatatcttgtgtaactgataatagcgtgtacattagactgac

SEQ ID NO: 860 - protein, 397 aa, Rattus norvegicus
  ref <308>: DATABASE ACCESSION NUMBER: Refseq / NP_075223
  ref <309>: DATABASE ENTRY DATE: 2003-01-13
MVKETTYYDVLGVKPNATQEELKKAYRKLALKYHPDKNPNEGEKFKQISQAYEVLADSKKRELYDKGGEQAIKEGGAGGGFGSPMDIFDMFFGGGGRMQRERRGKNVVHQLSVTLEDLYNGATRKLALQKNVICDKCEGRGGKKGAVECCPNCRGTGMQIRIHQIGPGMVQQIQSVCMECQGHGERISPKDRCKSCNGRKIVREKKILEVHIDKGMKDGQKITFHGEGDQEPGLEPGDIIIVLDQKDHAVFTRRGEDLFMCMDIQLVEALCGFQKPISTLDNRTIVITSHPGQIVKHGDIKCVLNEGMPIYRRPYEKGRLIIEFKVNFPENGFLSPDKLSLLEKLLPERKEVEETDEMDQVELVDFDPNQERRRHYNGEAYEDDEHHPRGGVQCQTS

SEQ ID NO: 861 - DNA, 1438 bp, Homo sapiens
  ref <308>: DATABASE ACCESSION NUMBER: Refseq / NM_001539
  ref <309>: DATABASE ENTRY DATE: 2002-11-05
cggtaactaccccggctgcgcacagctcggcgctccttcccgctccctcacacaccgcctcagcccgcaccggcagtagaagatggtgaaagaaacaacttactacgatgttttgggggtcaaacccaatgctactcaggaagaattgaaaaaggcttataggaaactggccttgaagtaccatcctgataagaacccaaatgaaggagagaagtttaaacagatttctcaagcttacgaagttctctctgatgcaaagaaaagggaattatatgacaaaggaggagaacaggcaattaaagagggtggagcaggtggcggttttggctcccccatggacatctttgatatgttttttggaggaggaggaaggatgcagagagaaaggagaggtaaaaatgttgtacatcagctctcagtaaccctagaagacttatataatggtgcaacaagaaaactggctctgcaaaagaatgtgatttgtgacaaatgtgaaggtagaggaggtaagaaaggagcagtagagtgctgtcccaattgccgaggtactggaatgcaaataagaattcatcagataggacctggaatggttcagcaaattcagtctgtgtgcatggagtgccagggccatggggagcggatcagtcctaaagatagatgtaaaagctgcaacggaaggaagatagttcgagagaagaaaattttagaagttcatattgacaaaggcatgaaagatggccagaagataacattccatggtgaaggagaccaagaaccaggactggagccaggcgatattatcattgtgttagatcagaaggaccatgctgtttttactcgacgaggagaagaccttttcatgtgtatggacatacagctcgttgaagcactgtgtggcttccagaagccaatatctactcttgacaaccgaaccatcgtcatcacctctcatccaggtcagattgtcaagcatggagatatcaagtgtgtactaaatgaaggcatgccaatttatcgtagaccatatgaaaagggtcgcctaatcatcgaatttaaggtaaactttcctgagaatggctttctctctcctgataaactgtctttgctggaaaaactcctacccgagaggaaggaagtggaagagactgatgagatggaccaagtagaactggtggactttgatccaaatcaggaaagacggcgccactacaatggagaagcatatgaggatgatgaacatcatcccagaggtggtgttcagtgtcagacctcttaatggccagtgaataacactcactgctggcatttaatgtgcagtagtgaatgagtgaaggactgtaatcataatatgctcactacttgctcttgtttttgttttaataaactatagtagtgttataaaaagttaaatgaagaataaacgcaaatataaaagctc

SEQ ID NO: 862 - protein, 397 aa, Homo sapiens
  ref <308>: DATABASE ACCESSION NUMBER: Refseq / NP_001530
  ref <309>: DATABASE ENTRY DATE: 2002-11-05
MVKETTYYDVLGVKPNATQEELKKAYRKLALKYHPDKNPNEGEKFKQISQAYEVLSDAKKRELYDKGGEQAIKEGGAGGGFGSPMDIFDMFFGGGGRMQRERRGKNVVHQLSVTLEDLYNGATRKLALQKNVICDKCEGRGGKKGAVECCPNCRGTGMQIRIHQIGPGMVQQIQSVCMECQGHGERISPKDRCKSCNGRKIVREKKILEVHIDKGMKDGQKITFHGEGDQEPGLEPGDIIIVLDQKDHAVFTRRGEDLFMCMDIQLVEALCGFQKPISTLDNRTIVITSHPGQIVKHGDIKCVLNEGMPIYRRPYEKGRLIIEFKVNFPENGFLSPDKLSLLEKLLPERKEVEETDEMDQVELVDFDPNQERRRHYNGEAYEDDEHHPRGGVQCQTS

SEQ ID NO: 863 - DNA, 495 bp, Rattus norvegicus
  ref <308>: DATABASE ACCESSION NUMBER: EMBL / AA800566
  ref <309>: DATABASE ENTRY DATE: 2000-03-03
caccctcagcagaaaaaacaatacagtgatagaaaacctccccagccctcccacaccccaattaaaaactagaaaaaatgcctgtcctcttgggctgcgatgccatggtagtctgactcctctggggcactgccatggagtgggctggcccccagagcaccctccacttcaccttggggaaaggaggggtgcttatggtcacaggcgttaaaataggagttccagtggtacccgttcccacacatgcacttccttccttttccccagggcctggaccaaagggataataggatagaagtgagccacaatcagcagattcaggagcagagacacagcctacaggaggtcaaggaggctcccggcacacctcctccctctcccccatttaaaaaaaaggcatttttggggtctttatcataccaaaaaaaatggttcctttcagacctgagaaaaagaccaagatgtccagtctgggcaggagaaactgcactgaac

SEQ ID NO: 864 - DNA, 1967 bp, Homo sapiens
  ref <308>: DATABASE ACCESSION NUMBER: Refseq / NM_016022
  ref <309>: DATABASE ENTRY DATE: 2002-11-14
gtggggtcgcgttgccaccccacgcggactccccagctggcgcgcccctcccatttgcctgtcctggtcaggcccccaccccccttcccacctgaccagccatgggggctgcggtgtttttcggctgcactttcgtcgcgttcggcccggccttcgcgcttttcttgatcactgtggctggggacccgcttcgcgttatcatcctggtcgcaggggcatttttctggctggtctccctgctcctggcctctgtggtctggttcatcttggtccatgtgaccgaccggtcagatgcccggctccagtacggcctcctgatttttggtgctgctgtctctgtccttctacaggaggtgttccgctttgcctactacaagctgcttaagaaggcagatgaggggttagcatcgctgagtgaggacggaagatcacccatctccatccgccagatggcctatgtttctggtctctccttcggtatcatcagtggtgtcttctctgttatcaatattttggctgatgcacttgggccaggtgtggttgggatccatggagactcaccctattacttcctgacttcagcctttctgacagcagccattatcctgctccataccttttggggagttgtgttctttgatgcctgtgagaggagacggtactgggctttgggcctggtggttgggagtcacctactgacatcgggactgacattcctgaacccctggtatgaggccagcctgctgcccatctatgcagtcactgtttccatggggctctgggccttcatcacagctggagggtccctccgaagtattcagcgcagctcttgtgtaaggactgactacctggactgatcgcctgacagatcccacctgcctgtccactgcccatgactgagcccagccccagcccggggtccattgcccacattctctgtctccttctcgtcggtctaccccactacctccagggttttgctttgtccttttgtgaccgttagtctctaagctttaccaggagcagcctgggttcagccagtcagtgactggtgggtttgaatctgcacttatccccaccacctggggacccccttgttgtgtccaggactccccctgtgtcagtgctctgctctcaccctgcccaagactcacctcccttcccctctgcaggccgacggcaggaggacagtcgggtgatggtgtattctgccctgcgcatcccacccgaggactgagggaacctaggggggacccctgggcctggggtgccctcctgatgtcctcgccctgtatttctccatctccagttctggacagtgcaggttgccaagaaaagggacctagtttagccattgccctggagatgaaattaatggaggctcaaggatagatgagctctgagtttctcagtactccctcaagactggacatcttggtctttttctcaggcctgagggggaaccatttttggtgtgataaataccctaaactgcctttttttcttttttgaggtggggggagggaggaggtatattggaactcttctaacctccttgggctatattttctctcctcgagttgctcctcatggctgggctcatttcggtccctttctccttggtcccagaccttgggggaaaggaaggaagtgcatgtttgggaactggcattactggaactaatggttttaacctccttaaccaccagcatccctcctctccccaaggtgaagtggagggtgctgtggtgagctggccactccagagctgcagtgccactggaggagtcagactaccatgacatcgtagggaaggaggggagatttttttgtagtttttaattggggtgtgggaggggcggggaggttttctataaactgtatcattttctgctgagggtggagtgtcccatccttttaatcaaggtgattgtgattttgactaataaaaaagaatttgtaaaaaa

SEQ ID NO: 865 - protein, 251 aa, Homo sapiens
  ref <308>: DATABASE ACCESSION NUMBER: Refseq / NP_057106
  ref <309>: DATABASE ENTRY DATE: 2002-11-14
MGAAVFFGCTFVAFGPAFALFLITVAGDPLRVIILVAGAFFWLVSLLLASVVWFILVHVTDRSDARLQYGLLIFGAAVSVLLQEVFRFAYYKLLKKADEGLASLSEDGRSPISIRQMAYVSGLSFGIISGVFSVINILADALGPGVVGIHGDSPYYFLTSAFLTAAIILLHTFWGVVFFDACERRRYWALGLVVGSHLLTSGLTFLNPWYEASLLPIYAVTVSMGLWAFITAGGSLRSIQRSSCVRTDYLD

SEQ ID NO: 866 - DNA, 1876 bp, Rattus norvegicus
  ref <308>: DATABASE ACCESSION NUMBER: Refseq / NM_053516
  ref <309>: DATABASE ENTRY DATE: 2003-01-13
cggtaattatcgcaattcctacaggcgtaaaagtattcagctgactcgctacactacatggaggaaatatcaaatgatcccccgccatattatgagccttagggtttatcttcttattcacagtagggggcctaacagggatcgtactatctaactcatcccttgacattgtacttcatgatacatactatgtagtagctcacttccactatgtcttatctataggagcagtattcgccatcatagctggcttcgtccactgattcccactattctcaggctataccctaaatgacacatgagcaaaagcccactttgccattatatttgtaggtgtaaacataacatttttccctcaacacttcctagtattagcggggatacctcgtcgttactctgattatccagatgcttacaccacatgaaatacagtctcctctataggctcattcatctcacttacggccgtccttgtaatgatcttcatgatttgagaagccttcgcatcaaaacgagaagtactctcaatttcctactcctcaactaacctagaatgactgcatggatgccccccaccctaccacacattcgaagaaccttcctacgtaaaagttaaataagaaaggaaggattcgaaccccctacaactggtttcaagccaatttcataaccattatgtctttctcaataaaaaaaaaaaaaaaaccacttccttccttcccaggctaccgggaccgcagctatgaccctccatgcccaggccactggacgccagaggcacccagttcagggaccacatgtcctgggctgcccagagcttcagaggaagaggagatcggaggtcctgaggactctgaggcagtacagcctcgaacaccagaggagccagaactagaagctgaagctactaaaggggatgagccagacctggaacaagaaatggaaccagaaccagagccagaggtagaaccggagccagagccggagccggagccggagccggagccggagccggagccggagccggagccggagccagagcgagagcctgacttccaagaaggggatgagtctgaaggttgtgagaacacctaaaccctagcttgcaggcttgttagaaattgtggactgggaagtaggggttgatccccactccactgaccatcattttcatctctagattcttgaaggccagaatatccttacctgtccaaatctgattcaagctggataagatctggaaacctgccagaactggaccaagtcaatgcagcaagactccatttactgccaaatgagtaaactcgggagggttagcctggacctgattcttcacaactcaggctctttactcaagaatggtctgaatcccactgacctgagcaggcttgtgtgaaaaataccatcccccccaccaacagtattccactcccaaagtagcccaagctgtatttctagagatcttagattcaggcccctaaatcagaccctcttccactccctttttccccctcaggggccatttgggagcccaagtgggcaacacttctacaccatggaaacgactagacttaagagtatcaagcaagtgaaggtggctggctgtccatccacacacagagagaagtcttggagctcacagtcttgaaggggggacctgagagaaaactggagtagacagaagccacacgcatcattgtaactgctctttaattgtctggccttcctctgaactgggagctccgtgtggggtgtggggtctaaccagtcacagacatacacaaggagctctgtacattatctactaagcaaatgaataaaaacttcccagctgtgtttccaagctttcacagatggaaaaattaaataaaaagcc

SEQ ID NO: 867 - protein, 139 aa, Rattus norvegicus
  ref <308>: DATABASE ACCESSION NUMBER: Refseq / NP_445968
  ref <309>: DATABASE ENTRY DATE: 2003-01-13
MSFSIKKKKKPLPSFPGYRDRSYDPPCPGHWTPEAPSSGTTCPGLPRASEEEEIGGPEDSEAVQPRTPEEPELEAEATKGDEPDLEQEMEPEPEPEVEPEPEPEPEPEPEPEPEPEPEPEPEREPDFQEGDESEGCENT

SEQ ID NO: 868 - DNA, 3164 bp, Homo sapiens
  ref <308>: DATABASE ACCESSION NUMBER: Refseq / NM_016131
  ref <309>: DATABASE ENTRY DATE: 2002-12-23
cggcctcagaaagccgagtgaggagttggccgtagtgagagggaccgatcccttggggccgccggcggcgaggccgagccgctcctcccaatggcgaagaagacgtacgacctgcttttcaagctgctcctgatcggggattccggagtggggaagacctgcgtcctttttcgtttttcggatgatgccttcaatactacctttatttccaccataggaatagacttcaagatcaaaacagttgaattacaaggaaagaagatcaagctacagatatgggatacagcaggccaggagcgatttcacaccatcacaacctcctactacagaggcgcaatgggtatcatgctagtatatgacatcaccaatggtaaaagttttgaaaacatcagcaaatggcttagaaacatagatgagcatgccaatgaagatgtggaaagaatgttactaggaaacaagtgtgatatggacgacaaaagagttgtacctaaaggaaaaggagaacagattgcaagggagcatggtattaggttttttgagactagtgcaaaagcaaatataaacatcgaaaaggcgttcctcacgttagctgaagatatccttcgaaagacccctgtaaaagagcccaacagtgaaaatgtagatatcagcagtggaggaggcgtgacaggctggaagagcaaatgctgctgagcattctcctgttccatcagttgccatccactaccccgttttctcttcttgctgcaaaataaaccactctgtccatttttaactctaaacagatatttttgtttctcatcttaactatccaagccacctattttatttgttctttcatctgtgactgcttgctgactttatcataattttcttcaaacaaaaaaatgtatagaaaaatcatgtctgtgacttcatttttaaatgtacttgctcagctcaactgcatttcagttgtattatagtccagttcttatcaacattaaaacctatagcaatcatttcaaatctattctgcaaattgtataagaataaagttagaattaacaattttattttgtacaacagtggaattttctgtcatggataatgtgcttgagtccctataatctatagacatgtgatagcaaaagaaacaaacaaaagccaggaaaacactcattttcgccttgaatatgtaaatgggattaattttgtcctgtgccttatgtggaaagggacttctttgggttttccttttttgttctggtggaagcatgtgcagggagaccatatcatccaaaccataaacccattaaaatgtttgtggtttgcttggctgtaattttcaaagtagttaattgaggacaaagggtaatgcagaagtgatagctttggtttgctgagtcttgttttaagtggccttgatatttaaaactattcctgccaccatttcttctccttggccacttcttccttgcgtctccctgcatgctgctttatttgcttctccctccccaaccacctcatggtatatttaagagtgaaagggacaaactagtaggtttgtcaagtttaatataaagcactgatgtaacttgctaggtaaacggaaagataagttctaactgcctactatccaatgtcagttaattggtgtcttcccccctcatttgctctcttccctaaaatgtgtcccagatgccttcatttgctgttttacttctatgttctgcttttcctcctctctttgttcccttcctgtctatccattgagtttatgaaatggaagagttaactgcatgcactagtgtttggagggtgttgtggtttgtctttctaattaggtgtatagcctattcactttcctaggaataaatctcttaacctaaatttgagtagtctgcattttggcaactcctctaagcagcttggtagcctaagtacaggttgtttttttaaaaaaggaaaagcaggaaggaggagtgaattttattaacatgtttgccaaatgtattgagatttggcctctgaagaacactttttcagtgttaagtttctttaccttaagattccgaaatactttagaatattattaattttaagtcctgtctttacatccttttggaaaacttgtattaccatgagtttggaaaaaggacaacgaaaggcttttcatgtaaagataagatctttagctatctctaaccctgtccttttttcactgcattttttctagttttgcttcattgcttatcattaggatagggtaagtgaagtttgctatgctgctagcatcctaagatgatacctttgttgaaagaattgtgaatagcatgattcatttctagcagaggctgagtttaggacagcagcttccattgagaagtctttctgtgtcgtgaatagcattttaatgacctcttggctcacataagcaaacaacatagggacgtatctgctatgaaaatccacaaatttttcagatagtgccctaaaaacaattttatatgcctcactggttgttattcttaggttattcccacacttgactttatcattgtttactactagtaaaaagcagcattgccaaataatccctaattttccactaaaaatataatgaaatgatgttaagctttttgaaaagtttaggttaaacctactgttgttagattaatgtatttgttgcttccctttatctggaatgtggcattagcttttttattttaaccctctttaattcttattcaattccatgacttaaggttggagagctaaacactgggatttttggataacagactgacagttttgcataattataatcggcattgtacatagaaaggatatggctaccttttgttaaatctgcactttctaaatatcaaaaaagggaaatgaagtataaatcaatttttgtataatctgtttgaaacatgagttttatttgcttaatattagctttgccccttttctgtaagtctcttgggatcctgtgtagaagctgttctcattaaacaccaaacagttaagtccattctctggtactagctacaaattcggtttcatattctacttaacaatttaaataaactgaaatatttctagatggtctacttctgttcatataaaaacaaaacttgatttccaaaaaaaaaaaaaaaaaaaaaaaaaaaaaaaaa

SEQ ID NO: 869 - protein, 200 aa, Homo sapiens
  ref <308>: DATABASE ACCESSION NUMBER: Refseq / NP_057215
  ref <309>: DATABASE ENTRY DATE: 2002-12-23
MAKKTYDLLFKLLLIGDSGVGKTCVLFRFSDDAFNTTFISTIGIDFKIKTVELQGKKIKLQIWDTAGQERFHTITTSYYRGAMGIMLVYDITNGKSFENISKWLRNIDEHANEDVERMLLGNKCDMDDKRVVPKGKGEQIAREHGIRFFETSAKANINIEKAFLTLAEDILRKTPVKEPNSENVDISSGGGVTGWKSKCC

SEQ ID NO: 870 - DNA, 486 bp, Rattus norvegicus
  ref <308>: DATABASE ACCESSION NUMBER: EMBL / AA866234
  ref <309>: DATABASE ENTRY DATE: 2000-03-03
aaccccaccagaaggtggaggcccaggtttatatcctcagcaaggaggagggtggccgccacaaaccctttgtatctcatttcatgcccgtcatgttctccctgacctgggacatggcctgtcgagtcatcttgcctccagggaaggaacttgccatgcctggagaggacttgaagcttagcctaatcttgcggcagcccatgatcttagagaaaggccaacgtttcactttgagggatggcaacaagaccattggcacaggccttgtcactgatgtaccagccatgaccgaggaggacaagaacatcaaatggagctgagtctggacttctgctcaggttgttgagcttaaagctgccctggtcagcattcccacttgtggacacaagctgcatccaaccagagtacacctatggacatttctaatcctgctcacaaggagtgagtggcccgccaagagaggttggcaaataaaactgttccgtg

SEQ ID NO: 871 - DNA, 484 bp, Rattus norvegicus
  ref <308>: DATABASE ACCESSION NUMBER: EMBL / AA866432
  ref <309>: DATABASE ENTRY DATE: 2000-03-03
acgtgggggtttaggaagctgaaccctgtctttagcttggagattttgctgtggcttcattctgttctcaggcccttggggaagttggccaactttgtcattcatggagctgttttcctagcctgtgtcagccattttctcaggcacatccccttcccttagtgcctttccctcctaatgcaaactagggaacgaaaggaacccaaaggaagcatcctctgttcttcatacattcatctgtccggcagacgtgtgtcaagcttgcagaggtggaaaatcctccatctataaggagtctccagtatgatggggaaaacgtacgataccatccctgctgtggcgtatcatggcaagcagcacactgaggatatacgatcaggaagacgaaggacacctttacagagggcgaggcaaaccatgttgaccataactgtgtacagtgctgtgtaccttgcagatgctcaataaagccctgctgacagct

SEQ ID NO: 872 - DNA, 488 bp, Rattus norvegicus
  ref <308>: DATABASE ACCESSION NUMBER: EMBL / AA866477
  ref <309>: DATABASE ENTRY DATE: 2000-03-03
gaggttttttttatttgtttttcaggactctgcaagggtagctggggtgaatttgcacccaggtagcagctgtagtcaccgcagttccatccttgtctccgcgatgttgcccttggccaaaaacgcactaagtcgtctccaagttcgaagcattcagcaagtggtggcaaggcagagccatcagaagaagacacctactttccatgacaaatatggaaatgctgtattagcaggtggaagcatcttctgtatttctgcatggacatatacagccacacaaattggaatagaatggaacctgtcccctgttggcagagtcaccccaaaggaatggagagatcagtagtcatgccagctgatacaataatcaaggaattgtttcaaaaaaccaactcataaatgaatgccaagtcaaagaatcatgtactcattaaaacatggcatattgaagaaaaaaaataaagaaataaagtacctttgaaaccttc

SEQ ID NO: 873 - DNA, 422 bp, Homo sapiens
  ref <308>: DATABASE ACCESSION NUMBER: EMBL / BM724627
  ref <309>: DATABASE ENTRY DATE: 2002-03-06
tttgcacccaggtagcagctgtagtcaccgcagtttcatccttgtctccgcgatgttgcccttggccaaaaacgcactaagtcgtctccaagttcgaagcattcagcaagtggtggcaaggcagagccatcagaagaagacacctactttccatgacaaatatggaaatgctgtattagcaggtggaagcatcttctgtatttctgcatggacatatacagccacacaaattggaatagaatggaacctgtcccctgttggcagagtcaccccaaaggaatggagagatcagtagtcatgccagctgatacaataatcaaggaattgtttcaaaaaaccaactcataaatgaatgccaagtcaaagaatcatgtactcattaaaacatggcatattgaagaaaaaaaaaaaaaaaaaaagac

SEQ ID NO: 874 - DNA, 458 bp, Rattus norvegicus
  ref <308>: DATABASE ACCESSION NUMBER: EMBL / AA875171
  ref <309>: DATABASE ENTRY DATE: 2000-03-03
actttttgaggatgctggcttgagactctggacatttgcagaaaggcacacgcagagctgtcacgggaggtacaaagactgacaagtctgctcgaacagcatggaatcccacacactcagcccacagaaaccacccactctcagctcctgggtcagcagctcccggtaggtgaaatctcagagcagttgcggggcgacccaggactacgagggaacatcctgtgagccaggcggccatgaagaacagaaatgttctgagccttgagtgtcttttcagagagaggccaagtgtggtctcagcagagtgcaccaaactggtgtggtgtggacatggcttcttttggcatcttctaggccagacaatatcactgacaagagggacctgctggccagcctttgttgtgcccaaagatccagacaaaataaagattcgaagttttaattaattccatactcat

SEQ ID NO: 875 - DNA, 433 bp, Rattus norvegicus
  ref <308>: DATABASE ACCESSION NUMBER: EMBL / AA875531
  ref <309>: DATABASE ENTRY DATE: 2000-03-03
gacaaaatcccattccatccatattatacaattaaagacctcctaggtgtatttatattactattattcctaataaccctagtactattcttcccagacctactaggagaatgtggatggagctagaagaattacagaagactcgatcctccatagtgatgtgcagtgagtgggattcttaatttgacttagcggccctctcgttcaccttatccccaactaaaggaatgaagaacacttgccccagattctctcctctctagattcagcattcgtttctttgccagcctcattttcgttcctccccgtggttccgaagaagtcctgtttcttggacaagcagaaaaaaaattgaattgtacctattgtgtcctgtgagatgtttaaataaattgtgaagaataaaataaagcatgtttggttttccaaaaag

SEQ ID NO: 876 - DNA, 410 bp, Rattus norvegicus
  ref <308>: DATABASE ACCESSION NUMBER: EMBL / AA891669
  ref <309>: DATABASE ENTRY DATE: 2000-03-03
cacccagcgtgcgtgcacgtcgtcggtccttggccagcccctcaccagtgtcttcccggcccatcccttgtccctctaggacaggctgctcccaccctccaagtgagctccgcctgcctgtagatttatgctgggagaagacacccttgcccccctccttcctcctctgcacgcagcgctctcctctgcccgtccccacttctcttgtctcgtctccttgtctggtcaggaacctgtctgcaagtgaagcaatatctccgtgttttgtatatacaactgctcttgtagcctttggttttttgttattgtagagaaacacagattctttatacactttgtaaaatttacgccaaaccccagctctcgaactcttattctaccctgtagcccttgcactgttgcccgttact

SEQ ID NO: 877 - DNA, 701 bp, Homo sapiens
  ref <308>: DATABASE ACCESSION NUMBER: Refseq / NM_004218
  ref <309>: DATABASE ENTRY DATE: 2002-12-23
cggacaatggggacccgggacgacgagtacgactacctattcaaagtggtgctcatcggggactcaggcgtgggcaagagcaacctgctgtcgcgcttcacccgcaacgagttcaacctggagagcaagagcaccatcggcgtggagttcgccacccgcagcatccaggtggacggcaagaccatcaaggcgcagatctgggacaccgctggccaggagcgctaccgccgcatcacctccgcgtactaccgtggtgcagtgggcgccctgctggtgtacgacatcgccaagcacctgacctatgagaacgtggagcgctggctgaaggagctgcgggaccacgcagacagcaacatcgtcatcatgctggtgggcaacaagagtgacctgcgccacctgcgggctgtgccaactgacgaggcccgcgccttcgcagaaaagaacaacttgtccttcatcgagacctcagccttggattccactaacgtagaggaagcattcaagaacatcctcacagagatctaccgcatcgtgtcacagaaacagatcgcagaccgcgctgcccacgacgagtccccggggaacaacgtggtggacatcagcgtgccgcccaccacggacggacagaagcccaacaagctgcagtgctgccagaacctgtgacccctgcgtcctccacccagcgtgcgtgcacgtcctcc

SEQ ID NO: 878 - protein, 218 aa, Homo sapiens
  ref <308>: DATABASE ACCESSION NUMBER: Refseq / NP_004209
  ref <309>: DATABASE ENTRY DATE: 2002-12-23
MGTRDDEYDYLFKVVLIGDSGVGKSNLLSRFTRNEFNLESKSTIGVEFATRSIQVDGKTIKAQIWDTAGQERYRRITSAYYRGAVGALLVYDIAKHLTYENVERWLKELRDHADSNIVIMLVGNKSDLRHLRAVPTDEARAFAEKNNLSFIETSALDSTNVEEAFKNILTEIYRIVSQKQIADRAAHDESPGNNVVDISVPPTTDGQKPNKLQCCQNL

SEQ ID NO: 879 - DNA, 423 bp, Rattus norvegicus
  ref <308>: DATABASE ACCESSION NUMBER: EMBL / AA891769
  ref <309>: DATABASE ENTRY DATE: 2000-03-03
aactgtatgacttcgctcaggaacacctcatggacgacgatgagggagaggttgtggagtatgtggatgacctgttggagatggaagagtctgcttagtccacagcagctaagggacttctcttccgagttcctccttcttcaagtgcctgggttgttgatacctcacagctttcccttcttaaagtaagggggaagccaccgtctctcccgaccaaggtcaaacctgccttccccgcagtcacacccatccactcccctttccacctgccttctctgtattcacactcgtcttcatggttacacgtcatcacgcctgtctttcccctcacatgtgccatcccgttgtccagtccagccctccccatggtcacacttgtctcccctctggtcccatgtgtctcccccgtgttcagagagacag

SEQ ID NO: 880 - DNA, 669 bp, Rattus norvegicus
  ref <308>: DATABASE ACCESSION NUMBER: EMBL / AA891818
  ref <309>: DATABASE ENTRY DATE: 2000-03-03
ccagtttctagtttgcttgtgaatacaaccgttttccccatgacatctgggggtccttggtggctgtgcatgtggtatgtggtatgagtgaagcaggtgaaatgctgacagaagatgctcttggcccagtggagaggtagtaacttctttccagtatctcttaacccagaacacctcagaatagtctctgtggatgacgtcagtcttctgccagcatggagcagatgaactccacaatggggtccaccacagcacagttaccaactataggtcaactcagagaagaggaaagtcatcaccagttcccagaatattggggtggaggcagtcatgggtgttggaggtgtctcttgaggaattgagtccctctgctaggaattcctctgggctttaattggtcccagccctgtcttttgtctttcatccattcctgctgtttggcttccttacatggccagggtaggggtgtctcccagaggagtcctgaactgaggccagggttttgctcatgtgtctgctccttaccacacactgcagagtgcagccagacaggcagtgagcaggcacagctctgccctgccttttgtcttcctagttgaaactgctgtctataaagagcttgttcttcatgttttgaggactttatgaagaataaaaggttcgtgtacc

SEQ ID NO: 881 - DNA, 394 bp, Rattus norvegicus
  ref <308>: DATABASE ACCESSION NUMBER: EMBL / AA892005
  ref <309>: DATABASE ENTRY DATE: 2000-03-03
tggacgtggagccccctacaacgccttggccgggaaggactcgagcagaggtgtggccaagatgtcgctggatcctgcagacctcactcatgacatttctggtctcactgccaaggagctggaagccctcgatgacatcttcagcaaggtgtacaaagccaaataccccattgttggctacacggcccgcaggatcctcaacgaggatggcagccccaacctggacttcaagcctgaagaccagccccattttgacataaaggacgagttctaatgtctagctgagaagctggttctagggagaggtgaggggacaggagttaaatgtcccacggaacaagcaggggaagcctctgagtgctctgcatctgaataaaactgatatttaactggg

SEQ ID NO: 882 - DNA, 953 bp, Homo sapiens
  ref <308>: DATABASE ACCESSION NUMBER: Refseq / NM_013349
  ref <309>: DATABASE ENTRY DATE: 2002-12-23
ggcacgaggctcaccatggtgggccccgcgccgcggcggcggctgcggccgctggcagcgctggccctggtcctggcgctggccccggggctgcccacagcccgggccgggcagacaccgcgccctgccgagcgggggcccccagtgcggcttttcaccgaggaggagctggcccgctatggcggggaggaggaagatcagcccatctacttggcagtgaagggagtggtgtttgatgtcacctccggaaaggagttttatggacgaggagccccctacaatgccttgacggggaaggactccactagaggggtagccaagatgtccttggatcctgcagacctcacccatgacactacgggtctcacggccaaggaactggaggccctggatgaggtcttcaccaaagtgtacaaagccaaataccccatcgtcggctacactgcccggagaattctcaatgaggatggcagccctaacctggacttcaagcctgaagaccagccccattttgacatcaaggatgagttctgatgttccccctgcaggagcaggttcttgggagcgtgaggcaggaagacactaggtgctgaatctcctgcaaaactggctgcctggaggccctgagccacccagatctgaataaaacagatgcttaccctggaagagcaaatgcctcctgttgtctttggtcaggggttctgtctacctggggacccctgtctgcacaccagggatcaataagagccaaagtgggacacctcctagatgtcagtatcagctggctgggcagtggaattttgagcgacctttactttatacttttctgtgcttgacagattttcagccatgaccatgttcactttataatcaaaacaaaaataaaggtcccatttttacaaaaggaaaaaaaaaaaaaaaaaaaaaaaaaaaaaaaaaaaaaaaaaaaaaaa

SEQ ID NO: 883 - protein, 172 aa, Homo sapiens
  ref <308>: DATABASE ACCESSION NUMBER: Refseq / NP_037481
  ref <309>: DATABASE ENTRY DATE: 2002-12-23
MVGPAPRRRLRPLAALALVLALAPGLPTARAGQTPRPAERGPPVRLFTEEELARYGGEEEDQPIYLAVKGVVFDVTSGKEFYGRGAPYNALTGKDSTRGVAKMSLDPADLTHDTTGLTAKELEALDEVFTKVYKAKYPIVGYTARRILNEDGSPNLDFKPEDQPHFDIKDEF

SEQ ID NO: 884 - DNA, 443 bp, Rattus norvegicus
  ref <308>: DATABASE ACCESSION NUMBER: EMBL / AA892006
  ref <309>: DATABASE ENTRY DATE: 2000-03-03
cagccggagccagccatgtcagttcttttccccatacactggtacgtgctgttgtgctccttccagccctgctcaggccaagatggagtcgcagattgcagctcacatctagatctctagaagctggtggcagggctgctgcctacactccctcagggagctccctcgccttcagctcccagtggtctgcattaacattcactgacaaggacacgcagcagtgcctgcaggcagtgtggccgggggccagagcggcattgttttcacgaggtacgtgtgtggcgtgtgtgtttgcttgttgacactctgaaaacagcaagcttaccagttccaggaaatattttgttttctttcactggctcagaaagctcctcaaagtacctggtccctgaagcttcctatctgttaatagagacgagagaggttcttaaatttaactggtg

SEQ ID NO: 885 - DNA, 454 bp, Rattus norvegicus
  ref <308>: DATABASE ACCESSION NUMBER: EMBL / AA892310
  ref <309>: DATABASE ENTRY DATE: 1999-01-28
gtgagggatatggaggcatacgagcaggtccagaagggccccctgaagctgaaaggcgtggcggagctcggcgtgacgaagcggaagaagaagaagaaggacaaagacaaggccaagatgctggaggccatggggacgagcaagaagaacgaggaggagaagaggcgctgcctggacaagcgcacgccggcgcaggcggccttcgaaaagatgcaggagaagcggcaaatggaaagaatcctgaagaaggcatcaaaaacccacaaacagagagtggaggacttcaaccgacacctggacacactcaccgagcactatgacatccccaaagtcagctggaccaagtaacctagccctgctgcagaaggcagaaggctggactgtttgacacctggttggcgcatctgctgaaaccaggctttctgagacttgattaaagccaggctgtcctttc

SEQ ID NO: 886 - DNA, 1465 bp, Homo sapiens
  ref <308>: DATABASE ACCESSION NUMBER: Refseq / NM_014077
  ref <309>: DATABASE ENTRY DATE: 2000-11-02
gcgaagcactggagagtgtcatggaggcctacgagcaggtccaaaagggacccctgaagctgaaaggcgtcgcagagctgggagtgaccaagcggaagaagaaaaagaaggacaaagacaaagcgaaactcctggaagcaatgggaacgagcaaaaagaacgaggaggagaagcggcgcggcctggacaagcggaccccggcccaggcggccttcgagaaaatgcaggagaagcggcaaatggaaaggatcctaaagaaggcatccaaaacccacaagcagagagtggaggacttcaacagacacctggacacactcacggagcattacgacattcccaaagtcagctggacgaagtagccgcctgcccccagtatggagcagcatcgagggttcgcaaaaggccacactggggttgtgtgtgtttcctttggtatattctggaaacatggctacacacacccttgcatcttctgctacagactgcttttcgaagctgtgtaccctcattctggaacttgattaaagtaagatcgtccttgtactcagtttaggcttcttggcaacatacagaagatacacccttttcgtttggatggaaagtttctaagtttatccagaggtaaagcccattgtgtgtctgtgtcatgtaaaaatgttttcacccgagttgcatgtaatgctctgaggccagccagctgtcttctcctggatgagacagactccagagggtaaggagctagcgccatggtggcctgcagtatgcagagccccgcaggacccagcgtgggcgcccttccaagcttcctctagctttgggcctatgctgtcccctgcaggccctagggaagccacttgcaactatgcggccttcagacttcctcctcagccacctggccactgagacagcatagcctgggtaacggaacagccacctaaggcaagaatggaacggacacaccttgctcctttctgagcccgtttcccaaaaccccccttccaggtgcttctaatgggtgttgccatagcagacgctgctaatgcatcacagcattctttgaaatggaaccagacacagcctgcctctcaatcctcagctgggggctcctagcagcctcttgtatttactcagagttgacacatcacacagatcctgtttggcattcctaccttacggacgtctcaggggtgacaggaccagggcagagccccggtacaaacagacaaggctgcagtcaaatgggagggtccaggtgtccgtgttggagggctgggatcttgtagggcctgtgcgtcctggctgaggatcaaaccacatatgttattgggagaaacgatttctgttgacgtagatattgaaagaataatgaaggcagaagagaaaaacgaagtgtggaatttggggttgtcctgtgtaaattacacaataaagcaaaagtcagttattgtaaaaaaaaaaaaaaaaa

SEQ ID NO: 887 - protein, 112 aa, Homo sapiens
  ref <308>: DATABASE ACCESSION NUMBER: Refseq / NP_054796
  ref <309>: DATABASE ENTRY DATE: 2000-11-02
MEAYEQVQKGPLKLKGVAELGVTKRKKKKKDKDKAKLLEAMGTSKKNEEEKRRGLDKRTPAQAAFEKMQEKRQMERILKKASKTHKQRVEDFNRHLDTLTEHYDIPKVSWTK

SEQ ID NO: 888 - DNA, 622 bp, Rattus norvegicus
  ref <308>: DATABASE ACCESSION NUMBER: EMBL / AA894101
  ref <309>: DATABASE ENTRY DATE: 2000-03-03
ccctaaaatccttctctgaacatgccgagtgcggaaggctggaagtccaccttgtgggaggattcagtgatgataggcagttgtcacagaaacttacgcatcagcttcttagtgaatttgacaaacaggatgatgacattcacttagtgacattatgtgtaacagaattaaatgaccgggaagaaaatgaaaatcactttccaatcatttatggcatcgcagtcaacattaaaactgcagagatttacagagcttcctttcaagatcgtggcccagaggagcaactgcgtgctgcgagagctttagcaggaggcccaaacctttctacttctcctctggctgagcccccccactttgttgaccatattagatctaccttgatgtttttaaaaaaattcccatctccagagaatatactgtttcctggaaataaagctctcctctacagaaaaaataaagatggcttatgggaaaagatctctccagggaactaacatcagatctgggttaccgaagaattcaccttttggcctgaagagaccgttgctggtttggaattcacacctgcgcacttttacttcctccatccttactgtctcccgaaataaagcctcattttggc

SEQ ID NO: 889 - DNA, 1146 bp, Homo sapiens
  ref <308>: DATABASE ACCESSION NUMBER: EMBL / BC017336
  ref <309>: DATABASE ENTRY DATE: 2002-11-30
ggcacgaggccgcgatgccgctgctcgtcgaggggcggcgagtgcggctgccgcagtcagccggggacctcgtccgagcccacccgcctttggaggaaagagccagacttctcagaggtcagtctgttcaacaagtgggaccccagggccttctgtatgttcagcaaagagagcttgcagtgacctccccaaaggatggctccatctccattctgggttctgatgatgccactacttgtcacattgtggtcctgaggcacacaggtaatggggccacctgcttgacacattgtgacggaaccgacaccaaagctgaggtccccttgatcatgaactccataaaatccttttctgaccacgctcaatgtggaaggctggaagtacaccttgttggaggcttcagtgacgacaggcagttgtcacaaaaactcactcatcaacttcttagtgaatttgacaggcaagaagatgacattcacttagtgacattatgtgtgacagaattaaatgaccgggaagaaaacgaaaaccactttccagtaatatatggcattgctgtcaacattaagactgcagagatttacagagcatcctttcaagatcggggtccggaggagcagcttcgtgctgcgcgaactttagcaggaggaccaatgattagcatttatgatgcagagacagaacaacttcgtataggaccgtactcctggacaccatttccacatgtggatttctggttgcaccaagatgacaagcaaatactagagaatctttccacttcgcctctggctgagccaccccactttgttgaacatattagatctaccttgatgtttttaaaaaaacacccatctccagctcacacactgttttctggaaataaagccctactctacaaaaaaaatgaagatggcttgtgggaaaagatctcttctccaggaagttaaaaaacatgaattaccaaagaaagcaccttcttggcctgacagaccattggtggggctggcacgaatccagatctggatcctacatctgttgggtcttaggcctccttccctcctcagtgtctttcaaatgactttcatcaaatgactttcaaaataaaaccttattttggcaaaaaaaaaaaaaaaaaaaaaaaaaaaa

SEQ ID NO: 890 - protein, 310 aa, Homo sapiens
MPLLVEGRRVRLPQSAGDLVRAHPPLEERARLLRGQSVQQVGPQGLLYVQQRELAVTSPKDGSISILGSDDATTCHIVVLRHTGNGATCLTHCDGTDTKAEVPLIMNSIKSFSDHAQCGRLEVHLVGGFSDDRQLSQKLTHQLLSEFDRQEDDIHLVTLCVTELNDREENENHFPVIYGIAVNIKTAEIYRASFQDRGPEEQLRAARTLAGGPMISIYDAETEQLRIGPYSWTPFPHVDFWLHQDDKQILENLSTSPLAEPPHFVEHIRSTLMFLKKHPSPAHTLFSGNKALLYKKNEDGLWEKISSPGS

SEQ ID NO: 891 - DNA, 583 bp, Rattus norvegicus
  ref <308>: DATABASE ACCESSION NUMBER: EMBL / AA894264
  ref <309>: DATABASE ENTRY DATE: 2000-03-03
taattctgttgtttgacagacatagatacatttctgtagactgactgaacttccctgcagagcttgctctagagttaagatgcacagggcttgccttgtcctgtgaatgtggctctctggaactctatgaaaagctgagcctgaataggacagacagacagatagcaaatccccttcagctaaggcatctcctcccttcctatccacatcagtcatctttcagtttttcagaaggaacctgggctctctaacccatgtacactttactttctgtatctgtttgtaaatcgctcctttacaacatcactccctaatgatctctgaagaacttcatattgtgaaacttaagatgaactgtgcttcaggccacagaacaggctccaacctttatgcttcgtgtgccaactcccaggtggcccactcagaaattattgggtaacatcgaatcatccaaaattaacactcggatgcattgcaagcacagtctgctttaagaaacttaacgttagggttggagatttggctcagtggtagagcgcttgcctaggaagcgcaaggccctaggttcagtccccagctccgg

SEQ ID NO: 892 - DNA, 2183 bp, Rattus norvegicus
  ref <308>: DATABASE ACCESSION NUMBER: Refseq / NM_022542
  ref <309>: DATABASE ENTRY DATE: 2003-01-13
gttcgcaaaatcagccatcgactcgcacaaagcagcgcactccgggacagccgagaacactacccggcagcagcgcggcgacactccgtgcatcgtatgcccctgcgcccctgccgcggcagccggagcgccccgagagaacgctccaccgcggggtccaggtgcagttagcgtgcctagcccgcatcgcgcggtcgcgggagagcgggaagcggcaagcagggagcgggacggcggcgaggcgctcgcgggcccctcctgctgcccgcgcccggcgagctcatggcggccatccgcaagaagctggtggtggtgggcgacggcgcgtgcggcaagacgtgcctgctgatcgtgttcagtaaggacgagttccccgaagtgtacgtgcccaccgtgttcgagaactatgtggcggacatcgaggtggacggcaagcaggtggagctggcgctgtgggacacggcgggccaggaggactacgatcgtttacggccgctctcctacccggacaccgacgtcatccttatgtgcttctcggtagacagcccggactctctcgagaacatccccgagaagtgggtgcccgaggtaaagcacttctgccccaatgtgcccatcatcttggtggccaacaaaaaagacctgcgcagcgatgagcatgtccgcacggagctggcccgcatgaagcaggagccagtgcgcacggatgacggccgcgccatggcggtgcgcatccaagcctatgactacctcgagtgctcggccaagaccaaggagggcgtgcgcgaggttttcgagacggccacgcgcgccgcgctgcagaagcgctacggatcccagaatggctgcatcaactgctgcaaggtgctatgaaggccgcgccctgcctcacgcccttgccagcgtggctccccctccttggcccggtcgcccactaaccgggagaaagggagacccgtgcccccgaggacaccaccagactgcctgacatctgctggtggctctggctggtcacgctgaatattagcgtgggcaccgagctccccccttcccagtgtctgtgtgtgtccagctgtgtggcacaggcctgggcgccctgctgagtgccaaggggttcctgagcgtccttttctaaagagccaggcctcgaagtgtggttgtgtgtgtgtacgactccctacacccctaccccactcctgccccacccccgcctctggtttccccaggggcatgcagagtggttgagccccagcagatgtacgcttgtaaccagcaagccactactgttgctccatgtctgtaacatagaccccctggaatcacgggaggggagggctggggaggatggggatgttacataaatacagattttattttcggaggcagaatggtattgtttagtggtgagtggtgtgaccagggcccatgagcaactcttcccaggctgggtcaggagcccacccatccaagcatgaactggactcggccatctttccacaccctggggaagacatttgcaactgacttgaggttgagaggaagcagctcccagacacagtgtctcctgggccaagccccagcgaacctcctttccagccacctgcagaggatccagggtgtgctgtggggtcacttttgccataagcgaactttgtgcctgtcctacaagtgaacattgttcagtccgagagactattgttgctgaatttatttaaaggctgaagctttttttgttgttgatgaaagaattctttgcacaattgtcccattgtttgacacccagtgcacttgtcatttgcataaggcagcattttgaccacacttgtatgctgtaacctcatctacttctgatgtttttttttttaaacaaactatgatgactttaaggagattacaaaaaagattctaatttttgctttgttttcttgaaaaaaatgtcaaccatgtgactttttaaaaatttgtgtagcatacacacagttttggtaaaggaaggcaacacgtattggggtctatttaaacctccctccctctccccacaagacaagtctcttcatctatgtgaaattttctgtacattctctgtgcagagcaaagcttcttcttccttattcccctccttcccagcccagtggtacttctactaaattgtctattgtcttgttttgtttttgttttatttt

SEQ ID NO: 893 - protein, 196 aa, Rattus norvegicus
  ref <308>: DATABASE ACCESSION NUMBER: Refseq / NP_071987
  ref <309>: DATABASE ENTRY DATE: 2003-01-13
MAAIRKKLVVVGDGACGKTCLLIVFSKDEFPEVYVPTVFENYVADIEVDGKQVELALWDTAGQEDYDRLRPLSYPDTDVILMCFSVDSPDSLENIPEKWVPEVKHFCPNVPIILVANKKDLRSDEHVRTELARMKQEPVRTDDGRAMAVRIQAYDYLECSAKTKEGVREVFETATRAALQKRYGSQNGCINCCKVL

SEQ ID NO: 894 - DNA, 372 bp, Rattus norvegicus
  ref <308>: DATABASE ACCESSION NUMBER: EMBL / AA925717
  ref <309>: DATABASE ENTRY DATE: 2000-03-03
tgccccagtgatgccctgtgcagggtagtgtgggcagctctccctcacagagcagtgcctgccccacaccctggtggctagaggagaggaccctacagccactatggggctcctgcctgcaggcagggctgggagaaaacagggctggggtgggcagtacagggagtatttttgtaacttgctggagtgaatgaaagggggcgattctaagttattgttgccaaagacgtgtatacctttgctttgggggtgggggcaatgttttcttttttgtttttgttttgtttttagtttgaggcttaggatgctggtgcaatgattttcttgttccttgttttttaagagaaaccaagctaagaaaaaaaaaaaaca

SEQ ID NO: 895 - DNA, 5240 bp, Rattus norvegicus; identical to SEQ ID NO: 46
  ref <308>: DATABASE ACCESSION NUMBER: Refseq / NM_017212
  ref <309>: DATABASE ENTRY DATE: 2003-01-14

SEQ ID NO: 896 - protein, 374 aa, Rattus norvegicus; identical to SEQ ID NO: 47
  ref <308>: DATABASE ACCESSION NUMBER: Refseq / NP_058908
  ref <309>: DATABASE ENTRY DATE: 2003-01-14

SEQ ID NO: 897 - DNA, 2412 bp, Rattus norvegicus
  ref <308>: DATABASE ACCESSION NUMBER: Refseq / NM_053584
  ref <309>: DATABASE ENTRY DATE: 2003-01-13
ggcacgaggatggcggcgggaaccagcaattactgggaagatcttaggaaacaagctcgacagctggaaaatgaacttgacctgaaactagtttccttcagtaaactgtgtacgagttacagtcacagcagcgcccgggatggaggccgcgataggtatagttctgacacaacacccctattaaatggatcaagccaagacaggatgttcgagacaatggccattgaaattgaacagcttttggcgaggcttacaggagtaaacgacaaaatggcagagtatactcacagtgcaggggtgccctccctgaacgcagccctgatgcacacgctacagcgacacagagacattctgcaggattatacacatgaattccataaaaccaaagcaaactttatggcaatacgggaaagggagaatctcatgggatcagtacgaaaagatattgagtcatataaaagtgggtctggagtaaacaacaggagaactgaactgtttctgaaagaacatgaccaccttcgaaactctgatcgtctgatagaagagacaataagcattgctatggcaacaaaagagaatatgacttcgcagagaggaatgctcaagtccattcacagcaagatgaacactctggccaaccgctttcccgccgtcaacagcctgatacaaaggatcaaccttaggaagcggcgcgactcgctcatccttggaggcgtcattggcatctgcaccatcctgttgctgctgtatgcattccactgagaggtcggccccaggactctgcccaccctctgcggcctgctttggcaatggggaacctgcaaaggagagagaccgtccggccatgagcctgccagcagatgaattctaaactgcaccgtggctctgacctggtcggcctgagctgaagccacagtttttctgtgcctatcttttctaatacatattactctgtttttaattttaaaaacaacaaaaggtttcagttgctgcatctccctaggaggtaagcaagcagaagctgagaacctgggctttagtgactggtgaagccagatgaccagcgggcctcatagctggactcctcacagcaccaggctctacatccaaagatggcctcactttcagccacgagattggatgtgaataaaaataattcttgtccttttatttaacacttgtgatgagaagtcagctgtcctttgctgatactccgtgatccaatcgcgtattctgtgtccctaatctcttggcagtcaagaaaaattccatttcccacggattctgtaagatgttggtaggccagcttcatgtttgaggcggtctgaaatggaaagtgctatagaaagggtgtctcttttctgtttcagttgtgagccctgggtcaactactgccaccagcacatcagaatggcgggccttacagaggagctggtcattgctttattatttcttcccttgggctgatatttgcttgtattgataaaaatgcatttccagtgatagcccgtcagtgactgtcatcggccctcgaagtcccatatcatgtgaagcttaatactaggaactgaaggagggacttggttctctgtgaggcctgctcgtgagccactgctgtgagggttgggaggataaaattatgttttgggttttggtggtgggagattattttggagttgttgttggttgggaatgtggtgagggatatagagtaaattagtcgagtatagaagaataggcttaatagggctatgatagctattagtgttgatagggttgagcagttgttttttagaagctcggagataattgctcattttggtaaaaatcctgtgagaggggggagtcctcctagtgataggaggatgatggatgctatggttaggattatgggagttttatttcatgcgagtgagagtgtgttgattgttgttgctgagtttgttatgagtgtaatgaatattggaacagtaagtaggatgtaaattgttaagtttaggagggttaagttagggttgtatggaaggattgctgttattcatcctatgtgggcaattgatgagtatgctatgcatttttcgtgtttgggtctggttaagtcctcctcaggcgccaacaaagactgatgaaattgcgagaatggtggtgatagttgggtttaggagttgataaaattggtatagaattgatagtggagcaattttttgtcatgttagtaagattaatccaatgtgtaggggaattccttgggtgacttcgggtagtcagtagtggaatggggctagtccaagttttatggctagtgaaatgagtattatgttgagtagtatgttattggtttgttgttggagggttcatattcctgattgtttgtagttgaggatgatgactagtaggataattctcgtgccg

SEQ ID NO: 898 - protein, 250 aa, Rattus norvegicus
  ref <308>: DATABASE ACCESSION NUMBER: Refseq / NP_446036
  ref <309>: DATABASE ENTRY DATE: 2003-01-13
MAAGTSNYWEDLRKQARQLENELDLKLVSFSKLCTSYSHSSARDGGRDRYSSDTTPLLNGSSQDRMFETMAIEIEQLLARLTGVNDKMAEYTHSAGVPSLNAALMHTLQRHRDILQDYTHEFHKTKANFMAIRERENLMGSVRKDIESYKSGSGVNNRRTELFLKEHDHLRNSDRLIEETISIAMATKENMTSQRGMLKSIHSKMNTLANRFPAVNSLIQRINLRKRRDSLILGGVIGICTILLLLYAFH

SEQ ID NO: 899 - DNA, 999 bp, Homo sapiens
  ref <308>: DATABASE ACCESSION NUMBER: Refseq / NM_004871
  ref <309>: DATABASE ENTRY DATE: 2000-11-01
gcacgagcaaagatggcggcagggaccagcagttactgggaagatctcaggaaacaggctcgacagctggaaaatgaacttgacctgaaactagtttccttcagcaaactatgtacaagttacagtcatagcagtacccgagatggaagacgcgacaggtatagttctgatacaacaccccttttaaatggatcaagccaagacagaatgtttgagacaatggcgattgagattgaacaacttttggcaaggcttacaggggtaaatgataaaatggcagaatataccaacagtgcaggtgtcccctccttgaatgcagccctgatgcatacattacagcggcatagagacatattgcaggattatacacatgaattccataaaaccaaagcaaactttatggcaatacgggaaagggagaatcttatgggatcagtacgaaaagatattgagtcatataaaagtgggtctggagtaaacaacagaagaactgagctatttttgaaagaacatgaccaccttcgaaactcagatcgtctgatagaagagacaataagcattgctatggcaacaaaagaaaatatgacttcacagagaggaatgttgaagtcaattcacagcaaaatgaacactttggccaatcgttttcctgctgtaaacagcctgatccagaggatcaacctgaggaagcggcgggactcgctcatcctagggggtgttattgggatctgtaccatcctgttgctgctgtatgcgttccattgatgggacatcttcagggactcttgacagccaccgctttcacaccctggtctggaataaggaaacatcggagggagaagttgactgtcttgataattagcctgaccagcaggatgaatgcaagactgacagtgatggactctgtgacatggtcaggttgagctgaagccacagtttctctgtgctgtgttttctaacacatttttctgtttttaattaaaaaaaaaaaaaaaaaaa

SEQ ID NO: 900 - protein, 250 aa, Homo sapiens
  ref <308>: DATABASE ACCESSION NUMBER: Refseq / NP_004862
  ref <309>: DATABASE ENTRY DATE: 2000-11-01
MAAGTSSYWEDLRKQARQLENELDLKLVSFSKLCTSYSHSSTRDGRRDRYSSDTTPLLNGSSQDRMFETMAIEIEQLLARLTGVNDKMAEYTNSAGVPSLNAALMHTLQRHRDILQDYTHEFHKTKANFMAIRERENLMGSVRKDIESYKSGSGVNNRRTELFLKEHDHLRNSDRLIEETISIAMATKENMTSQRGMLKSIHSKMNTLANRFPAVNSLIQRINLRKRRDSLILGGVIGICTILLLLYAFH

SEQ ID NO: 901 - DNA, 1128 bp, Rattus norvegicus
  ref <308>: DATABASE ACCESSION NUMBER: Refseq / NM_031144
  ref <309>: DATABASE ENTRY DATE: 2003-01-13
atggatgacgatatcgctgcgctcgtcgtcgacaacggctccggcatgtgcaaggccggcttcgcgggcgacgatgctccccgggccgtcttcccctccatcgtgggccgccctaggcaccagggtgtgatggtgggtatgggtcagaaggactcctacgtgggcgacgaggcccagagcaagagaggcatcctgaccctgaagtaccccattgaacacggcattgtaaccaactgggacgatatggagaagatttggcaccacactttctacaatgagctgcgtgtggcccctgaggagcaccctgtgctgctcaccgaggcccctctgaaccctaaggccaaccgtgaaaagatgacccagatcatgtttgagaccttcaacaccccagccatgtacgtagccatccaggctgtgttgtccctgtatgcctctggtcgtaccactggcattgtgatggactccggagacggggtcacccacactgtgcccatctatgagggttacgcgctccctcatgccatcctgcgtctggacctggctggccgggacctgacagactacctcatgaagatcctgaccgagcgtggctacagcttcaccaccacagctgagagggaaatcgtgcgtgacattaaagagaagctgtgctatgttgccctagacttcgagcaagagatggccactgccgcatcctcttcctccctggagaagagctatgagctgcctgacggtcaggtcatcactatcggcaatgagcggttccgatgccccgaggctctcttccagccttccttcctgggtatggaatcctgtggcatccatgaaactacattcaattccatcatgaagtgtgacgttgacatccgtaaagacctctatgccaacacagtgctgtctggtggcaccaccatgtacccaggcatcgctgacaggatgcagaaggagattactgccctggctcctagcaccatgaagatcaagatcattgctcctcctgagcgcaagtactctgtgtggattggtggctctatcctggcctcactgtccaccttccagcagatgtggatcagcaagcaggagtacgatgagtccggcccctccatcgtgcaccgcaaatgcttctag

SEQ ID NO: 902 - protein, 375 aa, Rattus norvegicus
  ref <308>: DATABASE ACCESSION NUMBER: Refseq / NP_112406
  ref <309>: DATABASE ENTRY DATE: 2003-01-13
MDDDIAALVVDNGSGMCKAGFAGDDAPRAVFPSIVGRPRHQGVMVGMGQKDSYVGDEAQSKRGILTLKYPIEHGIVTNWDDMEKIWHHTFYNELRVAPEEHPVLLTEAPLNPKANREKMTQIMFETFNTPAMYVAIQAVLSLYASGRTTGIVMDSGDGVTHTVPIYEGYALPHAILRLDLAGRDLTDYLMKILTERGYSFTTTAEREIVRDIKEKLCYVALDFEQEMATAASSSSLEKSYELPDGQVITIGNERFRCPEALFQPSFLGMESCGIHETTFNSIMKCDVDIRKDLYANTVLSGGTTMYPGIADRMQKEITALAPSTMKIKIIAPPERKYSVWIGGSILASLSTFQQMWISKQEYDESGPSIVHRKCF

SEQ ID NO: 903 - DNA, 570 bp, Homo sapiens
  ref <308>: DATABASE ACCESSION NUMBER: Refseq / NM_001020
  ref <309>: DATABASE ENTRY DATE: 2003-01-15
ttttccggttgcggcgccgcgcggtgaggttgtctagtccacgctcggagccatgccgtccaagggcccgctgcagtctgtgcaggtcttcggacgcaagaagacagcgacagctgtggcgcactgcaaacgcggcaatggtctcatcaaggtgaacgggcggcccctggagatgattgagccgcgcacgctacagtacaagctgctggagccagttctgcttctcggcaaggagcgatttgctggtgtagacatccgtgtccgtgtaaagggtggtggtcacgtggcccagatttatgctatccgtcagtccatctccaaagccctggtggcctattaccagaaatatgtggatgaggcttccaagaaggagatcaaagacatcctcatccagtatgaccggaccctgctggtagctgaccctcgtcgctgcgagtccaaaaagtttggaggccctggtgcccgcgctcgctaccagaaatcctaccgataagcccatcgtgactcaaaactcacttgtataataaacagtttttgagggattttaaagtttcaaaaaaaaaaaaaaaa

SEQ ID NO: 904 - protein, 146 aa, Homo sapiens [sequence omitted]

SEQ ID NO: 905 - DNA, 1359 bp, Rattus norvegicus; identical to SEQ ID NO: 273
  ref <308>: DATABASE ACCESSION NUMBER: Refseq / NM_133409
  ref <309>: DATABASE ENTRY DATE: 2003-01-13

SEQ ID NO: 906 - protein, 452 aa, Rattus norvegicus; identical to SEQ ID NO: 274
  ref <308>: DATABASE ACCESSION NUMBER: Refseq / NP_596900
  ref <309>: DATABASE ENTRY DATE: 2003-01-13

SEQ ID NO: 907 - DNA, 762 bp, Homo sapiens; identical to SEQ ID NO: 275
  ref <308>: DATABASE ACCESSION NUMBER: Refseq / NM_006284
  ref <309>: DATABASE ENTRY DATE: 2003-01-15

SEQ ID NO: 908 - protein, 218 aa, Homo sapiens; identical to SEQ ID NO: 276
  ref <308>: DATABASE ACCESSION NUMBER: Refseq / NP_006275
  ref <309>: DATABASE ENTRY DATE: 2003-01-15

SEQ ID NO: 909 - DNA, 596 bp, Rattus norvegicus
  ref <308>: DATABASE ACCESSION NUMBER: EMBL / AI104528
  ref <309>: DATABASE ENTRY DATE: 2000-03-03
ggcacaaggggtcgctttgcggagcgggatcgcgcgtaagtgaccggccccaggttcgggtgcgcgctgtcactctctggtaagctcgccggcgacatgtcggggtacacgcccgatgagaagctgcggctgcagcagctgcgggagctgagaaggcgatggctgaaggaccaagagctgagcccccgggagcccgtgttgcccccgcgcaggatgtggcccctggagcgattctggaataactttttgcgggaccgggccctgtggaagtacatgatcttcaaggcgtaccgcaccagtctcttcactgtttcccatgtgatcatacctctctggttcgtccactattacgtcaaatatcatgtggctactaaaccatatgccattgttggcacgaagcccagaatatttccaggtgatacaattctggagactggagaagtaattccaccaatgagagattttcctgataaacatcattgaagagctcttaaaaatttaaaaaacttgtgtaacagcacatgtatgttccaaaagtgctgtatttactgaatctatttcctagaaaagtaattaataaaacttattcctgtcct

SEQ ID NO: 910 - DNA, 733 bp, Homo sapiens
  ref <308>: DATABASE ACCESSION NUMBER: Refseq / NM_002493
  ref <309>: DATABASE ENTRY DATE: 2002-12-23
gggggttcccgcaaggtcgctttgcagagcgggagcgcgcttaagtaactagtccgtagttcgagggtgcgccgtgtccttttgcgttggtaccagcggcgacatgacggggtacactccggatgagaaactgcggctgcagcagctgcgagagctgagaaggcgatggctgaaggaccaggagctgagccctcgggagccggtgctgcccccacagaagatggggcctatggagaaattctggaataaatttttggagaataaatccccttggaggaaaatggtccatggggtatacaaaaagagtatctttgttttcactcatgtacttgtacctgtctggattattcattattacatgaagtatcatgtttctgaaaaaccatatggcatagttgaaaagaagtccagaatattccctggtgatacaattctggagactggagaagtaattccaccaatgaaagaatttcctgatcaacatcattaaagattatgtaaaaagttaaaaggcttatgagcctaagtttgttcctatattaccatatttactgaattttctggaaaagtaactttaataaagtttaatctcagaaaaaaaaaaaaaaaaaaaaaaaaaaaaaaaaaaaaaaaaaaaaaaaaaaaaaaaaaaaaaaaaaaaaaaaaaaaaaaaaaaaaaaaaaaaaaaaaaaaaaaaaaaaaaaaaaaaaaaaaaaaaaaaaaaaaaaaaaaa

SEQ ID NO: 911 - protein, 128 aa, Homo sapiens
  ref <308>: DATABASE ACCESSION NUMBER: Refseq / NP_002484
  ref <309>: DATABASE ENTRY DATE: 2002-12-23
MTGYTPDEKLRLQQLRELRRRWLKDQELSPREPVLPPQKMGPMEKFWNKFLENKSPWRKMVHGVYKKSIFVFTHVLVPVWIIHYYMKYHVSEKPYGIVEKKSRIFPGDTILETGEVIPPMKEFPDQHH

SEQ ID NO: 912 - DNA, 2599 bp, Rattus norvegicus
  ref <308>: DATABASE ACCESSION NUMBER: Refseq / NM_031616
  ref <309>: DATABASE ENTRY DATE: 2003-01-13
tgctgctggcgtccaagatgtcgaccaagaatttccgagttagtgacggggactggatctgccctgacaagaagtgtggaaatgtaaacttcgccagaagaaccagctgtaacagatgtggtcgagagaagacaactgaggccaagatgatgaaagctgggggaacagaaataggaaagacactggcagagaagagccggggcttatttagtgccaatgattggcagtgcaaaacttgcagtaatgtgaattgggctagaagatcagagtgtaacatgtgtaatactccaaagtatgctaaattagaagaaagaacaggatatggaggtggttttaatgaaagagagaatgttgaatacatagaaagagaagaatctgatggggaatatgatgagtttggacgtaaaaagaaaaaatacagggggaaggcagttggtcctgcatctatattaaaggaagtcgaagataaagaatcagagggagaagaagaggatgaggatgaagatctctctaaatataagctagatgaggacgaggatgaagatgatgctgatctctcaaaatataatcttgatgccagtgaagaggaagatagtaacaaaaagaaaagcaataggcggagccgctcaaagtctcgatcgtctcactcaaggtcttcatcacgctcatcctccccctcaagttcaaggtccaggtccaggtcccgttcaagaagctcttccagctcgcagtccaggtctcactccggttccagagaacattccagatcccgtggttcgaaatcaagatccagctccaggtccacaggggctcttcttccccaagaaaaagatcttactcgagttcttcatcatctcctgaaagagacaggaagaggagtcgctctagaccttcttcaccagctgttcgcaaaaaaagacgaacgagatcacggtcacccgaaaggcaccacaggtcgtctccggatcaacccattctggttcccgttcaagttcaaaaaagaaataatgtattaaaatttacatctttaaaaaacattgagtacagtgcatgaagcatattttttaggaagttgatgtctcatttggtcagaagtactacatctgctagtagaggtgcatgcctttattgcttttcaaaacaataaaactgttcatttgtgaaactgaaagtaaattgcattttaagccatactgttccccagataaatgctctgtccattatttacaaccatttacttcgtttaaaaccatcctagcgataacggagtacttttgtttcctactttaaatcctgtccttttcatttctaaatgttctattggcagagacggttgcctgggcttgcctggacttcagacacataggcaaagctagtaagctagttggagtaaccagttcctgttcatgtgggaatagtagtcaacctggttatgttctttacctatgccagtaatttcttaccagaggtaaagtacattgcaaagctgacaactgggaacaagctgagggtgccttagaatcattgtctcttaccagctttacacctcttaatgcaagaggattatagaaattacagaaggaaagggaaggttaaccacatattacttcaaaatgtctttctcaaagtttaagaaatgtggatatcctttaaataaatctagttaccaaatgttgtacttgattgataaaagatttttaaaaaggctaaatcatagttaatgagccaattgatgagagcttttgaaacttgtttctcagtgacaggctaacaaagacatgaatttaagtgaacatttgccttgtgatgtctgatttttaacattgtagatatctaagtaacagaagaattcttacttccccacaatttaagcaaaatcatttttctcacctggaaaaaaaaacatatggcttaaaatgctttcagagttttatttctcaaattaaaatctggtcacttgagatccattttgttctctggtttaaaagttataaggtttctcttaacagtcttttcagcagcaaaagcaaggtaagtatataagggacaacagttatgctggggctccttgtgagggaattacttcctgtttctcctttagtatttgtctgctgcagtttaaatataagtaaagccttctgagatgtttagtagacagatcaaacgaaatgtttttattttaaagtgagtgtttttcttctcaactgatctaaagatgaaaacaaaatatcgtacgtagaaatattttggtaatatttttacaagctttcctgtgttttttgtcttattttccttgctgcatttactgtaggttgcacacgaactcttactctcttgtaattgtgcctcagacttctcgaaagtcgactttctgagttgcccagatcttctagatccgacgtgttagccttggtttgtttttgtgctttctgtatttaaaacttgagctgtactaggcaaatgcaagattataaatttagctaataggagtttacaaacagttcagatgattatgatttgatttggtttaattgagctgtactagttcatttcataaggaaatgatactgtagacaaatgtaaataaaatctgtgagtc

SEQ ID NO: 913 - protein, 332 aa, Rattus norvegicus
  ref <308>: DATABASE ACCESSION NUMBER: Refseq / NP_113804
  ref <309>: DATABASE ENTRY DATE: 2003-01-13
MSTKNFRVSDGDWICPDKKCGNVNFARRTSCNRCGREKTTEAKMMKAGGTEIGKTLAEKSRGLFSANDWQCKTCSNVNWARRSECNMCNTPKYAKLEERTGYGGGFNERENVEYIEREESDGEYDEFGRKKKKYRGKAVGPASILKEVEDKESEGEEEDEDEDLSKYKLDEDEDEDDADLSKYNLDASEEEDSNKKKSNRRSRSKSRSSHSRSSSRSSSPSSSRSRSRSRSRSSSSSQSRSHSGSREHSRSRGSKSRSSSRSTGALLPQEKDLTRVLHHLLKETGRGVALDLLHQLFAKKDERDHGHPKGTTGRLRINPFWFPFKFKKEIMY

SEQ ID NO: 914 - DNA, 2837 bp, Homo sapiens
  ref <308>: DATABASE ACCESSION NUMBER: Refseq / NM_005455
  ref <309>: DATABASE ENTRY DATE: 2002-11-05
gctggtggcgttcaagatgtcgaccaagaatttccgagtcagtgacggggactggatttgccctgacaaaaaatgtggaaatgtaaactttgctagaagaaccagctgtaatcgatgtggtcgggagaaaacaactgaggccaagatgatgaaagctgggggcactgaaataggaaagacacttgcagaaaagagccgaggcctatttagtgctaatgactggcaatgtaaaacttgcagcaatgtgaattgggccagaagatcagagtgtaatatgtgtaatactccaaagtatgctaaattagaagaaagaacaggatatggtggtggttttaatgaaagagaaaatgttgaatatatagaaagagaagaatctgatggtgaatatgatgagtttggacgtaaaaagaaaaaatacagagggaaagcagttggtcctgcatctatattaaaggaagttgaagataaagaatcagagggagaagaagaggatgaggatgaagatctttctaaatataagttagatgaggatgaggatgaagatgacgctgatctctcaaaatataatcttgatgccagtgaagaagaagatagtaataaaaagaaatctaatagacgaagtcgctcaaagtctcgatcttcacattcacgatcttcatcacgctcatcctccccctcaagttcaaggtctaggtccaggtcccgttcaagaagttcttccagttcgcagtcaagatctcgttccagttccagagaacgttcgagatctcgtgggtcgaaatcaagatccagctccaggtcccacaggggctcttcttccccacgaaaaagatcttattcaagttcatcatcttctcctgagaggaacagaaagagaagtcgttctagatcttcttcatctggtgatcgcaaaaaaagacgaacaagatcacggtcacccgaaagccaggtgattggtgaaaacactaaacaaccctgagcccagggccaacccctacggaacaccactactttacccagacgccacaggtcatcatctggatcatcccattctggttcccgttcaagttcaaaaaagaaataatgtattaaaatttacatcttaaaaaaatccagtacagtgcatgaagcatatttttaaagaagttggtgtcttacttggtcagaagtgctaaatctgctagtagaggtgcatgcctttcattgcttttcaaaacaatacagctgtgtttatttgtgaagttaaaagtaaatagcattttaagccataatgtcccaaaatagatgttctgtcattcattatttacaaccatttgcttcatttaaaaccatttcagctataacaaagtactttgcttcctaatttaaacccatttttgtcatttccaaatacatcctgtccattggctaagacaggattacctaggcttgcctgaactttgggcatggaagaaagactggaaactagttggaaacaacatacttatggaaaagaaagtcagcctttttatgctgttaacagatgtcagagtgattctcaccaaaaaaagttaaactatgttgtaagcagccaactgtaaatgtctattttgaaattccctatgctaagggtgccttagaatcattgtgtctcttttatccagctttacttttttgctccacatttaatgcaaaagaatcttgtgatgtctacaaggagagaagtgggatatattttcctttctgacacataatttggggcaaaaaagaaagtcttaagagtttatcttttctctgctgatacggttgcttgataaagacatctcaaaatgtttaccaatgttttaagaagctttgtgtgatattcttccaaatgtagttaccaaatataatatggtagaaaaggctaaatcatacttaatgagcaaattgaagtaagcttttaaagtatatttctcttttggtgaaaggccaatggagacattgtgaatttaagtgaacatttgcctcaagatgttaactataaacacactgcatacaattttcttctgaataacaaatgaatgcttattgctgcatgatgtaagcaaaagtcattatttttcctattcatttgaaataagttatggcttaaaatgcttttggagtttatttctcaaaattaaaatctggtcacatgagctttagtttgttttctggtttaaaaaataaaaaggtttctcttaacagtatttccagtgacaatgcaaggtaagtatatcaaaggaaatcaacagttgtgcttgggggctttttgttatgggatattgatttcttgttttttttccgtaacattgtctgctgcaatttaaataaaaattacgacattttaagatatttcatagacaaaccaaacaaaaatatatgtttttactttaaagtgaatgtttttctcttcagctgatctaaaaatgaaagcaaaatatcttatgtagaaatattttgataatatttttacagtgagctttcccatgtttttatgtcttaagtttctttgctgcgtttatgtaggttgcacaagaacttttactcacttgtaattgtgcctcagactttttgaaagtctaccttctaaattgccccgacgatctagattctacatgttaccattggtttattcttgtgctttctgtatttaaaactttggctgtactaagcaaatgcaaggttataatttagctaatagtagtttacagacaattctgatgattatgatttcatttggtttaactaagctgtactagttcatttcataaggaaatgatactgtagacaaatgtaaataaagcctgtgagtcaagcaaaaaaaaaaaaaaaaa

SEQ ID NO: 915 - protein, 311 aa, Homo sapiens
  ref <308>: DATABASE ACCESSION NUMBER: Refseq / NP_005446
  ref <309>: DATABASE ENTRY DATE: 2002-11-05
MSTKNFRVSDGDWICPDKKCGNVNFARRTSCNRCGREKTTEAKMMKAGGTEIGKTLAEKSRGLFSANDWQCKTCSNVNWARRSECNMCNTPKYAKLEERTGYGGGFNERENVEYIEREESDGEYDEFGRKKKKYRGKAVGPASILKEVEDKESEGEEEDEDEDLSKYKLDEDEDEDDADLSKYNLDASEEEDSNKKKSNRRSRSKSRSSHSRSSSRSSSPSSSRSRSRSRSRSSSSSQSRSRSSSRERSRSRGSKSRSSSRSTGALLPHEKDLIQVHHLLLRGTEREVVLDLLHLVIAKKDEQDHGHPKAR

SEQ ID NO: 916 - DNA, 1694 bp, Rattus norvegicus
  ref <308>: DATABASE ACCESSION NUMBER: Refseq / NM_031122
  ref <309>: DATABASE ENTRY DATE: 2003-01-13
gcgtcgacgggcttggcatcgggcctccgcagccgcccaccgccagaagcttccagcctcaccactatggatccccgcaaagtgagcgagcttcgggccttcgtgaagatgtgtaggcaggacccgagcgtcctgcacaccgaggaaatgcgtttcctgagggagtgggtggagagcatggggggtaaagtaccacctgctactcataaagcgaagtcagaagaaaacactaaggaagaaaaaagagacaagacgacagaggacaacataaagacagaggagccatcgagtgaggagagcgatctagaaattgacaatgaaggtgtaattgaagcagacactgatgctcctcaggaaatgggagatgaaaatgcagagataactgaggcgatgatggatgaagcaaatgaaaagaagggggctgccatcgacgctctaaatgatggtgagctccagaaagccattgacttgttcacagacgccatcaagctaaaccctcgcttggccattctgtatgccaagagagccagtgttttcgtcaaattacagaagccaaatgctgccatccgagactgtgacagagctattgaaataaaccctgattcagctcagccatacaaatggagagggaaagcgcacagactcctgggtcactgggaagaagcagctcgcgatcttgccctggcctgtaaattggactatgatgaggacgccagtgcaatgctgagagaagtccagcctcgggctcaaaaaattgctgaacatcggagaaagtatgagcgaaaacgtgaagagcgagagataaaagaacgaatagaaagggtgaagaaggctcgagaagagcatgaaaaagcccaaagggaagaagaagccagaagacaatctggatctcagtttggctcttttccaggtggttttcctgggggaatgcctggtaattttcctggaggaatgcctggaatgggaggggccatgccaggaatggcaggaatgcctggactcaacgaaatcctcagtgacccagaggttcttgcagccatgcaggatccagaagtcatggtggctttccaggatgtggcccagaacccatcaaatatgtcaaaatatcagaacaacccaaaggttatgaatctcatcagtaaattgtcagccaagtttggaggtcactcataatgtcaaagcccttgctgaatgaagaacagcttagctcacttactggatgttgcaataatacaaaccagtgtacctctgacctcaccagagagctggggcgcttcgaagataatccctaccctctgcatcatatgcggctgaggcatattacagtggtttgccattagagtgttcattcagataatgttttcctattaggaattacaaacttaaaacatttttcaaccttaaacatattttttaaaaatttaggggatgtcaattcctacatttttcgttactaatctttttgggtttttccttttgaattactgggcaaggaaggtgaatgtggatgatttactgctttcatgaatgaaataaagatttgttagtgggaagcaaataaaacacatttaagttgattgagtcggacatacggttactgcaacatcttgaattgtctttaatgttttacttcacaatgatctatttcagtaaatcttttgggaccaccaaaaaaaaaaaaaaaaaaaaaaaaa

SEQ ID NO: 917 - protein, 368 aa, Rattus norvegicus
  ref <308>: DATABASE ACCESSION NUMBER: Refseq / NP_112384
  ref <309>: DATABASE ENTRY DATE: 2003-01-13
MDPRKVSELRAFVKMCRQDPSVLHTEEMRFLREWVESMGGKVPPATHKAKSEENTKEEKRDKTTEDNIKTEEPSSEESDLEIDNEGVIEADTDAPQEMGDENAEITEAMMDEANEKKGAAIDALNDGELQKAIDLFTDAIKLNPRLAILYAKRASVFVKLQKPNAAIRDCDRAIEINPDSAQPYKWRGKAHRLLGHWEEAARDLALACKLDYDEDASAMLREVQPRAQKIAEHRRKYERKREEREIKERIERVKKAREEHEKAQREEEARRQSGSQFGSFPGGFPGGMPGNFPGGMPGMGGAMPGMAGMPGLNEILSDPEVLAAMQDPEVMVAFQDVAQNPSNMSKYQNNPKVMNLISKLSAKFGGHS

SEQ ID NO: 918 - DNA, 3214 bp, Homo sapiens
  ref <308>: DATABASE ACCESSION NUMBER: Refseq / NM_003932
  ref <309>: DATABASE ENTRY DATE: 2003-01-15
gggtgggaggagccagcggccggggaggttctagtctgttctgtcttgcggcagccgcccccttctgcgcggtcacgccgagccagcgcctgggcctggaaccgggccgtagcccccccagtttcgcccaccacctccctaccatggacccccgcaaagtgaacgagcttcgggcctttgtgaaaatgtgtaagcaggatccgagcgttctgcacaccgaggaaatgcgcttcctgagggagtgggtggagagcatgggtggtaaagtaccacctgctactcagaaagctaaatcagaagaaaataccaaggaagaaaaacctgatagtaagaaggtggaggaagacttaaaggcagacgaaccatcaagtgaggaaagtgatctagaaattgataaagaaggtgtgattgaaccagacactgatgctcctcaagaaatgggagatgaaaatgcggagataacggaggagatgatggatcaggcaaatgataaaaaagtggctgctattgaagccctaaatgatggtgaactccagaaagccattgacttattcacagatgccatcaagctgaatcctcgcttggccattttgtatgccaagagggccagtgtcttcgtcaaattacagaagccaaatgctgccatccgagactgtgacagagccattgaaataaatcctgattcagctcagccttacaagtggcgggggaaagcacacagacttctaggccactgggaagaagcagcccatgatcttgcccttgcctgtaaattggattatgatgaagatgctagtgcaatgctgaaagaagttcaacctagggcacagaaaattgcagaacatcggagaaagtatgagcgaaaacgtgaagagcgagagatcaaagaaagaatagaacgagttaagaaggctcgagaagagcatgagagagcccagagggaggaagaagccagacgacagtcaggagctcagtatggctcttttccaggtggctttcctgggggaatgcctggtaattttcccggaggaatgcctggaatgggagggggcatgcctggaatggctggaatgcctggactcaatgaaattcttagtgatccagaggttcttgcagccatgcaggatccagaagttatggtggctttccaggatgtggctcagaacccagcaaatatgtcaaaataccagagcaacccaaaggttatgaatctcatcagtaaattgtcagccaaatttggaggtcaagcgtaatgtccttctgataaataaagcccttgctgaaggaaaagcaacctagatcaccttatggatgtcgcaataatacaaaccagtgtacctctgaccttctcatcaagagagctggggtgctttgaagataatccctacccctctcccccaaatgcagctgaagcattttacagtggtttgccattagggtattcattcagataatgttttcctactaggaattacaaactttaaacactttttaaatcttcaaaatatttaaaacaaatttaaagggcctgttaattcttatatttttctttactaatcattttggatttttttctttgaattattggcagggaatatacttatgtatggaagattactgctctgagtgaaataaaagttattagtgcgaggcaaacataactcatttgaggataaagtttgtgttggatatgtggttcctgatgcattttgacttgtctttttaaatgctttatctttttctttaaagatttatttcaataaaactaattgggaccacccgtatttcagtaggacctgggtagggattggaagtacttggcagggcagcagcaatcttgctgtgtttgatataacatgcatccttgggcaggttgcccttaaatcttacactgtggtgaagggatgttttttttgtaatgctgcagtagagttggagtacttagttctcttgttgtccagtatatctaataagtgtttttcatattatttccacgtaagggaaataaggtagtacttttctttttatatttctatgcttaaaattctctttcctagtcaaaaattgcccaaatctgtgtttgctttctgcttgctacatttgtctcccttacttttcttgagctaaagacaggctttttccaccggcatcatcactgctatcatcattaacagcgtaattatacaagcatatttaatgctgagtttaatttaatatgtaatacatatggtaattgtagggtaatacccacaacaactgtagtttcttacttggccaagagaatgcttatttaagtgttagacttccattctggcaaaatcttgccttatcagaagacattggaaagagggattccctttggtgtttggtcttctacttagaaaaacctattgcagttagtttatcttgtagtattcatctttgtattctgaagataaggtttgaattaaattgatacacacagaggggaaccgattttttttatccaatgtgaattataaatgagataatccacagttattcattgtggagttgttgagactatgaaagactcattgtctttgtattcagctcttaaatagtgtaactatatccccacctctgcttgctttctttccctcccctccaatgataaagaaaatgataaattttctgttgtgcattcaattcttattttaaataagactaagtataggcattgtacctgacattgctacgtttctaccagtgtttcaatttaaagtgctagtgtttaaaaacattttcaagggataaggccttctgtactttgcttatttgaagaatcagtggtaggagcagtgaagtaaattctatggagtacatttctaaaataccacatttctgaaatcataaataagtttattcaggttctaaccctttgctgtacacaagcagacagaaatgcatctgttacataaatgagaaaaagctattatgctgatggagcatgctttttaaatcctttaaaaacactcaccatataaacttgcatttgagcttgtgtgttcttttgttaatgtgtagagttctcctttctcgaaattgccagtgtgtacttggcttaactcaagaacagtttcttctggattccttatttgatttatttaacctaattatattctaatattgcaaatattaccataagtgggtaaaagtaaaattcctcttctgaaaaaaaaaaaaaaaaaaaaaa

SEQ ID NO: 919 - protein, 369 aa, Homo sapiens
  ref <308>: DATABASE ACCESSION NUMBER: Refseq / NP_003923
  ref <309>: DATABASE ENTRY DATE: 2003-01-15
MDPRKVNELRAFVKMCKQDPSVLHTEEMRFLREWVESMGGKVPPATQKAKSEENTKEEKPDSKKVEEDLKADEPSSEESDLEIDKEGVIEPDTDAPQEMGDENAEITEEMMDQANDKKVAAIEALNDGELQKAIDLFTDAIKLNPRLAILYAKRASVFVKLQKPNAAIRDCDRAIEINPDSAQPYKWRGKAHRLLGHWEEAAHDLALACKLDYDEDASAMLKEVQPRAQKIAEHRRKYERKREEREIKERIERVKKAREEHERAQREEEARRQSGAQYGSFPGGFPGGMPGNFPGGMPGMGGGMPGMAGMPGLNEILSDPEVLAAMQDPEVMVAFQDVAQNPANMSKYQSNPKVMNLISKLSAKFGGQA

SEQ ID NO: 920 - DNA, 1107 bp, Rattus norvegicus
  ref <308>: DATABASE ACCESSION NUMBER: Refseq / NM_053985
  ref <309>: DATABASE ENTRY DATE: 2003-01-13
agcggtttggtcgttcgttggaggagcttcgtcttgttctgctctgcgattgcggcgcttgttcgagcgcttacagcggcgcgtcggtcccagcaagggcctcagacttcagctttgggtgagagaagatggcccgaaccaagcagaccgctaggaagtccaccggagggaaagccccccgcaaacagctggccaccaaggcggcccggaaaagcgcgccctctactggcggggtgaagaaacctcatcgctacaggcccgggaccgtggctctaagagagatccgtcgttaccagaaatcgactgagctgctcatccggaagctacccttccagaggttggtgagggagatcgcccaggatttcaaaaccgacttgaggtttcaaagtgcagccatcggtgcccttcaggaggctagcgaggcatacctggtggggttgtttgaagataccaatctgtgtgccatccacgccaagagagtcaccatcatgcccaaagacatccagttggctcgccggatacggggggagagagcttaagttgaagcgatttttatggcattttgtagtaaattctgtaaaatactttggtttaatttgtgactttttttgtaagaaattgtttataatatgttgcatttgtacttaagtcattccatctttcactcaggatgaatggaaagagtgactgttcacagacctcagtgatgtgagcactgtggctcaggagtgacaagttgctaatatgcagaagggatgggtgatacttcttgcttctcatgatgcatgtttctgtatgttaatgacttgttgggtagctattaaggtactagaattgataaatgtgtacagggtccttttgcaataaaactggttatgacttgatccaagtgtttaaccatacatcactgtgatagaatgtgggctttttcaaaggttgaagatacaagttttagccacagtgtaacagtttcctttaaaaaaaaaaaagtaaacctggcagctatagaatacactatgtgcatttataatagctattttatatattgtagtgttcaacatttttaaattaaatgttttacattcacaaaaaaaaaaaaaaaaaaaa

SEQ ID NO: 921 - protein, 136 aa, Rattus norvegicus
  ref <308>: DATABASE ACCESSION NUMBER: Refseq / NP_446437
  ref <309>: DATABASE ENTRY DATE: 2003-01-13
MARTKQTARKSTGGKAPRKQLATKAARKSAPSTGGVKKPHRYRPGTVALREIRRYQKSTELLIRKLPFQRLVREIAQDFKTDLRFQSAAIGALQEASEAYLVGLFEDTNLCAIHAKRVTIMPKDIQLARRIRGERA

SEQ ID NO: 922 - DNA, 359 bp, Rattus norvegicus
  ref <308>: DATABASE ACCESSION NUMBER: Refseq / NM_031111
  ref <309>: DATABASE ENTRY DATE: 2003-01-13
tttctgtgttctccgtagacccgtgagcagggacggcctcggtatgcagaacgacgccggcgagtttgtggacctgtacgtgccgcggaaatgctccgcgagcaaccgcatcattgctgccaaggaccacgcgtccatccagatgaatgtggccgaggttgacaggagtacaggccgatttaatggtcagtttaaaacctacggcatctgcggggccattcgcaggatgggcgagtcagatgattctattctccgattggctaaggctgatggaattgtctcaaagaacttttgagccagaagaaatcgggaataatttgttataaataaaagtgataataagtaaaaaaaaaaaaaaa

SEQ ID NO: 923 - protein, 83 aa, Rattus norvegicus
  ref <308>: DATABASE ACCESSION NUMBER: Refseq / NP_112373
  ref <309>: DATABASE ENTRY DATE: 2003-01-13
MQNDAGEFVDLYVPRKCSASNRIIAAKDHASIQMNVAEVDRSTGRFNGQFKTYGICGAIRRMGESDDSILRLAKADGIVSKNF

SEQ ID NO: 924 - DNA, 589 bp, Homo sapiens
  ref <308>: DATABASE ACCESSION NUMBER: EMBL / BE727662
  ref <309>: DATABASE ENTRY DATE: 2000-09-18
ctcgaaatgcagaacgacgccggcgagttcgtggacctgtacgtgccgcggaaatgctccgctagcaatcgcatcatcggtgccaaggaccacgcatccatccagatgaacgtggccgaggttgacaaggtcacaggcaggtttaatggccagtttaaaacttacgctatctgcggggccattcgtaggatgggtgagtcagatgattccattctccgattggccaaggccgatggcatcgtctcaaagaacttttgactggagagaatcacagatgtggaatatttgtcataacataaataatgaaaacctaaaacaacaaaaaaaaaaacacaaaaaaaaaaaaaaaaaccgcgaggcccccatctcgcgcgcggcgccccccacaagagccccaccaacgcccccgcgggcacaaccgcggcccccgcccccccacctcgcggcaacaacgggcggacaacaccggccggcgtcccccataataggcggggccccaacaacttgacaaaaccgcggggtaacccgggaaaaacagaaacgcaccaaccccccactcatcacaacccaacacccaccccaacaacca

SEQ ID NO: 925 - DNA, 2793 bp, Rattus norvegicus
  ref <308>: DATABASE ACCESSION NUMBER: Refseq / NM_017073
  ref <309>: DATABASE ENTRY DATE: 2000-11-01
acagccgagaatgggagtagggcggagtgtttgagcagcacacccatttcctctccgctcttcgtctcgttctcgtggcctgtccacccatccatcatctgccggccaccgctctgaacaccttccaccatggccacctcagcaagttcccacttgaacaaaggcatcaagcagatgtacatgaacctgccccagggcgagaagatccaactcatgtatatctgggttgatggtaccggggaagggctacgctgcaagacccgtactctggactgtgaccccaagtgtgtagaagagttacccgagtggaactttgatggttctagtacgtttcagtctgaaggctccaacagcgacatgtacctccatcctgtggccatgtttcgagaccccttccgcagagaccccaacaagctggtgttctgcgaagtattcaagtataaccggaagcccgcagagaccaacctgaggcacagctgtaagcgtataatggacatggtgagcagccagcgcccctggtttggaatggaacaggagtatactctcatgggaacagacggccaccctttcggctggccttctaatggcttccctggaccccaaggaccctattactgcggtgtgggagctgacaaggcttatggccgagatatcgtggaggctcactaccgggcctgcttgtatgctggaatcaagatcacagggacaaatgccgaggttatgcctgcccagtgggaattccagataggaccctgcgaagggatccgcatgggagatcatctctgggtagcccgttttatcttgcatcgggtatgcgaagactttggggtgatagcaacctttgaccccaagcccattccagggaactggaatggggcaggctgccacaccaactttagcaccaaggccatgcgggaggagaatggtctgaggtgcattgaggaggccattgataaactgagcaagaggcaccagtaccacatccgtgcctacgaccccaaggggggcctggacaacgcccgccgtctgactggattccacgaaacctccaacatcaacgacttttccgctggcgttgccaaccgcagcgccagtatccgcattccccggattgtcggccaggagaagaagggttactttgaagaccgtcggccttctgccaattgcgacccctatgcggtgacggaagccatcgtccgcacgtgtctcctcaacgaaactggcgacgagcccttccaatacaagaactaagcggactcgacttccagtgatcttgagcccttcctagttcaccccactcccaactgttccctctcccactggtccccactgtaactcaaaaggatggaataccaaggtctttttattccttgcgcccagttaatttttgcctttattggtcagaatagaggggtcaggttcttaatctctacacacccaaccccttctttcctagctagctttccagtgggggaacgggagggggtggggaagggtaacccaccgcttcatctcagcgggaatgcatgtcctgtaggcatagctgtcacaaatcgggtgtacttgtggtgagggaggactggttttttttttccttcaggataattgaaagggcaggcccaacagcttagattaacattttctctgtcagtagagagctgttatttcttccggtgaaaccagctttctattgaagtctggtgaggagttggaggttggtctcttggcttccttagcttagggaaggggagttcaccctcccttcatgaaacacagttcacctgacaaatggccctactgtaaaggaagaaaaaagtttcttggtcctccatttataactcaaagcagagtagtatttttatatttaaatgttaaaaacaaaaaagttatatatatgggtgtgtggatatatatgtcttttctaattgagaaaaccatcctattccctgggtgccaagtttgagtgaggagctcggtgtagaagtgaggcactcttgaggtaggggtggggatgcagtactgggaaagttggttatcttgggggttcagcttcattactacttagggtttccctgcccactctgcaggagcagatgttggacaggtagccagtgggatgccactgcttgccgccactgtccctgggcttagtttaaggggacgtgtatacctaatccacacacgagttagaagtatgagttggctggtcaacttgaacattgttacaggcgggtgggtgttagtggggggttattttttggtgggactagcatgtcactaaagcgggccttttgatatattaaattttttaaagcaaaacaagtttagattttaatcaagttcgtagggtttctaactttacagaattgcctgtttgtttcaatgactccttccacttggctcttaggggaactgaggacaggcctggagttaatacacttgtcattctgtgtcctagtgtcctcttcctccggcagactgtccccttccttctgaaaaagccgatagagtcttgttttatttttcttttataataaacacaccccacctccatcccagcttgttgccttgcagttttctggatgtttgtgtcggcagcaggcagctgtggtttttttctcttgccacgatgactctaattaccatgtatagtatgttcagttagataactcactgtaaacagactgtaactgagagcagagcttgtaaatcaacctaacgtttataagatttcctctgacttgtttctttgtggttccaaaaaaaaaaaaaaaaaaaaaaacctcaaaaact

SEQ ID NO: 926 - protein, 373 aa, Rattus norvegicus
  ref <308>: DATABASE ACCESSION NUMBER: Refseq / NP_058769
  ref <309>: DATABASE ENTRY DATE: 2000-11-01
MATSASSHLNKGIKQMYMNLPQGEKIQLMYIWVDGTGEGLRCKTRTLDCDPKCVEELPEWNFDGSSTFQSEGSNSDMYLHPVAMFRDPFRRDPNKLVFCEVFKYNRKPAETNLRHSCKRIMDMVSSQRPWFGMEQEYTLMGTDGHPFGWPSNGFPGPQGPYYCGVGADKAYGRDIVEAHYRACLYAGIKITGTNAEVMPAQWEFQIGPCEGIRMGDHLWVARFILHRVCEDFGVIATFDPKPIPGNWNGAGCHTNFSTKAMREENGLRCIEEAIDKLSKRHQYHIRAYDPKGGLDNARRLTGFHETSNINDFSAGVANRSASIRIPRIVGQEKKGYFEDRRPSANCDPYAVTEAIVRTCLLNETGDEPFQYKN

SEQ ID NO: 927 - DNA, 474 bp, Rattus norvegicus
  ref <308>: DATABASE ACCESSION NUMBER: EMBL / AI236484
  ref <309>: DATABASE ENTRY DATE: 2000-03-03
acttgtacgtttgcaaatgtgtgttttagataattaggattgggtaataaaaaatagcatatttgtgtatttaatagcattaagattacattcaaatgaaaaagatctcaatatttgctgtttggtttttgtgcattttctttcaaaatgtaatcatgattttagtgtggtagacttaagtcctaaccatgtttaagaacatctccattccacatttaccttgataacattgaaactgctgccaatagtttggggtatgaagtgtttatactgccctctacttcccaagggcggtagatgaatgccatctccctatttaacagccttttaatatagaaccaccaagtttgctgtgtctgagcagactgtggtgggaacctggtttgtttctgcttttaagatttaaggtctcaaagccccattggtctagtcaactttccttggttacgttccccacacacagcttttcagagc

SEQ ID NO: 928 - DNA, 3043 bp, Homo sapiens
  ref <308>: DATABASE ACCESSION NUMBER: Refseq / NM_005758
  ref <309>: DATABASE ENTRY DATE: 2002-12-23
cgagttggaagaggtgagtcctgtctcaaaatggaggtaaaaccgccgcctggttgcccccagcccgactccggcagtcgccgtcgccgctggggggaggagggccatgatccaaaggaaccagagcagctgagaaaactgtttattggtggtctgagctttgaaactacagatgatagtttaagagaacattttgagaaatggggcacactcacagattgtctggtaatgagagacccccaaacaaaacgttccaggggctttggttttgtgacttattcttgtgttacagaggtggatgcagcaatcggtgctcgaccattcaaggttgatgggcgtgtagtggaaccaaagagagctgtttctagagaggattctgtgaagcctggtgcccatctaacagtgaagaaaatttttgttggcagtattaaagaagatacagaagaatataatttgagagactactttgaaaagtacggcaagattgaaaccatagaagttatggaagacaggcagagtggaaaaaagagaggatttgcttctgtaacttttgatgatcatgatacagttgataaaattgttgttcagaaataccacactattaatgggcataactgtgaagtgaaaaaggcccttgctaaacaagtgatgcagccggctggatcacagaggggtcgtggaggtggatctggcaattgtatgggtcacagaggaaactttggaggtggtggaggtaattttggccgtgatggaaactttggtggaagaggaggctatggtggtggaggtggtggcagcagaggtagttatggaggaggtgatgtggatataatggattaggaggtgatggtggcaactatggcagtggtcctggttatagtagtagaggcgggtatggtggtggtggaccaggatatggaaaccaaggtggtggatatggtggcggtgttggaggatatgatggttacaatgaaggaggaaattttgacggtagtaactatggtggtggtgggaactataatgattttggaaattacagtggacaacagcaatcaaattatggacacatgaaagggggcagttttggtggaagaagctcgggcagtccctatggtggtggttatggatctggtggtggaagtggtggatatggtagcagaaggttctaaaaacagcaggaaaagggctacagttcttagcaggagagagagtgaggagttgtcaggaaagctgcaggttactttgagacagtcgtcccaagtgcattagaggaactgtaaaaatctgtcacagaaggaacgatgatccataatcagaaaagttactgcagcttaaacaggaaacccttcttgttcaggactgtcatagccacagtttgcaaaaagtgcagctattgattaatgcaatgtagtgtcaattagatgtacattcctgaggttcttttatctgttgtagctttgtctttttctttttcttttcattacatcaggtatattgccctgtaaattgtggtagtggtaccaggaataaaaaattaaggaatttttaacttttcaatatttgtgtagttcagtttttctacattttagtacagaaactttaacaaaatgcagtttcgaaggtgtttccttgtgagttaacaagtaaagaagatcattgttaattactattttgtatgaattttgctaaagttaactgtaaagaaacacctgctgacttgcagtttaaggggaatctattctccccatttccaaaccatgatatgaatgggcgctgacatgtggagagaatagataatttgtgtgtttgcaatgtgtgttttagataaataggattgggtatttaaattagcatttgtgaatttaatagcattaagattaccttcaaatgaaaaaaaatctcaaaatttctatttggtttttgtgcattttcttttaaaatgtaatcatatgattttagtgtgttagacttgctgagtcctagctgtgtttagaacagaacatctctattctacatttaccttggtcaaatttgaactgctgccataggttttgggtgtaaagaatgtttactgccctccatttaaattctgaaaagggatggtggatgttttccctctcctacgttagaaaccattcttaaaaacttttgaaaatatagaaccattaagcctgctatatctgagcaaattagtgggtaaccttttttccttttttaaagcacaagaggcccataaatcttgagttatttgcattagtttacattttttgatacaacttttcagaccaagagaataaaaatcatgcgttattaaacccctagctggctggcatgctttcctgtttgtactgtatacattttgctggatgaaaccaagatagtttaggtataattgtccaaaataacctaactgcagcagaaatgtaggacagttgcttagtacaggcttctcacttcctacagacctgaattcaaatttggatagtctgagttattaaattcccaaagacaaagaacacactcttatttcttgtgtatatttcaacataaatcatgttgttaccaatttgttgggaaggccctggttgagaagagttttagataataaggctgtatatatatagatatatatagatatataccaatgtctatatatagagatattttatatatatatatacaggtatatatatgtgtgtgtatatatatatatgtatatacatatatacatatatatatatatatggatatatacatatatatatatatatggatatatacccatgtctactgttttgcttcagctagtgcttacaatttcattcaagtcctgagtatgtgtcctgctgttactccttctttggtagttgaaagttgaattcaagtctttccttctgttttaagaagtactaagcaaacaagcaataaaaaggggaatggcgcatgctagtgtttgaatatgctctcttgttgctctaattctgtgcctccgtgcattaatatttggatgcatgcaatgccacatggaaattggcctcatggc

SEQ ID NO: 929 - protein, 269 aa, Homo sapiens
  ref <308>: DATABASE ACCESSION NUMBER: Refseq / NP_005749
  ref <309>: DATABASE ENTRY DATE: 2002-12-23
MEVKPPPGCPQPDSGSRRRRWGEEGHDPKEPEQLRKLFIGGLSFETTDDSLREHFEKWGTLTDCLVMRDPQTKRSRGFGFVTYSCVTEVDAAIGARPFKVDGRVVEPKRAVSREDSVKPGAHLTVKKIFVGSIKEDTEEYNLRDYFEKYGKIETIEVMEDRQSGKKRGFASVTFDDHDTVDKIVVQKYHTINGHNCEVKKALAKQVMQPAGSQRGRGGGSGNCMGHRGNFGGGGGNFGRDGNFGGRGGYGGGGGGSRGSYGGGDVDIMD

SEQ ID NO: 930 - DNA, 471 bp, Rattus norvegicus
  misc_feature (1)..(471): n=a, c, g or t
  ref <308>: DATABASE ACCESSION NUMBER: EMBL / H31610
  ref <309>: DATABASE ENTRY DATE: 2000-03-04
aaggcaggaaaaagaanccaaaagattcaaancccgatgttagtgggatctggaacagcatcagtaacnccaagtagtgagactgtcactccagaagaccataacaggcgcaattcagattctgcaggaccatttgcagtgcctgacccacttcggcaagatgtggaagagttcgaagctctttacgaccagcacagcagcgagtatgttgtccgaaataagaagctgtgggatattaaccccaaacagaaatgttcaactctgtatgattacttctctcagttgctggaagagcacggccccttggatatgagtgataggatgttctctgaggaatatgagttcttccctgaagaaactcgccagatactggagaaggcaggagggctgaagtcgttcctcctgggctgtcctcgatttgttgtgattgacaactgcattgcattgaaaaaagttgcctcaagactcaag

SEQ ID NO: 931 - DNA, 692 bp, Rattus norvegicus
  ref <308>: DATABASE ACCESSION NUMBER: EMBL / S46798
  ref <309>: DATABASE ENTRY DATE: 2001-03-22
ccggaatacctttcctcacaggattctattcaaaagatctcatcatcgaagccatcaacacgtgtaacaccaacgcctgagccctaataatcactttaatcgccacatccataactgctgtgtacagcatacgcatcatctacttcgtcaccatgacaaaaccacgatactccccactaattactattaatgaaaacaacccaaacctcattaatccaatcaaacgcctagcattaggaagcatcctagcaggcttccttatctcactaaatattcctccaactaacattcaaattctcacaataccctgacatttaaaaataacagccctacttattacaatcctaggatttgccattgccctagaacttaacaatttaacactaaatctatcaataagcaaacccaccaaactatcatcattctcaacctccctaggctactacccaccaattataccccgaattattcctcaaaaaactctaaattctagctacaaattatccttaaacctactagacctaatctgactagaaaagacaatcccaaaatcaacctcaatcacccaaacccaactatctaaaataatatccaaccaaaaaggactaatcaaactatatttcctatcatttctcatcactatttcactaatttttatcttacacacacttaatcccgagtgatttcaataa

SEQ ID NO: 932 - DNA, 2462 bp, Rattus norvegicus
  ref <308>: DATABASE ACCESSION NUMBER: Refseq / NM_012649
  ref <309>: DATABASE ENTRY DATE: 2003-01-13
tgtgctgttggaaccatggcgcctgtctgcctgtttgcgccgctgctgctgttgctcctcggaggtttccccgtcgccccaggcgagtcgattcgagagactgaggtcatagacccccaggacctcctggaaggcagatacttctctggagccctcccggacgatgaagacgctgggggccttgagcaggactctgactttgagctgtcgggttccggagatctagatgacacggaggagcccaggaccttccctgaggtgatttcacccttggtgccactagataaccacatccccgagaatgcccagcctggcatccgtgtcccctcagagcccaaggaactggaagagaatgaggtcattcccaaaagggtcccctccgacgtgggggatgacgatgtgtccaacaaagtgtccatgtccagcacttcccagggcagcaacatttttgaaagaactgaggtcttggcagctctgattgtgggcggcgtagtgggcatcctcttcgccgttttcctgatcctgctgctggtgtaccgcatgaagaagaaggatgaaggcagttacgacttgggcaagaaacccatctacaaaaaagcccccaccaacgagttctacgcatgaagcttcttcccatgagtgctgcttggacttcatggggagaggagttgaggattgtggacagtggacattggcagagagagggcaccttaatactgacttgtatctccatctctggtcacctttctggtgtcagaagagatatgatcttctactgtgctgcctcagagagagagagagagagagagagagagatgggatggggtgcggagggagtgtccgtgtgtgtgtgtgtgtgtgtgtgtgtgtgtgtgtgtgtgtgtctgtctgtctgtctgagttgccctggcagaaaaatggggttaaacttgttctttcttgaaggcaagcctggaattgggtctttttgttgttgtttcaaatttctagaatagaatgtaggaccagtttagttcctgccgttaacatgtctcatttatgactgcctttattctagaggcaaggagttgggggcaaggagctggaacccgctgcaccttgagatgtgttcacccgagtacttcctcacactacagggtctctgtggtgtatctcggggcattctaggctcagtgacttttgaaattcaaccttttttttttttttttaaatccagggagggtgggactgaagtgctgacagctcatgctgaagtacacttgtagaagatttgtaaaatgtaaggttttttttttttttttttaatggtccattccttcatgggagcgtgtgccctgggctgagagcgtggggatgcacagatgttctttctagaacatattcgttgcaacagctaactttgtgttttcatggttttttatgttttgttttgtttttttgaaaatgagagaagagctggagagatgatttttatgatttttttttgttttgttttttactatttatagcttcagacggggctgcttttctctacctttctgtctttactgtttcccactattttttttttttaatgttctgtgctcttgtttttgaccctggccctttctgaagttgctttatcttaaaaagtagctacagtgttctagcagattccagaatataatgtagggggtagcgggatatttgtgttcttgtaatatatattatccttcctcggttctaggagaatagataaatatatttttttaggatatagaatgatactacaggtctcatgttggctgggtggctgcgtgagtgagttttcgtgcggctgagtaagctgttgccctcttctcttgccctgctcctggtgccttctcgagatcgagctggagtgactgagggtacctgactctaacctcactgtgccttctgccgggggctctgcccaggagcctctgggtttgctttctccaggctctctagatgcacgatccaatacagtgacctcctgtggctgtatcaatcagttcacttgactatgtgattggaaatcattcctctgttgcactggccacacaatttaagtgcctagtcaccatccaccgagcacagagattgaggctggtttagcaggttacggttcagttttgcttgtctccccgggcaagagaaggggacttaggaggaaggtgatgaggtcccagggactcctgtcacccaggactctccctcttacagaggaaagacctagtagcttaaaaggtctgggctgtgtgggggtggggcggtcataccactccctcaaccatgccctatgcctgtaagcccccatcaccacctccgtgcagggtcctagctggctgggtcctcttctagccttgtgcctgctccttttctgtatcccttactctgttgtctgttactgatttttttgataaaaagataataaaacctggtactttctaaaaaaaaaa

SEQ ID NO: 933 - protein, 202 aa, Rattus norvegicus
  ref <308>: DATABASE ACCESSION NUMBER: Refseq / NP_036781
  ref <309>: DATABASE ENTRY DATE: 2003-01-13
MAPVCLFAPLLLLLLGGFPVAPGESIRETEVIDPQDLLEGRYFSGALPDDEDAGGLEQDSDFELSGSGDLDDTEEPRTFPEVISPLVPLDNHIPENAQPGIRVPSEPKELEENEVIPKRVPSDVGDDDVSNKVSMSSTSQGSNIFERTEVLAALIVGGVVGILFAVFLILLLVYRMKKKDEGSYDLGKKPIYKKAPTNEFYA

SEQ ID NO: 934 - DNA, 2757 bp, Rattus norvegicus
  ref <308>: DATABASE ACCESSION NUMBER: Refseq / NM_031715
  ref <309>: DATABASE ENTRY DATE: 2003-01-13
gccagcgaggagagctaaaactacaagagtggatcatgacccatgaagagcatcatgaagccaaaaccctggggatcggcaaggccatcgccgtgttgacctctggtggagatgcccaaggtatgaatgctacggtcagggctgtggtacgagttggcatcttcaccgggctccgcgtcttctttgtccatgagggttaccaaggcctggtggatggtggagagcacatcagggaggccacctgggagagcgtgtccatgatgctccagctgggaggcacggtgattggaagtgcccgatgcaaggacttccgggagcgagaaggacgactccgagctgcccacaacctggtgaagcgggggatcaccaatctgtgtgtcatcggaggcgatggcagcctcactggggctgacacttttcgttcagagtggagtgacttattgaatgacctccagaaagatgggaagatcacagccgaggagcgtacaaagtccagctacctgaacatcgttttcctggttggctcaatcgacaatgacttctgtggcactgatatgaccattggtactgactctgccctgcaccgcattgtagagatcgtggacgccatcaccaccaccgctcagagccaccagaggacatttgtgttagaagtgatgggccgccactgtggatacctggcccttgtcacctctctgtcgtgtggggccgactgggttttcattcccgagtgtccgccagatgacgactgggaagaacacctttgtcgccgtctcagtgagacaagaacccgtggttctcgtctcaacatcatcattgttgctgagggtgcaatcgacaaaaacgggaagccaatcacctcagaagacatcaagaacctggtggtaaagcgtcttggatatgataccagggtcactgttctgggacatgtacagaggggtgggacaccatcagcctttgaccggatcctgggcagcaggatgggtgtggaagcagtgatggcacttttggaggggaccccagacaccccagcctgtgtggtgagcctctctggtaatacggctgtgcgcctgcccctcatggagtgtgtccaggtgaccaaagacgtgaccaaggctatggatgagaagagatttgatgaagccattaagctgagaggccggagcttcatgaacaactgggaggtatacaagcttctagctcatgtcagacccccagtctctaagggcgggttgcacacggtggctgtgatgaacgtgggggccccagctgctggaatgaatgctgcagttcgctctactgtgaggattggccttatccaaggcaaccgagtgctggtcgtgcatgatggctttgagggtctggccaaaggtcagattgaggaagctggctggagctatgttggaggctggactggtcaaggtggttccaaacttggtactaaaaggactctacccaagaagaacctggaacagatcagtgccaacataaccaagtataacatccagggcctggttatcattgggggctttgaggcttacacagggggcttggagctgatggagggcaggaagcagtttgatgagctctgcatcccatttgtggtcattcccgccacggtttccaataatgtcccagggtcagacttcagcatcggggctgacacagcactgaacaccatctgcacgacctgtgaccgaatcaagcagtctgcagcaggcaccaagcggcgagtgtttatcatcgagacgatgggtggttactgtggctatctggccaccatggcaggactggcggctggggctgatgctgcctacatttttgaggagcccttcaccatccgagatctccaggttaatgttgaacatctggtgcagaagatgaaaacaactgtgaagagaggcctggtgctgaggaatgagaagtgcaacgagaactacactactgatttcattttcaacctgtactctgaggaggggaagggcatcttcgacagcaggaagaacgtgcttggccacatgcagcagggtggaaacccaactccctttgacaggaattttgccaccaagatgggtgctaaggctacgaattggatgtctgggaaaatcaaagagagttaccgtaatggacggatctttgccaacactcccgactcaggttgtgttctggggatgcgtaagagggccctggtctttcagccagtgactgagctgaaggaccagacagattttgagcaccgaatccccaaagaacagtggtggctgaagctgaggccaatcctcaaaatcctggccaagtacgagattgatctggacacctctgaccacgcccacctggagcacatttccaggaagcggtctggagaagctgctgtctagaccactttggagtgaggggaaaatcacctgatcatggtcagctcacaccctggtagacctcagcccatggcttctcagtgttgtagcccagcccctacccttctaggtttccctgtactctgtacctgcaaccaggatcactgtggccaggtgttgggggaggggtggtgagtgcctctcctaggtagctgtccttccttgcaccctggcttcatctgtcacacaggctggatgtctctagtgctactgctagatttcagcttctcaagagtaaaagtgagctttatttatttctttgtgataacaaagagtcctaggtcctttccttgtaccacagtgaagtgtaactacactaataaaagccagctggccactgtga

SEQ ID NO: 935 - protein, 780 aa, Rattus norvegicus
  ref <308>: DATABASE ACCESSION NUMBER: Refseq / NP_113903
  ref <309>: DATABASE ENTRY DATE: 2003-01-13
MTHEEHHEAKTLGIGKAIAVLTSGGDAQGMNATVRAVVRVGIFTGLRVFFVHEGYQGLVDGGEHIREATWESVSMMLQLGGTVIGSARCKDFREREGRLRAAHNLVKRGITNLCVIGGDGSLTGADTFRSEWSDLLNDLQKDGKITAEERTKSSYLNIVFLVGSIDNDFCGTDMTIGTDSALHRIVEIVDAITTTAQSHQRTFVLEVMGRHCGYLALVTSLSCGADWVFIPECPPDDDWEEHLCRRLSETRTRGSRLNIIIVAEGAIDKNGKPITSEDIKNLVVKRLGYDTRVTVLGHVQRGGTPSAFDRILGSRMGVEAVMALLEGTPDTPACVVSLSGNTAVRLPLMECVQVTKDVTKAMDEKRFDEAIKLRGRSFMNNWEVYKLLAHVRPPVSKGGLHTVAVMNVGAPAAGMNAAVRSTVRIGLIQGNRVLVVHDGFEGLAKGQIEEAGWSYVGGWTGQGGSKLGTKRTLPKKNLEQISANITKYNIQGLVIIGGFEAYTGGLELMEGRKQFDELCIPFVVIPATVSNNVPGSDFSIGADTALNTICTTCDRIKQSAAGTKRRVFIIETMGGYCGYLATMAGLAAGADAAYIFEEPFTIRDLQVNVEHLVQKMKTTVKRGLVLRNEKCNENYTTDFIFNLYSEEGKGIFDSRKNVLGHMQQGGNPTPFDRNFATKMGAKATNWMSGKIKESYRNGRIFANTPDSGCVLGMRKRALVFQPVTELKDQTDFEHRIPKEQWWLKLRPILKILAKYEIDLDTSDHAHLEHISRKRSGEAAV

SEQ ID NO: 936 - DNA, 901 bp, Rattus norvegicus
  ref <308>: DATABASE ACCESSION NUMBER: Refseq / NM_133561
  ref <309>: DATABASE ENTRY DATE: 2003-01-13
gctggccgggtcgaccctggtgtcatccgtttaggaagcggcttcaccgccaacagcacggccatggctggagctctggtgcgcaaagcagcggactatgtccggagcaaggacttccgggactatctcatgagtacgcacttctggggcccagttgccaactggggtctccccattgctgctatcaatgacatgaagaaatctccagagattatcagtgggcggatgactttcgccctctgttgctattctctgacattcatgagatttgcctacaaggtacaaccccgaaactggcttctgtttgcgtgccatgtgacaaacgaagtcgctcagctcattcagggaggacgacttatcaactacgagatgagtaagcggccatctgcctagcagtgcaaggaccagctcttgaaagggacagtgctccagccactgttgcggccacagatcacgtcagcatgaatagtcgtgctgaggggaaaacacggaagactatctttaatgaccatgccaacattattgaatagccaagaatccccaaaccaactctcggctgccttatcaatgctaaactttatttgtcttcatcaggagtagttcaaaatatgcagctaatttaataattttgaatgatgttatctatagcaatctgtagtaatatgtatattatctattgggatttgtgtaataaaaaatctaagggaacaaaactttataactacaagcacttaagtcctcaaaattcttgactttttctttaatgactatagtataaccctcagttggtcacatgtctacacataatttccagtgataacaagtagcggtgttttccatatgtaattcagatctgaacttaatggcaataaatggtttaaatatttgcgaaaaaaaaaaa

SEQ ID NO: 937 - protein, 109 aa, Rattus norvegicus
  ref <308>: DATABASE ACCESSION NUMBER: Refseq / NP_598245
  ref <309>: DATABASE ENTRY DATE: 2003-01-13
MAGALVRKAADYVRSKDFRDYLMSTHFWGPVANWGLPIAAINDMKKSPEIISGRMTFALCCYSLTFMRFAYKVQPRNWLLFACHVTNEVAQLIQGGRLINYEMSKRPSA

SEQ ID NO: 938 - DNA, 988 bp, Homo sapiens
  ref <308>: DATABASE ACCESSION NUMBER: Refseq / NM_016098
  ref <309>: DATABASE ENTRY DATE: 2002-10-07
gtcgtgaggcgggccttcgggctggctcgccgtcggctgccggggggttggcctgggtgtcattggctctgggaagcggcagcagaggcagggaccactcggggtctggtgtcggcacagccatggcgggcgcgttggtgcggaaagcggcggactatgtccgaagcaaggatttccgggactacctcatgagtacgcacttctggggcccagtagccaactggggtcttcccattgctgccatcaatgatatgaaaaagtctccagagattatcagtgggcggatgacatttgccctctgttgctattctttgacattcatgagatttgcctacaaggtacagcctcggaactggcttctgtttgcatgccacgcaacaaatgaagtagcccagctcatccagggagggcggcttatcaaacacgagatgactaaaacggcatctgcataacaatgggaaaaggaagaacaaggtcttgaagggacagcattgccagctgctgctgagtcacagatttcattataaatagcctccctaaggaaaatacactgaatgctatttttactaaccattctatttttatagaaatagctgagagtttctaaaccaactctctgctgccttacaagtattaaatattttacttctttccataaagagtagctcaaaatatgcaattaatttaataatttctgatgatgttttatctgcagtaatatgtatatcatctattagaatttacttaatgaaaaactgaagagaacaaaatttgtaaccactagcacttaagtactcctgattcttaacattgtctttaatgaccacaagacaaccaacagctggccacgtacttaaaattttgtccccactgtttaaaaatgttacctgtgtatttccatgcagtgtatatattgagatgctgtaacttaatggcaataaatgatttaaatatttgttaaaaaaaaaaaaaaaaaaaaaaaaaaaaa

SEQ ID NO: 939 - protein, 109 aa, Homo sapiens
  ref <308>: DATABASE ACCESSION NUMBER: Refseq / NP_057182
  ref <309>: DATABASE ENTRY DATE: 2002-10-07
MAGALVRKAADYVRSKDFRDYLMSTHFWGPVANWGLPIAAINDMKKSPEIISGRMTFALCCYSLTFMRFAYKVQPRNWLLFACHATNEVAQLIQGGRLIKHEMTKTASA

SEQ ID NO: 940 - DNA, 5055 bp, Rattus norvegicus
  ref <308>: DATABASE ACCESSION NUMBER: Refseq / NM_031841
  ref <309>: DATABASE ENTRY DATE: 2003-01-13
ctgggctagggatgggcacaatgcggtgttggtgtctgcagtattctactcctggacaccggtggcctgcaagtgcgcttttggcgtcctctcatttttctatccttatctccgtccgcggctgccttggccagccagtttttgattttttatctgttccttgatcgatacaaagaacctaaggacatacaggacattaatacccaactgccagctctggcccagggcttgtactgtgcagcgggctggctgcagaaacttaagtcataacactctttgtcgctgaggtctgaagctctctgcacgttctcatccctgggaacgtgaccccagcatccgacgccaagatgccggctcacatactgcaagagatctctggctcttactcggccaccaccacaatcacagcgccaccttctgggggacagcagaatggaggagagaagtttgaaaagaatcctcaccactggggagcagatgttcgccctgaaattaaagatgacctatacgaccccagctaccaggatgaggaggggcccccgcccaagctggagtacgtctggaggaacatcatcctcatggccctgctgcacattggagccctgtacgggatcacactggtcccctcctgcaaggtctacacctgcctctttgcatatttgtactacgtaatcagcgccctgggcatcacagccggggctcatcgcctgtggagccacaggacttacaaggctcggctgcccctgaggctctttctcatcatcgccaacaccatggcattccagaacgatgtgtacgaatgggcccgggatcaccgcgcccaccacaagttctcagagacacacgccgaccctcacaactcccgccgtggctttttcttctctcacgtgggttggctgcttgtgcgcaaacacccggctgtcaaagagaagggcggaaagctggacatgtctgacctgaaagctgagaagctggtgatgttccagaggaggtattacaagcccggcctcctgctcatgtgcttcatcctgcccacgctggtgccctggtactgctggggtgagacgtttgtaaacagcctgtgcgtcagcactttcttacggtacgctgtggtgctcaacgccacctggctggtgaacagcgccgcccacctctatggatatcgcccctacgacaagaacatcagctctcgggagaacatcctggtgtcgatgggagctgtgggcgagggcttccacaactaccatcacgccttcccctatgactactctgccagtgagtaccgctggcacatcaacttcaccacgttcttcatcgactgcatggccctcctgggcctggcttatgaccggaagagggtgtccaaggccgctgtcttagccaggattaagagaactggggaggagagctgcaagagtggctgagttcggggtcttccagttcctgttccaagagccggcttggcagaggcttactgttctgttaattaactactgagtattgctacccagatgctaaaatgatgaagttaacccattctggtacagtattgtaaaacggacaaatatcggaagtcaacagctctaccttttgatgctaagctgttctccccttctatcttcttttcccgttgtctttttcttcgctttgtccccaatgacctcacccctcatcgcctcccctaagccagcagccactccgctgtagttcagagttcaccttccagagcgtaccagcttttcaagggtctacagtaaaggttcacgccccagccccaacttaacgttgctccaagttacagatagaagaaaaatcttgagaaatttctcctgttattttagtccagactttgccagatggaatgggagaaaaaatagttttatttggcagagagcttgcgaagtgggtaaatcttaaggggccaaattcaacactcgggctgtgattcatcaaaattgtgggagagggggatctcctgtgatcaggctccgctccgtctggccgaggtgctggcgtctcttgacacagcgtgcctcctctcctaattctgattgggtgacagccgtggaactttgtgacactaaaatatggcaacacatcggtatctcagtgtactttaggctaaagatttaaaaaaatagagaagtgaaaaacaatttgtaggaaaagtggtctttcctaaaataagattttcttttcctttcataacaaggacctggggccaggcgtcgtggcacccgcctcaaaacagttgagaggagaggggcaggtgggtctctgagtttgaagccagccagggctagatagtgaggccttgtctcaaatagaaaagccaacaattagcaggacacacggagccgggggtcctcttgcgaggcgtgtctggaatccatgagggcggtcgctcgtggtttttgagcttcctgtgagctgcacccccagacacttgtaattcctgttcttccgtctttcggatgcaggttgctcccacaaattcaggatagctatggcgtttccatgcatcccacaatggaaggagtgtaagacttgagcttgagtcacagctaaaacccagaagacacaaagtcagtctgtcctggatcctacaaacactcaacgagtgcctccctctggaaaagatggtgaacaccttccttccactgttgggcagtggacagggaagttggaggtcgctgtaggcagctccaaggtttctaggggcaccttgccaggggacctcacaactttggcggtctctagtggagcaggttaggttttagctccctttggttcccgctgtgctttgtggtaaggcttttccctgggctgttgcctcattcctcactagctctgtgaccaggtaggactctgggatacatggctgaaagctcttttgctctaccacatctgcctctctttccctacccatttttttgtgtttcggggtggtatttttgtggtggttgttttgttttatttcttctttcctctttgacgtttagtcttgctctaggcagaaacgtcctggatatttacggtcagtaaagatgtccggtcccagcagagatacaacctctatctgcagtaggtagagaaggctgtccctttccggtggctttcagattctccacctctatccctcccaggcctctgatattctttaaactttaaaggaaaagtttggccgactttctagaaacatccctggctcagagaggctctctgtctcctcggttgttctaaaacaaatggtccgggtggtgtgggtgctggcccaagactcgattcctctgagttagggcagagcatgctccctgcactcagcaaagcctctcgggctgatcagtgctcctgggtgatgctgtggtgcttttaggaggaagacagtgttggctggctggaaagcatgacagttaaggttgtgttcttaagtgcctcagtttgaaagctttggctagggtaggagatctgagatgccgtggactttgcagaagagattttgtgcagcaacgcagaagcctggctgtgttaagattggctgtacaggatagcgaatgctgtggttggagggcacagtcttcccgtgttagttaaatagagaggctttaggacgtctctgcgcccacttgaaggtagccttatcctttagctgttcgctaaaatagaatccttgagagattgacaatatatttgctggcctgtcgccctattccttggagaggccttttgaatggttttaattccactggttatccggtgcccacttaatcaaatgtgaaaaataaaaagcagctctcttcttagcctgcccccgtggatctgaggaccctgttagatacagctgtcggtaagggtgtaccagctcactaagaaacactactgtcaagattttaaagctcagaccaagtgacacgttaataagaaactaagatctgattgaattttctaacagtccttgcctcgtggacacgctaaaattcgacttgggtgccttacctcttttctaactagtgttactcatgggcctgcgctcccttcctctgcggattccttagaaccggagagcctgtaagtgtgacaggctcaaaactggcctggctggagggttaggtggactttgatctgcagtgttccctctggggtcttcgtttggggaatatttcttggggctgttttgctgaagtgcccgtagctgatggatggtggaagtaatttgaacgtacgcgatttgtaggttttgttatttgttttaagatttaaaggctggttgtagcatttaaaagtgaaagctttttcttcctggtttgctagtgttctgcgtgtcttctttagttgaaataggttagtggagaagttaagaaagcggtggccgtgttacgctggtggtgaaggccagggccgcctacaaactctcagttttgttttgttttgtttttttataacagtcccactctgacaataatgagttcactccttggataaggttgttaatgagggaagagcccttcagacctaatcagctcttactggacccagctgtcaacactgttgcattggggattaagtttccaaccccgtgaatcatgggacagactcaaaccgtagcactgggcatgtcgcctaacaatataatgtgactcagtattctgtgagacatgggataatattcctgacctacctccacgggtaggtgcgagcatgagcaaatgctctttataaaacatttggggatcctcagcagaggagtatttaagtcctgcacatttttatagtaaccgtccaccatggacttgacacgtgcctatgtcccagacgacattgttaatctacatcattcttctcagaggttgaatggatgcattagataatgtatactcattgctatggaaacctgcaggactccttttccttccttgggtgggatttttttttcctttattatgtgcaacagtagctatttgtaatctaataattttcattaataccaactctgaaagtatttctactcatctgaggttgtgtttgttcataataaaatgaaatggatctgactgc

SEQ ID NO: 941 - protein, 358 aa, Rattus norvegicus
  ref <308>: DATABASE ACCESSION NUMBER: Refseq / NP_114029
  ref <309>: DATABASE ENTRY DATE: 2003-01-13
MPAHILQEISGSYSATTTITAPPSGGQQNGGEKFEKNPHHWGADVRPEIKDDLYDPSYQDEEGPPPKLEYVWRNIILMALLHIGALYGITLVPSCKVYTCLFAYLYYVISALGITAGAHRLWSHRTYKARLPLRLFLIIANTMAFQNDVYEWARDHRAHHKFSETHADPHNSRRGFFFSHVGWLLVRKHPAVKEKGGKLDMSDLKAEKLVMFQRRYYKPGLLLMCFILPTLVPWYCWGETFVNSLCVSTFLRYAVVLNATWLVNSAAHLYGYRPYDKNISSRENILVSMGAVGEGFHNYHHAFPYDYSASEYRWHINFTTFFIDCMALLGLAYDRKRVSKAAVLARIKRTGEESCKSG

SEQ ID NO: 942 - DNA, 691 bp, Rattus norvegicus
  ref <308>: DATABASE ACCESSION NUMBER: EMBL / X14265
  ref <309>: DATABASE ENTRY DATE: 1992-10-15
aaagagtgtggagccggacgcgcggcagagctcgagctgctgcagctgctgccgccgccagagtaacctcgatccccgagctccggataccggtgcctcgccatggctgaccagctgaccgaagaacagattgcagagttcaaggaagccttctccctctttgacaaggatggagatggcaccattaccaccaaggagctggggactgtgatgagatcgctggggcaaaaccccactgaggcggaactgcaggacatgatcaatgaggtggatgctgatggcaatgggaccattgacttcccagagttcctgaccatgatggccagaaagatgaaggatacagacagcgaggaggagatacgagaggccttccgtgtctttgacaaggatgggaatggctacatcagtgctgctgagctgcgtcacgtcatgacgaacctgggggagaagctgactgatgaggaagtggatgagatgatccgagaggcggacattgatggagacggccaggtcaattatgaagagtttgtacagatgatgactgcgaagtgaaggcccgggcagctggccatgcccgttctcctgatctcttcttgcgctctcctctcttcaacactcccctgcgtacccggttctagcaaacgccaattgattgactgagaatctgataaagcaacaaaagatttgtccc

SEQ ID NO: 943 - DNA, 554 bp, Rattus norvegicus
  ref <308>: DATABASE ACCESSION NUMBER: Refseq / NM_053330
  ref <309>: DATABASE ENTRY DATE: 2003-01-13
ctttccgccggggcagccatcttccagtaactcgccaaaatgacgaacacaaaaggaaagaggaggggtactcggtatatgttctctagaccttttaggaaacatggagtcgttcctttggccacatacatgcgaatctacaagaagggtgatattgtagacatcaagggaatgggcactgttcaaaaaggaatgccccataagtgttaccatggcaaaaccggaagagtctacaatgtcacccagcatgccgtgggcatcattgtgaacaagcaagttaaaggcaagattctggccaagaggatcaatgtgcggattgagcacatcaagcactcaaagagcagagacagcttcctgaagcgggtgaaggagaacgatcagaagaaaaaggaagccaaagagaagggcacctgggttcagcttaacggccagcctgcgccacccagagaagcccactttgtgaggactaacggaaaggagcctgagctgctggagcccattccatacgaattcatggcctaatgtatacaaaggaaataaagaacccgaactgc

SEQ ID NO: 944 - protein, 160 aa, Rattus norvegicus
  ref <308>: DATABASE ACCESSION NUMBER: Refseq / NP_445782
  ref <309>: DATABASE ENTRY DATE: 2003-01-13
MTNTKGKRRGTRYMFSRPFRKHGVVPLATYMRIYKKGDIVDIKGMGTVQKGMPHKCYHGKTGRVYNVTQHAVGIIVNKQVKGKILAKRINVRIEHIKHSKSRDSFLKRVKENDQKKKEAKEKGTWVQLNGQPAPPREAHFVRTNGKEPELLEPIPYEFMA

SEQ ID NO: 945 - DNA, 3275 bp, Rattus norvegicus
  ref <308>: DATABASE ACCESSION NUMBER: Refseq / NM_017268
  ref <309>: DATABASE ENTRY DATE: 2003-01-14
cccagggtccgatcgcgtttggtgcctgaaggaggaaccggtgacagacctggagactacagttctctgtccttcacacagctctttcaccatgcctgggtcacttcctttgaatgcagaggcttgctggccaaaagatgtgggaatcgttgcccttgaaatctactttccttctcagtatgttgatcaagctgagttggaaaaatacgatggtgtagatgctggaaagtataccattggcctgggccaggccaggatgggcttctgcacggatcgcgaagacatcaactctctctgcctgactgtggttcagaaactgatggagagaaatagcctttcctatgactgcattgggcggctggaagtcgggacagagacaatcatcgacaaatcaaaatccgtgaagtctaatttgatgcagctgtttgaggagtctgggaatacagatatagaaggaatagatacaactaatgcatgctatgggggcacagccgcagtcttcaatgctgtgaactggatcgaatccagctcttgggatggacgatacgctttggtagttgcaggagacatcgctatatatgcctcaggaaacgccaggcctacaggtggagttggagctgtggctctgctaattgggccaaatgctcctgtaatttttgaccgagggcttcgtgggacacacatgcagcatgcctacgacttttacaagcctgacatgctctctgaataccctgtggtagatggaaaactctccatacagtgctacctcagcgcattggaccgctgctattctgtctaccgcaaaaagatccgggcccagtggcagaaagagggaaaggataaagattttaccctgaatgattttggcttcatgatctttcactcgccatactgtaaactggtgcagaaatctctagctaggatgttcctgaatgactttcttaacgatcaaaacagagacaaaaacagtatttacagtgggctggaagcctttggggatgtgaaattagaagatacttacttcgacagagatgtggaaaaggcatttatgaaggctagtgctgagctattcaaccagaaaacaaaggcatctttgcttgtatcgaatcaaaatggaaacatgtacacatcctctgtatacggttcccttgcttctgttctggcacagtactcacctcaacagttggccgggaagaggattggagtgttctcttacggttctggcttggctgccacactctactcccttaaagtcacacaagatgccacaccaggatctgctcttgacaaaataacagcaagtttatgtgaccttaagtcaaggcttgactcaagaacgtgtgtggcaccagacgtctttgctgaaaacatgaagctcagagaggacacacatcacttagccaactatattccccagtgttcaatagattcactcttcgaaggaacatggtatctagtcagagtggatgaaaagcacagaagaacttacgcccggcgtccctccacaaatgaccacagtttggatgaaggagtgggacttgtgcattcaaacacagctacagagcatattccaagcccggctaagaaagtgccaagacttcctgcgacctcgggcgaacctgagtcggctgtcatcagtaacggggagcactgagagccgtggccttcacagaggctcggggctggatggggtatgggaaacgttagaggaatggatgtcttgggacaattttacagattacgtgttgcttaaaaatgtaatgtaactgacacagagcccagaaaactgttgtgtttttggagaagtctcgctgagctcctaacacacttcctgctgtgggctggccaatggtgaatgtactgcgatggtgttaagggctctgcagaacgtcatacctcgctgcatgtttacacgcatgcgggttaggcttcaaactcggtctgaactgagtgcttctgactgcaaaggcagaggtactgctgtccagtttaaaaaattgttttttttttttttaatgtgtaagaatttttatacttaaataaaaaaaagtacctgtagcttttgggggaaaaaaaaaaacctttttctaggttggggattgtggaatttaaatgttacacataaactctgcttaatggcaaggcaaacatttatctttttcgaagatttataaatcctgaagagaaaaaaagagggtatggttctaggatctggatgaaccatcagtgagaaaggttagtcataatcaagtgagcagaaggatgctggcgttgagcaggcctctgtcacagcaaccagggctctgtgggcacagctgagggaactttctggccaggtgcccgtgactgctgctcagctgcactgagatgcagtggagctgctgcacggaagcttgctgtggtgctgaacgccttacctgcggataaagtgtaaagtaggagggatgggcagggcactattaggttacagtgttacagacccaggttatagacttgacagctcaaactcaccagacacctttttccctttgtggtttgtgtattttttgtgttttgtttgtttttttttatattgttcaatttaaaaaatttagaaaattttaaccttacgttttcacatagtgtgattagccaaaaggaatttcacttcaagatctagaaatagaattcataacattttttcctaaactttgacttttaaaacaacgaaaattaccacatgagatgaacaagaaaattcattagaaagttctctgggtgatttttggtgctgaactgacatgagcctcatagactgtaaaacagaggtagttgaaactaatgtacagaactacattttttaattttatttgcatttaattctgtgaagtttcagttatctaaaataaacacataaacgtgtaatgtttcagattgcaaggtgagatgtaatgtagcatttgtaagatattcttgtcaatattaactggtaggattttgatttgtacagttttaattggttaaaatgatctcattttaacatccactgctatagatgaatgatgtaagctcagatttaatgaatggtggggaaatggtgcatgtaattttttcgcaagtatcgagagttctgtatgttttgaaaagaataatttaacgtttgggttgccaggaagggggctttcccagagtccattgccaggcgttgggcaagcctcgcaatgttggcacggagcgttaaccacaccttactaatagcaaggggaataactttgaaataaagttttagacaaata

SEQ ID NO: 946 - protein, 520 aa, Rattus norvegicus
  ref <308>: DATABASE ACCESSION NUMBER: Refseq / NP_058964
  ref <309>: DATABASE ENTRY DATE: 2003-01-14
MPGSLPLNAEACWPKDVGIVALEIYFPSQYVDQAELEKYDGVDAGKYTIGLGQARMGFCTDREDINSLCLTVVQKLMERNSLSYDCIGRLEVGTETIIDKSKSVKSNLMQLFEESGNTDIEGIDTTNACYGGTAAVFNAVNWIESSSWDGRYALVVAGDIAIYASGNARPTGGVGAVALLIGPNAPVIFDRGLRGTHMQHAYDFYKPDMLSEYPVVDGKLSIQCYLSALDRCYSVYRKKIRAQWQKEGKDKDFTLNDFGFMIFHSPYCKLVQKSLARMFLNDFLNDQNRDKNSIYSGLEAFGDVKLEDTYFDRDVEKAFMKASAELFNQKTKASLLVSNQNGNMYTSSVYGSLASVLAQYSPQQLAGKRIGVFSYGSGLAATLYSLKVTQDATPGSALDKITASLCDLKSRLDSRTCVAPDVFAENMKLREDTHHLANYIPQCSIDSLFEGTWYLVRVDEKHRRTYARRPSTNDHSLDEGVGLVHSNTATEHIPSPAKKVPRLPATSGEPESAVISNGEH

SEQ ID NO: 947 - DNA, 498 bp, Rattus norvegicus
  ref <308>: DATABASE ACCESSION NUMBER: EMBL / X53504
  ref <309>: DATABASE ENTRY DATE: 1993-09-12
atgccgcccaagttcgaccccaacgagatcaaagtcgtgtacttgaggtgcaccggaggcgaggtcggcgccacatccgccttggcccctaagatcggtcctctgggtctgtctcccaaaaaagttggtgatgacatcgccaaggctaccggtgactggaaaggcctcaggattacagtgaaactgaccatccagaacagacaggcccagattgaggtggtgccctctgcctctgccctgatcatcaaagccctcaaggagccaccaagagacaggaagaagcagaaaaacattaaacacaatggaaacatcacttttgatgagattgtcaacattgcccggcagatgagacaccggtctttggccagagaactttctggaactatcaaggagatcctgggtactgcacagtctgtgggctgcaatgtggacggccgccaccctcatgacatcatagatgacatcaacagtggtgcggtggagtgcccagctagttaa

SEQ ID NO: 948 - DNA, 3221 bp, Rattus norvegicus
  ref <308>: DATABASE ACCESSION NUMBER: Refseq / NM_080689
  ref <309>: DATABASE ENTRY DATE: 2003-01-13
gaattcccggctgccgggatcgcaacccgccgggcccgccgcaaccatgggcaaccgcggcatggaagacctcatcccgctggttaaccggttacaggacgccttctctgccatcggccagaacgcggacctcgacttgccgcagatcgccgtggtaggcggccagagcgccggcaagagctcggtgctggagaatttcgtgggcagggacttcttgccccgaggatccggcatcgtcacccggcgtcccctggtcctgcagctggttaattctaccacagaatatgccgagttcctgcactgcaaggggaagaaattcaccgacttcgaggaggtgcgcctggagatcgaggctgagaccgaccgagtcactggcaccaacaagggcatttcgcctgtgcccatcaacctgcgggtctactcaccccatgtgctcaacctgactctagtggacctgccaggaatgaccaaggtcccagttggggaccaacctcctgacatcgagttccagatccgggacatgcttatgcagtttgtcactaaggagaactgccttatcctggctgtgtcccctgccaactcggacctggccaactctgatgccctcaagatcgccaaggaggtggacccccagggtcagcgcaccattggggtcatcaccaagttggacctgatggacgagggcacagatgctcgggatgtgctggagaacaagctgctcccattgcgcagaggctacattggcgtggtgaaccggagccagaaggacatagatggcaagaaggatatcacagccgccttggctgccgagcgcaaattcttcctctcccacccatcctaccgccacttggctgaccgcatgggcacaccctacctgcagaaggtcctcaaccagcaactgaccaaccacatccgggacacgctgccgggacttcggaacaaactgcagagccagctgctgtccattgagaaggaggtggacgagtacaagaacttccgaccggatgacccagcgcgcaagaccaaggccctgctgcagatggtccagcagtttgcagtggacttcgagaagcgcattgagggttctggagaccagatcgacacttatgaactgtcaggtggagcccgcattaaccggatcttccacgaacgcttcccttttgagctggttaagatggagtttgatgagaaggaactgcgaagggagatcagctacgctatcaagaacattcatggcatcaggacaggcctcttcactcctgacctcgcttttgaagccacagtgaaaaagcaggtgcagaagctcaaagagcccagtatcaagtgtgtggacatggtagtcagtgagctcacgtccaccatcagaaagtgtagtgaaaagctccagcaatacccccgtctgcgggaggaaatggaacgaattgtgaccacccacatccgagaacgtgagggccgcaccaaggagcaggtcatgcttctcatcgacattgagttggcttacatgaataccaaccatgaagacttcataggctttgccaatgctcagcagagaagcaaccagatgaacaagaagaagacttcagggaaccaggatgagattctggtcattcgaaaggggtggctgaccatcaacaacatcggcatcatgaagggaggctccaaggagtactggtttgtgttgactgctgagaatctgtcctggtacaaggacgatgaggagaaagagaagaagtacatgctgtctgtggataatctgaagctgcgtgatgtggagaagggcttcatgtcaagcaagcatatttttgccctcttcaacactgagcagaggaatgtctacaaggattaccggcagctggaactggcctgtgagacacaggaggaggtggacagttggaaggcttcctttctgagggctggcgtgtaccctgagcgtgttggggacaaggagaaagccagtgagactgaggagaacggctctgacagcttcatgcactccatggaccctcagctggagcgccaggtggagaccatccggaacctggtagactcgtacatggccattgtcaacaagactgtacgggatctcatgcccaagaccatcatgcacctcatgatcaacaataccaaggagtttatcttctctgagctgctggccaacctgtactcttgcggggaccagaacacgctgatggaagaatcggccgaacaggctcagcggcgcgacgagatgctgcgtatgtaccacgcactgaaggaggcgctcagcattatcggcgacatcaacacgaccaccgtcagcacgcccatgcccccgcccgtggacgactcctggctgcaggtgcagagcgtaccggccggacgcaggtcgcccacgtccagccccacgccgcagcgccgagcccccgccgtgcccccagcccggcccgggtcgcggggccctgctcctgggcctccgcctgctggatccgccctggggggggctccccccgtgccctccaggccgggggcttcccctgacccctttggcccccctccccaggtgccctcgcgccccaaccgcgccccgcctggggtccccagaatcactatcagtgacccctgaggagtgtcagctacgccgatcgggtcaggcaagtccgtcccgtcctgagagccccaggccccccttcgacctctaaccagatccctcctactcctcggagacctcccttatcaagcctgcctggacagctgttctgtgacttgacagtggctcccccgaccccaaagcgtcctattcatcatctgtgacttagtctgttgtagtggtgagctgatacatccaaatgtgatgttggtgaaaacttgtgcccctctgtggtattgctcctgcgacattctataaatatctataaatatacctatatatacatatatatacatatatatggctgacacagcctcgcctgtagtgtcagaatcaaccaccatgctgtccttgtggagtcctgtggtccaactacaagggaacgctgtcatcctgacatcccccctccaatgtgccacctccagtgagcctccctgtcccttggcctgtggacagccatccccttggccatccccaccctgcacaaggggatgctgcaccagcagctgtgcggttctctgatggccaccagtcttgctgtctcttggctgagaataaaacccatttctggacaatggggaaaaaaaaggaattc

SEQ ID NO: 949 - protein, 851 aa, Rattus norvegicus
  ref <308>: DATABASE ACCESSION NUMBER: Refseq / NP_542420
  ref <309>: DATABASE ENTRY DATE: 2003-01-13
MGNRGMEDLIPLVNRLQDAFSAIGQNADLDLPQIAVVGGQSAGKSSVLENFVGRDFLPRGSGIVTRRPLVLQLVNSTTEYAEFLHCKGKKFTDFEEVRLEIEAETDRVTGTNKGISPVPINLRVYSPHVLNLTLVDLPGMTKVPVGDQPPDIEFQIRDMLMQFVTKENCLILAVSPANSDLANSDALKIAKEVDPQGQRTIGVITKLDLMDEGTDARDVLENKLLPLRRGYIGVVNRSQKDIDGKKDITAALAAERKFFLSHPSYRHLADRMGTPYLQKVLNQQLTNHIRDTLPGLRNKLQSQLLSIEKEVDEYKNFRPDDPARKTKALLQMVQQFAVDFEKRIEGSGDQIDTYELSGGARINRIFHERFPFELVKMEFDEKELRREISYAIKNIHGIRTGLFTPDLAFEATVKKQVQKLKEPSIKCVDMVVSELTSTIRKCSEKLQQYPRLREEMERIVTTHIREREGRTKEQVMLLIDIELAYMNTNHEDFIGFANAQQRSNQMNKKKTSGNQDEILVIRKGWLTINNIGIMKGGSKEYWFVLTAENLSWYKDDEEKEKKYMLSVDNLKLRDVEKGFMSSKHIFALFNTEQRNVYKDYRQLELACETQEEVDSWKASFLRAGVYPERVGDKEKASETEENGSDSFMHSMDPQLERQVETIRNLVDSYMAIVNKTVRDLMPKTIMHLMINNTKEFIFSELLANLYSCGDQNTLMEESAEQAQRRDEMLRMYHALKEALSIIGDINTTTVSTPMPPPVDDSWLQVQSVPAGRRSPTSSPTPQRRAPAVPPARPGSRGPAPGPPPAGSALGGAPPVPSRPGASPDPFGPPPQVPSRPNRAPPGVPRITISDP

SEQ ID NO: 950 - DNA, 3187 bp, Homo sapiens
  ref <308>: DATABASE ACCESSION NUMBER: Refseq / NM_004408
  ref <309>: DATABASE ENTRY DATE: 2000-11-01
cgcccggagtcggagccgggagcgctagcggcagccggatcgcagcctgcggggcccgccgcagccatgggcaaccgcggcatggaagatctcatcccgctggtcaaccggctgcaagacgccttctctgccatcggccagaacgcggacctcgacctgccgcagatcgctgtggtgggcggccagagcgccggcaagagctcggtgctcgagaatttcgtaggcagggacttcttgcctcgaggatctggcattgtcacccgacgtcccctggtcttgcagctggtcaatgcaaccacagaatatgccgagttcctgcactgcaagggaaagaaattcaccgacttcgaggaggtgcgccttgagatcgaggccgagaccgacagggtcaccggcaccaacaagggcatctcgccggtgcctatcaacctccgcgtctactcgccgcacgtgctgaacctgaccctggtggacctgcccggaatgaccaaggtcccggtgggggaccaacctcccgacatcgagttccagatccgagacatgcttatgcagtttgtcaccaaggagaactgcctcatcctggccgtgtcccccgccaactctgacctggccaattctgacgccctcaaggtcgccaaggaggtggacccccagggccagcgcaccatcggggtcatcaccaagctggacctgatggacgagggcacagatgcccgtgatgtgctggagaacaagctgctccccctgcgcagaggctacattggagtggtgaaccggagccagaaggacattgatggcaagaaggacattaccgccgccttggctgctgaacgaaagttcttcctctcccatccatcttatcgccacttggctgaccgtatgggcacgccctacctgcagaaggtcctcaatcagcaactgacgaaccacatccgggacacactgccggggctgcggaacaagctgcagagccagctactgtccattgagaaggaggtggaggaatacaagaacttccgccctgatgacccagctcgcaagaccaaggccctgctgcagatggtccagcagtttgccgtagactttgagaagcgcattgagggctcaggagatcagatcgacacctacgaactgtcagggggagcccgcattaaccgaatcttccacgagcgcttccctttcgagctggtcaagatggagtttgatgagaaggaactccgaagggagatcagctatgctatcaagaatatccatggcattagaacggggctgtttaccccagacatggcctttgagaccattgtgaaaaagcaggtgaagaagatccgagaaccgtgtctcaagtgtgtggacatggttatctcggagctaatcagcaccgttagacagtgcaccaagaagctccagcagtacccgcggctacgggaggagatggagcgcatcgtgaccacccacatccgggagcgcgagggccgcactaaggagcaggtcatgcttctcatcgatatcgagctggcttacatgaacaccaaccatgaggacttcataggctttgccaatgctcagcagaggagcaaccagatgaacaagaagaagacttcagggaaccaggatgagattctggtcatccgcaagggctggctgactatcaataatattggcatcatgaaagggggctccaaggagtactggtttgtgctgactgctgagaatctgtcctggtacaaggatgatgaggagaaagagaagaaatacatgctgtctgtggacaacctcaagctgcgggacgtggagaagggctttatgtcgagcaagcatatctttgccctctttaacacggagcagaggaatgtctacaaggattatcggcagctggagctagcctgtgagacacaggaggaggtggacagctggaaggcctccttcctgagggctggcgtgtaccctgagcgtgttggggacaaagagaaagccagcgagaccgaggagaatggctccgacagcttcatgcattccatggacccacagctggaacggcaagtggagaccatccggaatcttgtggactcatacatggccattgtcaacaagaccgtgagggacctcatgcccaagaccatcatgcacctcatgattaacaataccaaggagttcatcttctcggagctgctggccaacctgtactcgtgtggggaccagaacacgctgatggaggagtcggcggagcaggcacagcggcgcgacgagatgctgcgcatgtaccacgcactgaaggaggcgctcagcatcatcggcaacatcaacacgaccaccgtcagcacgcccatgcccccgcccgtggacgactcctggctgcaggtgcagagcgtaccggccggacgcaggtcgcccacgtccagccccacgccgcagcgccgagcccccgccgtgcccccagcccggcccgggtcgcggggccctgctcctgggcctccgcctgctgggtccgccctggggggggcgccccccgtgccctccaggccgggggcttcccctgaccctttcggccctccccctcaggtgccctcgcgccccaaccgcgccccgcccggggtccccagccgatcgggtcaggcaagtccatcccgtcctgagagccccaggccccccttcgacctctaaacagatccctcctcttctcggagacctccctttccaagcctgcctggacggctgttctgtgacttgacagtggctcccccagccccaaagccagcccccttcatctgtgacttaatctgttgtagtggtgagctgatacattcaggtgtgaccgttggtgaaaacttgtgccccttctgtggtatgcccttgccctgttctataaatatctataaatactcatatatatacacacctacacatggccaaccgcctcgcctctagcgctgggaatcagtcactgtgctatccttgtggagtcttgtggcccaactaccagagaacgctgtcccccgacatcccactccaaagtgtgccacctccagtgagcctccttgtcatgcccggcctgtggacagccagcccccgccatccctcccaccccctaccaagcatgggggtgctgtgcaggcagccgtgtggcctgacagtttctaccagtcctgctgtccctcggctgagaataaaacccatttctggatgatgg

SEQ ID NO: 951 - protein, 864 aa, Homo sapiens
  ref <308>: DATABASE ACCESSION NUMBER: Refseq / NP_004399
  ref <309>: DATABASE ENTRY DATE: 2000-11-01
MGNRGMEDLIPLVNRLQDAFSAIGQNADLDLPQIAVVGGQSAGKSSVLENFVGRDFLPRGSGIVTRRPLVLQLVNATTEYAEFLHCKGKKFTDFEEVRLEIEAETDRVTGTNKGISPVPINLRVYSPHVLNLTLVDLPGMTKVPVGDQPPDIEFQIRDMLMQFVTKENCLILAVSPANSDLANSDALKVAKEVDPQGQRTIGVITKLDLMDEGTDARDVLENKLLPLRRGYIGVVNRSQKDIDGKKDITAALAAERKFFLSHPSYRHLADRMGTPYLQKVLNQQLTNHIRDTLPGLRNKLQSQLLSIEKEVEEYKNFRPDDPARKTKALLQMVQQFAVDFEKRIEGSGDQIDTYELSGGARINRIFHERFPFELVKMEFDEKELRREISYAIKNIHGIRTGLFTPDMAFETIVKKQVKKIREPCLKCVDMVISELISTVRQCTKKLQQYPRLREEMERIVTTHIREREGRTKEQVMLLIDIELAYMNTNHEDFIGFANAQQRSNQMNKKKTSGNQDEILVIRKGWLTINNIGIMKGGSKEYWFVLTAENLSWYKDDEEKEKKYMLSVDNLKLRDVEKGFMSSKHIFALFNTEQRNVYKDYRQLELACETQEEVDSWKASFLRAGVYPERVGDKEKASETEENGSDSFMHSMDPQLERQVETIRNLVDSYMAIVNKTVRDLMPKTIMHLMINNTKEFIFSELLANLYSCGDQNTLMEESAEQAQRRDEMLRMYHALKEALSIIGNINTTTVSTPMPPPVDDSWLQVQSVPAGRRSPTSSPTPQRRAPAVPPARPGSRGPAPGPPPAGSALGGAPPVPSRPGASPDPFGPPPQVPSRPNRAPPGVPSRSGQASPSRPESPRPPFDL

SEQ ID NO: 952 - DNA, 545 bp, Rattus norvegicus
  ref <308>: DATABASE ACCESSION NUMBER: EMBL / X56325
  ref <309>: DATABASE ENTRY DATE: 1999-04-12
acattctcattctgatagactcaggaagcaatcatggtgctctctgcagctgacaaaaccaacatcaagaactgctgggggaagattggtggccatggtggtgaatatggcgaggaggccctacagaggatgttcgctgccttccccaccaccaagacctacttctctcacattgatgtaagccccggctctgcccaggtcaaggctcacggcaagaaggttgctgatgccctggccaaagctgcagaccacgtcgaagacctgcctggtgccctgtccactctgagcgacctgcatgcccacaaactgcgtgtggatcctgtcaacttcaagttcctgagccactgcctgctggtgaccttggcttgccaccaccctggggatttcacacctgccatgcacgcctctctggacaaattccttgcctctgtgagcaccgtgctgacctccaagtaccgttaagccacctcctgtcgggcttgccttctgaccaggcccttcttccgtcccttgcacctgtctttgaataaagcaaaagtaggaag

SEQ ID NO: 953 - DNA, 419 bp, Rattus norvegicus
  misc_feature (1)..(419): n=a, c, g or t
  ref <308>: DATABASE ACCESSION NUMBER: EMBL / X59375
  ref <309>: DATABASE ENTRY DATE: 1996-07-22
atgcctctggctagagatctattacacccttccttggaagaggaaaagaaaaaacataagaagaaacggctggttcagagcccaaattcttacttcatggatgtgaaatgtccaggttgctacaagattactacagttttcagccatgctcagacagtggttctttgtgtgggttgttcaaccgtgctgtgccagcccacaggagggaaagccaggctcacagaaggctgttcatttagaagaaagcaacactaatcatctatacaagttcctgaattcgtgtttttcacagaaagccttatcaactttagttactctaccaagacaatgtaattattgtttgattttataaagtctacaacaatgatctcctattttggtgtcagtttttcaataaagttttacttatgaacaagttn

SEQ ID NO: 954 - DNA, 1395 bp, Rattus norvegicus
  ref <308>: DATABASE ACCESSION NUMBER: Refseq / NM_017276
  ref <309>: DATABASE ENTRY DATE: 2003-01-14
caagcccttgtgtgcgctcctttccccgccatgaatgaggaatacgacgtgatcgtgctgggcaccggcctgacggaatgtatcctgtcggggataatgtcagtgaatggaaagaaggttcttcatatggatcagaacccatactatggaggagaaagtgcatctataacaccgctggaagatttatacaaaagatttaaattaccaggacaaccaccagcatcgatggggagaggaagagactggaatgttgacttaattcccaagttccttatggccaatggtcagttggtgaagatgctgcttttcacagaggtcactcgttatatggacttcaaagtgatcgaagggagctttgtctacaagggagggaaaatctacaaggttccttccactgaagcagaagccctggcgtctagcttaatgggactgtttgagaaacgccgcttcaggaagttcctagtttatgttgccaactttgatgaaaaagatcctagaacttttgagggtgtggatcctaagaagacctccatgagagatgtgtataagaagtttgatttgggccaggatgttatagactttactggccattctcttgcattgtacagaacagatgactacttagaccagccatgttgtgaacgattaacagaattaaacttttacagcgagtctttggcaagatatggtaaaagcccatacctctatccactttatggtccttgggaattgccacaaggatttgcaaggttaagtgctatatatggaggtacctacatgttgaataagccaattgaagaaatcattgtgcaaaatggaaaagtggttggcgtgaaatctgaaggagagattgctcgctgtaagcagctcatctgtgatcccagctatgtcaaggatcgggttgaaaaagtaggccaggtaatcagagtgatctgtatccttagccaccccatcaagaacaccaacgatgctaactcctgccagatcatcattccacagaaccaagtcaaccgcaagtcagatatctatgtttgcatgatctcctttgcacataatgtggcagcacagggcaagtatattgccattgtaagtacaactgtggagactaaggaaccagagaaagaaatcagaccagctttggagctcttggaaccaattgaacaaaaatttgtcagcatcagcgacctctttgtacctaaagatttgggaacagatagtcagatctttatttcccgtgcctatgatgctaccacacactttgagacaacctgtgatgacatcaaagatatctataagaggatgacagggtctgagtttgactttgaagaaatgaagcgcaagaagaatgacatttatggagaagactaacagcagtacatattatgtaattaggac

SEQ ID NO: 955 - protein, 445 aa, Rattus norvegicus
  ref <308>: DATABASE ACCESSION NUMBER: Refseq / NP_058972
  ref <309>: DATABASE ENTRY DATE: 2003-01-14
MNEEYDVIVLGTGLTECILSGIMSVNGKKVLHMDQNPYYGGESASITPLEDLYKRFKLPGQPPASMGRGRDWNVDLIPKFLMANGQLVKMLLFTEVTRYMDFKVIEGSFVYKGGKIYKVPSTEAEALASSLMGLFEKRRFRKFLVYVANFDEKDPRTFEGVDPKKTSMRDVYKKFDLGQDVIDFTGHSLALYRTDDYLDQPCCERLTELNFYSESLARYGKSPYLYPLYGPWELPQGFARLSAIYGGTYMLNKPIEEIIVQNGKVVGVKSEGEIARCKQLICDPSYVKDRVEKVGQVIRVICILSHPIKNTNDANSCQIIIPQNQVNRKSDIYVCMISFAHNVAAQGKYIAIVSTTVETKEPEKEIRPALELLEPIEQKFVSISDLFVPKDLGTDSQIFISRAYDATTHFETTCDDIKDIYKRMTGSEFDFEEMKRKKNDIYGED

SEQ ID NO: 956 - DNA, 2274 bp, Homo sapiens
  ref <308>: DATABASE ACCESSION NUMBER: Refseq / NM_001494
  ref <309>: DATABASE ENTRY DATE: 2000-10-31
ggcggtcggtctcgccttgtcgccagctccattttcctctctttctcttcccctttccttcgcgcccaagagcgcctcccagcctcgtagggtggtcacggagcccctgcgccttttccttgctcgggtcctgcgtccgcgcctgccccgccatgaatgaggagtacgacgtgatcgtgctgggcaccggcctgacggaatgtatcctgtcaggtataatgtcagtgaatggcaagaaagttcttcatatggatcgaaacccttactacggaggagaaagtgcatctataacaccattggaagatttatacaaaagatttaaaataccaggatcaccacccgagtcaatggggagaggaagagactggaatgttgacttgattcccaagttccttatggctaatggtcagctggttaagatgctgctttatacagaggtaactcgctatctggattttaaagtgactgaagggagctttgtctataagggtggaaaaatctacaaggttccttccactgaagcagaagccctggcatctagcctaatgggattgtttgaaaaacgtcgcttcaggaaattcctagtgtatgttgccaacttcgatgaaaaagatccaagaacttttgaaggcattgatcctaagaagaccacaatgcgagatgtgtataagaaatttgatttgggtcaagacgttatagattttactggtcatgctcttgcactttacagaactgatgattacttagatcaaccgtgttatgaaaccattaatagaattaaactttacagtgaatctttggcaagatatggcaaaagcccatacctttatccactctatggccttggagaactgccccaaggatttgcaaggctaagtgctatttatggaggtacctatatgctgaataaacccattgaagaaatcattgtacagaatggaaaagtaattggtgtaaaatctgaaggagaaattgctcgctgtaagcagctcatctgtgaccccagctacgtaaaagatcgggtagaaaaagtgggccaggtgatcagagttatttgcatcctcagccaccccatcaagaacaccaatgatgccaactcctgccagatcattattccacagaaccaagtcaatcgaaagtcagatatctacgtctgcatgatctcctttgcgcacaatgtagcagcacaagggaagtacattgctatagttagtacaactgtggaaaccaaggagcctgagaaggaaatcagaccagctttggagctcttggaaccaattgaacagaaatttgttagcatcagtgacctcctggtaccaaaagacttgggaacagaaagccagatctttatttcccgcacatatgatgccaccactcattttgagacaacgtgtgatgacattaaaaacatctataagaggatgacaggatcagagtttgactttgaggaaatgaagcgcaagaagaatgacatctatggggaagactaacagcagtacatgttattatgtaattaggacacatttaaaatttggcaaataatgcatataatgaaatcaatattgtaaggcctgcttttgtaatgaaaatggagagaatgaagagcgctgtgccagtaaatactccccttcacctttctaattattaacttgttttcatggagtggctattcagcattggcagttaccacattctgttcaatttaaccaaactggcttttttttttttctagtgaagttaaacaaacattgggataccgacacagacaacttgagacagtttttttaatcttttaatcagtgtagctatgtgctgctgctgctcaagagctggatccatacaggttgtgtgtcatctgtcctcttgaggttcaggagattctaaattgaatattccacggtttgggacagcatccggaagttttccctatgactttatattttgtattatgtcaaatgttatggcagggcccaaatagcatagccacaagtttggtttatgtgggcataaaattctaaccaaaccccagacatagggagtcatttggagaaagcctgtatgtggtgttttaacctaataaagttgatgagagagaaggggagaggaagcgaacataaagcgggtcaagtgtagtgcatcttttgtatctcaggcgtggcttcttcagtggaccaagctgcaatgcagtattgacttgacagagcctctacttctgtctcaaaatggctccaaatgatttctgtactgcaaaataaagccaaattctggaaacta

SEQ ID NO: 957 - protein, 445 aa, Homo sapiens
  ref <308>: DATABASE ACCESSION NUMBER: Refseq / NP_001485
  ref <309>: DATABASE ENTRY DATE: 2000-10-31
MNEEYDVIVLGTGLTECILSGIMSVNGKKVLHMDRNPYYGGESASITPLEDLYKRFKIPGSPPESMGRGRDWNVDLIPKFLMANGQLVKMLLYTEVTRYLDFKVTEGSFVYKGGKIYKVPSTEAEALASSLMGLFEKRRFRKFLVYVANFDEKDPRTFEGIDPKKTTMRDVYKKFDLGQDVIDFTGHALALYRTDDYLDQPCYETINRIKLYSESLARYGKSPYLYPLYGLGELPQGFARLSAIYGGTYMLNKPIEEIIVQNGKVIGVKSEGEIARCKQLICDPSYVKDRVEKVGQVIRVICILSHPIKNTNDANSCQIIIPQNQVNRKSDIYVCMISFAHNVAAQGKYIAIVSTTVETKEPEKEIRPALELLEPIEQKFVSISDLLVPKDLGTESQIFISRTYDATTHFETTCDDIKNIYKRMTGSEFDFEEMKRKKNDIYGED

SEQ ID NO: 958 - DNA, 678 bp, Rattus norvegicus
  ref <308>: DATABASE ACCESSION NUMBER: EMBL / X76489
  ref <309>: DATABASE ENTRY DATE: 1995-05-15
atgccggtcaaaggaggtagcaagtgcatcaaatacctgctctttggatttaacttcatcttctggctcgccggcatcgcagtgcttgccattggactatggctgcggttcgactctcagaccaagagcatcttcgagcaagaaactaatcattccagcttctacacaggagtgtacattctgattggagctggggccctcatgatgctagttggtttcctgggctgctgtggagctgtacaagagtcacagtgcatgctgggattgttcttcggattcctcttggtgatattcgccattgagatcgccgcagccgtctggggctatacccacaaggacgaggtgattaaagaactccaggagttttacaaggacacctaccaaaagttaaggaacaaggatgagccccagcgggaaacactcaaagccatccatatggcgttgaactgctgtggcatagctggtggtgtggagcagtttatctcggacatctgccccaaaaagcaggttctggaatccttccaggttaagtcctgcccggatgccatcgatgaggtcttccacagcaagttccacatcattggagcagtgggcatcggtatcgccgtggtgatgatcttcggtatgattttcagcatgattctgtgctgcgccatccgcaggagccgagaaatggtc

SEQ ID NO: 959 - DNA, 2739 bp, Rattus norvegicus
  ref <308>: DATABASE ACCESSION NUMBER: Refseq / NM_024156
  ref <309>: DATABASE ENTRY DATE: 2003-01-13
ggaattcccgtctatctgtctgccctgatccgaggcctccccagagcgtggtttctgctgcagaacctgagaccatggccaaaatagcacagggtgccatgtaccgaggctctgtccacgacttcgcagactttgatgcaaatcaggatgccgaggctttgtacacagccatgaagggcttcggcagtgacaaggagtccatattggagctgatcacctcccgcagcaacaagcagaggcaggagatctgccagagttacaagtccctctatggcaaggacctcatcgcagacttgaagtatgagttgacagggaagttcgagcgactgatagtgaacctgatgaggccgcttgcctattgtgacgccaaagagattaaagacgctatctcgggcattggcactgatgagaagtgcctcattgaaattttggcttcccggaccaatgagcagatacaccagctggtggccgcatacaaagatgcctatgagagagacctggagtctgacatcattggagacacttcaggccacttccagaagatgctggtggtactgctccagggaacccgggagaatgacgatgttgtgagtgaggacttggtccagcaggatgtccaggacctgtatgaggcaggggaattgaaatggggaacagatgaggcccagttcatctatatcttgggaaaccgtagcaaacagcacctacgattggtgtttgatgagtacctgaagaccacagggaagcccatcgaagccagtatcagaggggagctgtctggagactttgagaagctgatgttggccgtggtgaagtgcatccgaagtaccccggagtattttgctgaaaggctgttcaaagccatgaagggcctggggactcgagacaacactctgatccgtatcatggtctccaggagcgaactggatatgcttgacatccgggagatcttccggaccaagtatgagaagtcactctacagcatgatcaagaatgatacctctggtgaatacaagaaggctttgctgaagctatgtggaggggacgatgatgccgctggccagttcttcccggaggcagcacaggtggcctatcagatgtgggaacttagtgcagtgtcccgagtcgagctgaagggtaccgtgcgtgcggccaacgatttcaaccccgatgctgatgccaaaggcctgcggaaagccatgaagggaattggaaccgacgaagccaccatcatcgacatcatcacacagcgcagcaatgtccagcggcagcagatccggcagaccttcaaatctcactttggccgggatttaatggccgacctgaagtccgagatctcaggagacctggcaaggctgatcctggggctcatgatgccacctgcccattacgatgctaagcagctgaagaaagctatggagggagccggcacagatgaaaaggctcttatagaaatcctggccacccggaccaatgctgaaatccgagccatcaatgaggcctacaaggaggattatcacaagtccctggaggatgccctgagctcggacacatctggccacttcaaaaggatcctcatttctctggccacagggaatcgagaggaaggaggagaaaaccgggaccaggctcaggaagatgctcaggtggctgctgagatcttggaaatagcagacacacccagtggagacaaaacctccttggagactcgattcatgaccgtcctgtgcacccgtagctatccccacctgcgcagagtcttccaggagttcatcaagaaaaccaactatgacatagagcatgtcatcaagaaggagatgtctggggacgtcaaggacgcatttgtggccatcgttcagagtgtcaagaacaagcctctcttctttgctgacaaactgtacaagtccatgaagggtgccggcacggatgagaagaccctcaccagggtgatggtgtcccggagtgagatagacctgctcaacatccggagggaattcattgagaaatatgacaagtctccacaccaagccattgaaggtgacacctctggagacttcatgaaggctttgctggcgctctgtggtggagaagactaaaactcatggccttggagggtccccctgccatgcagtggccaaccgcaccagccaccgtgacctgaccaagccattgctccagcttcagagactaaggaagaagtgaggggtggagttggactgtgatccggctggggtgctctcttgccattgagggtcccaggcggtcccttctgttatccctcctgctcatggctaagtggctggtgaaccacagccatatatgcattcaaccctgctccccgtctgcctccttctccgcccaccctagcttccatccctccacacgaatccctgcctgatttaagctttgtcacatctctaaacacctccttggatggagccaccctgcccccagccctgaacagccgggggagggtagagagttcctcagagctggctcccagctgtgtccatcattggagtggcagcaggcaggtttcatacagtgctgtggactcgagaagccgttacactggactggaatggtggacagttgggtcacttactggaccccaatggagaaaagtgtgtcaccactcctcgccaagtctctgcttgtcttttccaataaattcggaaaagtggatcaagaataccttggcagggaataggggggcaaagtttagaacagagggaattc

SEQ ID NO: 960 - protein, 673 aa, Rattus norvegicus
  ref <308>: DATABASE ACCESSION NUMBER: Refseq / NP_077070
  ref <309>: DATABASE ENTRY DATE: 2003-01-13
MAKIAQGAMYRGSVHDFADFDANQDAEALYTAMKGFGSDKESILELITSRSNKQRQEICQSYKSLYGKDLIADLKYELTGKFERLIVNLMRPLAYCDAKEIKDAISGIGTDEKCLIEILASRTNEQIHQLVAAYKDAYERDLESDIIGDTSGHFQKMLVVLLQGTRENDDVVSEDLVQQDVQDLYEAGELKWGTDEAQFIYILGNRSKQHLRLVFDEYLKTTGKPIEASIRGELSGDFEKLMLAVVKCIRSTPEYFAERLFKAMKGLGTRDNTLIRIMVSRSELDMLDIREIFRTKYEKSLYSMIKNDTSGEYKKALLKLCGGDDDAAGQFFPEAAQVAYQMWELSAVSRVELKGTVRAANDFNPDADAKGLRKAMKGIGTDEATIIDIITQRSNVQRQQIRQTFKSHFGRDLMADLKSEISGDLARLILGLMMPPAHYDAKQLKKAMEGAGTDEKALIEILATRTNAEIRAINEAYKEDYHKSLEDALSSDTSGHFKRILISLATGNREEGGENRDQAQEDAQVAAEILEIADTPSGDKTSLETRFMTVLCTRSYPHLRRVFQEFIKKTNYDIEHVIKKEMSGDVKDAFVAIVQSVKNKPLFFADKLYKSMKGAGTDEKTLTRVMVSRSEIDLLNIRREFIEKYDKSPHQAIEGDTSGDFMKALLALCGGED

SEQ ID NO: 961 - DNA, 2510 bp, Homo sapiens
  ref <308>: DATABASE ACCESSION NUMBER: Refseq / NM_004033
  ref <309>: DATABASE ENTRY DATE: 2001-02-03
gccacgtgtccggctcggagcccacggctgtcctcccggtccgcgccgctgcggttgctgctgggctaacgggctccgatccagcgagcgctgcgtcctcgagtccgcccgtgcgggcgcagggacccgaggcctccgctgcggctggattctgctgcgaaccggagaccatggccaaaccagcacagggtgccaagtaccggggctccatccatgacttcccaggctttgaccccaaccaggatgccgaggctctgtacactgccatgaagggctttggcagtgacaaggaggccatactggacataatcacctcacggagcaacaggcagaggcaggaggtctgccagagctacaagtccctctacggcaaggacctcattgctgatttaaagtatgaattgacgggcaagtttgaacggttgattgtgggcctgatgaggccacctgcctattgtgatgccaaagaaattaaagatgccatctcgggcattggcactgatgagaagtgcctcattgagatcttggcttcccggaccaatgagcagatgcaccagctggtggcagcatacaaagatgcctacgagcgggacctggaggctgacatcatcggcgacacctctggccacttccagaagatgcttgtggtcctgctccagggaaccagggaggaggatgacgtagtgagcgaggacctggtacaacaggatgtccaggacctatacgaggcaggggaactgaaatggggaacagatgaagcccagttcatttacatcttgggaaatcgcagcaagcagcatcttcggttggtgttcgatgagtatctgaagaccacagggaagccgatgaaggccagcatccgaggggagctgtctggggactttgagaagctaatgctggccgtagtgaagtgtatccggagcaccccggaatattttgctgaaaggctcttcaaggctatgaagggcctggggactcgggacaacaccctgatccgcatcatggtctcccgtagtgagttggacatgctcgacattcgggagatcttccggaccaagtatgagaagtccctctacagcatgatcaagaatgacacctctggcgagtacaagaagactctgctgaagctgtctgggggagatgatgatgctgctggccagttcttcccggaggcagcgcaggtggcctatcagatgtgggaacttagtgcagtggcccgagtagagctgaagggaactgtgcgcccagccaatgacttcaaccctgacgcagatgccaaagcgctgcggaaagccatgaagggactcgggactgacgaagacacaatcatcgatatcatcacgcaccgcagcaatgtccagcggcagcagatccggcagaccttcaagtctcactttggccgggacttaatgactgacctgaagtctgagatctctggagacctggcaaggctgattctggggctcatgatgccaccggcccattacgatgccaagcagttgaagaaggccatggagggagccggcacagatgaaaaggctcttattgaaatcctggccactcggaccaatgctgaaatccgggccatcaatgaggcctataaggaggactatcacaagtccctggaggatgctctgagctcagacacatctggccacttcaggaggatcctcatttctctggccacggggcatcgtgaggagggaggagaaaacctggaccaggcacgggaagatgcccaggaaatagcagacacacctagtggagacaaaacttccttggagacacgtttcatgacgatcctgtgtacccggacgtatccgcacctccggagagtcttccaggagttcatcaagatgaccaactatgacgtggagcacaccatcaagaaggagatgtctggggatgtcagggatgcatttgtggccattgttcaaagtgtcaagaacaagcctctcttctttgccgacaaactttacaaatccatgaagggtgctggcacagatgagaagactctgaccaggatcatggtatcccgcagtgagattgacctgctcaacatccggagggaattcattgagaaatatgacaagtctctccaccaagccattgagggtgacacctccggagacttcctgaaggccttgctggctctctgtggtggtgaggactagggccacagctttggcgggcacttctgccaagaaatggttatcagcaccagccgccatggccaagcctgattgttccagctccagagactaaggaaggggcaggggtggggggaggggttgggttgggctcttatcttcatggagcttaggaaacgctcccactcccacgggccatcgagggccagcacggctgagcggtgaaaaaccgtagccatagatcctgtccacctccactcccctctgaccctcaggctttcccagcttcctccccttgctacagcctctgccctggtttggctatgtcagatccaataaacatcctgaacctctgtctgt

SEQ ID NO: 962 - protein, 667 aa, Homo sapiens
  ref <308>: DATABASE ACCESSION NUMBER: Refseq / NP_004024
  ref <309>: DATABASE ENTRY DATE: 2001-02-03
MAKPAQGAKYRGSIHDFPGFDPNQDAEALYTAMKGFGSDKEAILDIITSRSNRQRQEVCQSYKSLYGKDLIADLKYELTGKFERLIVGLMRPPAYCDAKEIKDAISGIGTDEKCLIEILASRTNEQMHQLVAAYKDAYERDLEADIIGDTSGHFQKMLVVLLQGTREEDDVVSEDLVQQDVQDLYEAGELKWGTDEAQFIYILGNRSKQHLRLVFDEYLKTTGKPMKASIRGELSGDFEKLMLAVVKCIRSTPEYFAERLFKAMKGLGTRDNTLIRIMVSRSELDMLDIREIFRTKYEKSLYSMIKNDTSGEYKKTLLKLSGGDDDAAGQFFPEAAQVAYQMWELSAVARVELKGTVRPANDFNPDADAKALRKAMKGLGTDEDTIIDIITHRSNVQRQQIRQTFKSHFGRDLMTDLKSEISGDLARLILGLMMPPAHYDAKQLKKAMEGAGTDEKALIEILATRTNAEIRAINEAYKEDYHKSLEDALSSDTSGHFRRILISLATGHREEGGENLDQAREDAQEIADTPSGDKTSLETRFMTILCTRTYPHLRRVFQEFIKMTNYDVEHTIKKEMSGDVRDAFVAIVQSVKNKPLFFADKLYKSMKGAGTDEKTLTRIMVSRSEIDLLNIRREFIEKYDKSLHQAIEGDTSGDFLKALLALCGGED

SEQ ID NO: 963 - DNA, 715 bp, Rattus norvegicus
  ref <308>: DATABASE ACCESSION NUMBER: Refseq / NM_022949
  ref <309>: DATABASE ENTRY DATE: 2003-01-13
tctcgctgagcccgccaacatggtgttcaggcgtttcgtggaggttggccgagtggcctacatctcctttgggccccatgctggaaagctggtcgcaatcgtagatgttattgatcaaaacagggctttagtggatggaccctgcacccgggtgaggagacaggccatgcctttcaaatgcatgcagctcactgacttcatcctcaagttcccacacagtgcgcgccagaagtatgtacggaaagcttgggagaaggcagacatcaatacaaagtgggccgccacacgatgggccaagaaaattgatgccagagaaaggaaagccaagatgacagattttgatcggttcaaagtcatgaaggcaaagaaaatgaggaacagaataatcaagactgaagtgaagaaactccagagagctgctctcctgaaagcttctcctaaaaaagctgctgttgctaaggctgccattgcggccgctgcagcagctaaagccaaggtcccagccaagaaggcaacaggaccaggccagaaggccgcagcgcagaaggcctctgcacagaaggctgcaggccagaaggcagcgccccctgctaaaggtcagaagggtcagaagaccccggcccagaaggcacctgctccaaaggcagctggcaagaaagcatgaggaggctacacaaagaataaaggttctttttgactgaaaaaaaaaaaaaaa

SEQ ID NO: 964 - protein, 214 aa, Rattus norvegicus
  ref <308>: DATABASE ACCESSION NUMBER: Refseq / NP_075238
  ref <309>: DATABASE ENTRY DATE: 2003-01-13
MVFRRFVEVGRVAYISFGPHAGKLVAIVDVIDQNRALVDGPCTRVRRQAMPFKCMQLTDFILKFPHSARQKYVRKAWEKADINTKWAATRWAKKIDARERKAKMTDFDRFKVMKAKKMRNRIIKTEVKKLQRAALLKASPKKAAVAKAAIAAAAAAKAKVPAKKATGPGQKAAAQKASAQKAAGQKAAPPAKGQKGQKTPAQKAPAPKAAGKKA

SEQ ID NO: 965 - DNA, 1774 bp, Homo sapiens
  ref <308>: DATABASE ACCESSION NUMBER: Refseq / NM_031314
  ref <309>: DATABASE ENTRY DATE: 2001-12-18
ttttgtgaagagacgaagactgagcggttgtggccgcgttgccgacctccagcagcagtcggcattctctaacgcagaaacccgggagtaggagactcagaatcgaatctcttctccctccccttcttgtgagatttttttgatcttcagctacattttcggctttgtgagaaaccttaccatcaaacacgatggccagcaacgttaccaacaagacagatcctcgctccatgaactcccgtgtattcattgggaatctcaacactcttgtggtcaagaaatctgatgtggaggcaatcttttcgaagtatggcaaaattgtgggctgctctgttcataagggctttgccttcgttcagtatgttaatgagagaaatgcccgggctgctgtagcaggagaggatggcagaatgattgctggccaggttttagatattaacctggctgcagagccaaaagtgaaccgaggaaaagcaggtgtgaaacgatctgcagcggagatgtacgggtcagtaacagaacacccttctccgtcccctctactcagctcctcttttgacttggactatgactttcaacgggactattatgataggatgtacagttacccagcacgtgtacctcctcctcctcctattgctcgggctgtagtgccctcgaaacgtcagcgtgtatcaggaaacacttcacgaaggggcaaaagtggcttcaattctaagagtggacagcggggatcttccaagtctggaaagttgaaaggagatgaccttcaggccattaagaaggagctgacccagataaaacaaaaagtggattctctcctggaaaacctggaaaaaatggaaaaggaacagagcaaacaagcagtagagatgaagaatgataagtcagaagaggagcagagcagcagctccgtgaagaaagatgagactaatgtgaagatggagtctgaggggggtgcagatgactctgctgaggagggggacctactggatgatgatgataatgaagatcggggggatgaccagctggagttgatcaaggatgatgaaaaagaggctgaggaaggagaggatgacagagacagcgccaatggaggatgactcttaagcacatagtggggtttagaaatcttatcccattatttctttacctaggcgcttgtctaagatcaaatttttcaccagatcctctcccctagtatcttcagcacatgctcactgttctccccatccttgtccttcccatgttcattaattcatattgccccgcgcctagtcccattttcacttcctttgacgctcctagtagttttgttaagtcttaccctgtaatttttgcttttaattttgatacctctttatgacttaacaataaaaaggatgtatggtttttatcaactgtctccaaaataatctcttgttatgcagggagtacagttcttttcattcatacataagttcagtagttgcttccctaactgcaaaggcaatctcatttagttgagtagctcttgaaagcagctttgagttagaagtatgtgtgttacaccctcacattagtgtgctgtgtggggcagttcaacacaaatgtaacaattatttttgtgaatgagagttggcatgtcaaatgcatcctctagaaaaataattagtgttatagtcttaagatttgttttctaaagttgatactgtgggatttttgtgaacagcctgatgtttgggaccttttttcctcaaaataaacaagtccttattaaaccaggaatttggag

SEQ ID NO: 966 - protein, 303 aa, Homo sapiens
  ref <308>: DATABASE ACCESSION NUMBER: Refseq / NP_112604
  ref <309>: DATABASE ENTRY DATE: 2001-12-18
MASNVTNKTDPRSMNSRVFIGNLNTLVVKKSDVEAIFSKYGKIVGCSVHKGFAFVQYVNERNARAAVAGEDGRMIAGQVLDINLAAEPKVNRGKAGVKRSAAEMYGSVTEHPSPSPLLSSSFDLDYDFQRDYYDRMYSYPARVPPPPPIARAVVPSKRQRVSGNTSRRGKSGFNSKSGQRGSSKSGKLKGDDLQAIKKELTQIKQKVDSLLENLEKMEKEQSKQAVEMKNDKSEEEQSSSSVKKDETNVKMESEGGADDSAEEGDLLDDDDNEDRGDDQLELIKDDEKEAEEGEDDRDSANGG

SEQ ID NO: 967 - DNA, 3704 bp, Rattus norvegicus
  ref <308>: DATABASE ACCESSION NUMBER: Refseq / NM_012859
  ref <309>: DATABASE ENTRY DATE: 2003-01-14
tagccctaacccctctcccaaagtaagaggcacagagtgatcacttggcgaggagtggggaccagcagtgaaaaacccgcggaccagctctaaagaaagaccaggaatgccaggacaaaagattagagcccaaagggaggtgccatcatgaaagatctgtgaagaggaagcctgaagggtagggggcagaaggatgaaacctaggagaccaatttctttcacaagggaaataacagctatggagccaagttctacctctgtgtctaggccagaatggagacctgaggcacagcagaccctcacagactacccaggatcaagggaactgcaggaatttggtatcccacagaaacaaagtctcccaaatgaggccactgcccagcaaggagctgaattccagcaagaacagggagttcaacaatctactctgctccagaaacttctcaccccattagccttccctgtaccacagcaatcattcccaagccacaaagtgcactcggatcaacaggaagccacctcccagaatggacctggggcggggaaagtgcatacaactcaaaaggaactagaacacagagatgaacacgtggggacagcagaatctggaccagcagaaccacctccagctacagaagtagaggctacatctatagcccaggccgtatctggaccggacaagaaactccctacccaaactgacttggtctcccaagagagagctgagcagtcagaccctacagcccagcaaacacctctagtccaaggagtcaagtctgaccagggatctttgatagagtcagggattttagcaagactgcagaaactagccatacagcagccctcccaagagtggaagacatttcttgattgtgttacagagtctgacatggagaaatacctgaattcatcctcaaagtcaaaccctccagagccaagtggtgggacagtgatcccaggaacgctgccctccaaacagaaacccgattgtggaaagatgtcaggatatggtgggaaattaccacatgggaagaaaggcatcctccagaaacacaagcactactgggatacagcctcggcattctcacacagcatggatttacgcacaatgacacagtcgctggtggcgctcgcagaagacaacatggccttcttctcaagccagggcccaggagagacagcacggcggctgtccaacgtctttgcaggtgttcgggaacaggcactggggctagaaccaactctaggtcagctcttgggtgtggcacaccatttcgacctggacactgagacaccagccaacggataccgtagcttggtgcacacagctcgttgctgcctggcacacctactacacaaatcccgctatgtggcctctaaccgcagaagtatcttcttccgtgccagccacaacctagcagaactggaggcctacctggctgccctcacccagctccgtgctctagcctactacgcccagcgcctgctgaccatcaaccgaccaggagtgctcttctttgagggcgatgagggactcagcgctgacttcctacaggactatgtcacgctacataaaggctgcttttacggtcgctgcctgggcttccagttcacacctgccatccggccgttcctgcagactctctccatcgggctggtgtccttcggggaacactacaaacgcaacgagacgggcctcagtgtgactgcaagttccctctttacgggtggccgattcgccatagacccagagttgcgtggggctgaatttgagcgcatcatacagaacctggacgtgcacttctggaaagccttctggaatatcacggagatcgaggtgctatcgtctctggccaacatggcatcaaccaccgtgagggtaagccgcctgcttagcttgccgcctgaggcctttgagatgccactaacctctgaccccaagctcacagttaccatctcacctcccttggcacacacgggaccaggccctgtgctagccaggctcatctcctatgacctgcgggaagggcaggacagcaagatgctcaacagcctggcaaaatctgagggcccacgcctggagctgcgcccacggcctcaacaagccccccgctcacgagccctggttgtccacattcacggtggtggctttgtggcacagacctccaaatcccatgagccctacctcaagaactgggcccaggagctaggcgtccccatcatctccatcgactactccctggcccctgaggcccccttcccccgagcactggaggagtgtttttttgcctactgctgggctgtcaagcactgtgaactgcttggttcaaccggagagcggatatgccttgcgggggacagcgcaggtgggaacctctgcatcaccgtgtcccttcgggcagcagcctatggggtgagggtgccagatggcatcatggcagcctacccagttaccaccctgcagtcctctgcttctccctctcgtctgctgagcctcatggatcctcttctaccactgagcgtactctccaagtgtgtgagcgcctattcagggacagagacggaggaccattttgactcagaccagaaggcattgggcgtgatggggctggtgcagagagacacgtccctgttcctcagagacctccgcctgggcgcctcctcatggctcaactccttcctggagttaagtgggcgcaagccccataagaccccattgcctgcaacagagacactgcgccccacggattctgggcgccttacggagtctatgcgcaggagtgtgtctgaggcagccctggcccagcctgagggcttgctgggcacagattccttgaagaagctaacaataaaggacttgagctttaagggcaactcagagccatcagacagccccgagatgtcacagtcaatggagacacttggcccctccacaccctcggatgtcaacttttttctgcgatccgggaattcccaggaagaggctgaaaccagagatgatataagccccatggacggaatcccccgcgtgcgcgctgccttccctgatggtttccacccacggcgctcaagccaaggtgtcctccacatgcccctctactcgtcacccatagtcaagaaccccttcatgtctcctctgctggcccctgacgtcatgctgaagaccctgccgcccgtgcaccttgtggcgtgcgctctggaccccatgctggatgactcggtcatgttcgcgcggcgactgaaggacctgggccagcccgtgacgctgaaagtggtagaggacctgccgcatggtttcctgagcttagcagccctgtgtcgtgagacccggcaggccgcggagttgtgcgtgcagcgcatccggctgatcctcaccccccctgctgcaccgctgacctgagctgggaacggcggggggcggcactaaaagacctcttgcacccttctgcgcgggcttccgtgatgagtgcgctccgagtcgggctctaggccccctcggtcgggctgggcgggagggggcgggccgtgccttaaccataagtggggcggggcaggggccaaaagctgaacctgggggagggggacgcacacacacacacctgtcaccgagacagctggacctgcactctaccactgccttctactgctgctgtgaccgaccaccgctagtcggttttgctttttgtaaataaaagttatttaat

SEQ ID NO: 968 - protein, 1068 aa, Rattus norvegicus
  ref <308>: DATABASE ACCESSION NUMBER: Refseq / NP_036991
  ref <309>: DATABASE ENTRY DATE: 2003-01-14
MKPRRPISFTREITAMEPSSTSVSRPEWRPEAQQTLTDYPGSRELQEFGIPQKQSLPNEATAQQGAEFQQEQGVQQSTLLQKLLTPLAFPVPQQSFPSHKVHSDQQEATSQNGPGAGKVHTTQKELEHRDEHVGTAESGPAEPPPATEVEATSIAQAVSGPDKKLPTQTDLVSQERAEQSDPTAQQTPLVQGVKSDQGSLIESGILARLQKLAIQQPSQEWKTFLDCVTESDMEKYLNSSSKSNPPEPSGGTVIPGTLPSKQKPDCGKMSGYGGKLPHGKKGILQKHKHYWDTASAFSHSMDLRTMTQSLVALAEDNMAFFSSQGPGETARRLSNVFAGVREQALGLEPTLGQLLGVAHHFDLDTETPANGYRSLVHTARCCLAHLLHKSRYVASNRRSIFFRASHNLAELEAYLAALTQLRALAYYAQRLLTINRPGVLFFEGDEGLSADFLQDYVTLHKGCFYGRCLGFQFTPAIRPFLQTLSIGLVSFGEHYKRNETGLSVTASSLFTGGRFAIDPELRGAEFERIIQNLDVHFWKAFWNITEIEVLSSLANMASTTVRVSRLLSLPPEAFEMPLTSDPKLTVTISPPLAHTGPGPVLARLISYDLREGQDSKMLNSLAKSEGPRLELRPRPQQAPRSRALVVHIHGGGFVAQTSKSHEPYLKNWAQELGVPIISIDYSLAPEAPFPRALEECFFAYCWAVKHCELLGSTGERICLAGDSAGGNLCITVSLRAAAYGVRVPDGIMAAYPVTTLQSSASPSRLLSLMDPLLPLSVLSKCVSAYSGTETEDHFDSDQKALGVMGLVQRDTSLFLRDLRLGASSWLNSFLELSGRKPHKTPLPATETLRPTDSGRLTESMRRSVSEAALAQPEGLLGTDSLKKLTIKDLSFKGNSEPSDSPEMSQSMETLGPSTPSDVNFFLRSGNSQEEAETRDDISPMDGIPRVRAAFPDGFHPRRSSQGVLHMPLYSSPIVKNPFMSPLLAPDVMLKTLPPVHLVACALDPMLDDSVMFARRLKDLGQPVTLKVVEDLPHGFLSLAALCRETRQAAELCVQRIRLILTPPAAPLT

SEQ ID NO: 969 - DNA, 249 bp, Rattus norvegicus
  ref <308>: DATABASE ACCESSION NUMBER: EMBL / AA684641
  ref <309>: DATABASE ENTRY DATE: 2000-03-08
cgttctcaataaatattttatttttctgacactccaccctcaatacaaaagccttctggctggagccggattgtgcgaacaggccttgccgcgggcacctgcttgcttagtccctaggcctgcggcacccagacacaaggcagtgaacgtatggctagacggagatggtactttattaagaaacagaacagcaataggtccaaaaggggcagctgcgtcacctccaggggctactccagctgctgtggg

SEQ ID NO: 970 - DNA, 541 bp, Rattus norvegicus
  misc_feature (1)..(541): n=a, c, g or t
  ref <308>: DATABASE ACCESSION NUMBER: EMBL / AA799571
  ref <309>: DATABASE ENTRY DATE: 2000-03-03
cgtcgtctcaggccttgactgcgtacttgcgcagtgggtacagccgctccttccgctgctgcttcttggtcttcagcttctcttcatgcttggtgagccggcggcgcatggctcttgtcttcttgggtcgcaggtccaggggcttgtacttctttcccttgtagaatttcctgaggttttccttttgagtctgattaatgacagtgaggacacgggcgatgtatttgcgtacgactcgtatcttgaagataaaaagtccatgaagaggttatgaagctctgtgcagagtccatcatgtcgctccagaaggacctcaccagagtcagagggaagaggaggtgcatccttggcatcagggacatgagttgttcttgtctcagttcagcanatggcaactggtcctggcagccgagatggcacgcatactgctcgtcaggctgggaatacgcttctgtgcacgcagattcacattccagtttggttcgatttanatcaatttcatcatccacgaactggcaaattgaaaacagcctgcagcctc

SEQ ID NO: 971 - DNA, 2207 bp, Homo sapiens
  ref <308>: DATABASE ACCESSION NUMBER: Refseq / NM_021188
  ref <309>: DATABASE ENTRY DATE: 2002-10-22
actgacggccggccggcttcccggaactggaaggttacattgattacccacctagtacaacatcttacgggaagagcatagtatttcctagaggaatatgaacataacaggaaggtatcattggctctgaattaaatttgaacttgtcccctgaatagctacaggttttggaagctgaatcaatgttatcagatgagttagaatccaaaccagagctcctggtacagtttgttcagaatacgtccatcccattgggacaggggcttgtagaatcagaagctaaagatattacttgcttgtccctccttcccgtgactgaagcctcagaatgcagtcggctaatgttaccagatgatactacaaatcattctaactcctccaaggaggtcccttcctcagctgttttgagaagccttcgggtgaatgtgggtccagacggagaggagacgagagctcagactgtacagaaatccccggagtttttgtccacttcagagtcttctagcttgttgcaagatctacagccaagtgatagcacttcttttattcttcttaacctaacaagagcaggtctgggctcttcagctgagcacttagtgtttgtacaggatgaggcagaagattcagggaatgatttcctctccagtgagagcacagacagtagcattccatggttcctccgggttcaggagttggcccatgacagtttgattgctgctactcgtgcacaactggcaaagaatgcaaaaaccagcagcaatggagaaaatgtccaccttggttctggtgatgggcagtcaaaagattctgggccccttcctcaagtggaaaagaagctcaagtgtacagttgaaggttgtgaccggacatttgtatggccagctcactttaaataccacctcaagactcatcgaaatgaccgctccttcatctgtcctgcagaaggttgtgggaaaagcttctatgtgctgcagaggctgaaggtgcacatgaggacccacaatggagagaagccctttatgtgccatgagtctggctgtggtaagcagtttactacagctggaaacctgaagaaccaccggcgcatccacacaggagagaaacctttcctttgtgaagcccaaggatgtggccgttcctttgctgagtattctagcctccgaaaacatctggtggttcactcaggagagaagcctcatcagtgccaagtctgtgggaagaccttctctcagagtggaagcaggaatgtgcatatgagaaagcatcacctgcagctgggagcagctgggagtcaagagcaggagcaaactgctgagccactaatgggcagtagtttgcttgaagaggcttcagtacccagtaaaaacctggtgtctatgaattcccagcccagccttggtggagagtccttgaacctaccaaataccaattctatcctgggagttgatgatgaggtgcttgctgaaggatccccacgttccctgtcttcagtgcctgatgtgacacatcacctggtgaccatgcagtcagggaggcaatcatatgaagtttctgtcttaactgcagtaaatccacaagagttactaaaccaaggagatttaactgaaagacggacatgagcgtgggtgctgactcctggaagagcaactctatctgatctcaaaatgcgtatactgggaacaggatgccttagcccacaacagaaccagaatgaatctttgaaggcacaagactctgcttttgccactcttcctctttcctggtatagaagatggatgtaggagagcttcttttctaactaccatctgatcagacaaggaatgaagcaatgactgtgggctgggaaactgtacctacctctcttcccactgcaaatttctgggatagaccaaaagtgaatttgattatgtgttggctgaagttcttcattctgactgttgaggggaggttttcctttgaagagttttcatcccagactcagctgtcttttcacatggatgaaataattcctgctaccaacaacagagcttcaccaggaagttgagttttcaagatgccttgttgctttgaagaagggagtgatgtcaattctcttgttacattctccctttagcaacctgagtaagagactctctgccactgggctgcaaaaaaataaattacttgaatctccccttgaaaaaaaaaaaaaaaaaaaaaaaaaaaaa

SEQ ID NO: 972 - protein, 478 aa, Homo sapiens
  ref <308>: DATABASE ACCESSION NUMBER: Refseq / NP_067011
  ref <309>: DATABASE ENTRY DATE: 2002-10-22
MLSDELESKPELLVQFVQNTSIPLGQGLVESEAKDITCLSLLPVTEASECSRLMLPDDTTNHSNSSKEVPSSAVLRSLRVNVGPDGEETRAQTVQKSPEFLSTSESSSLLQDLQPSDSTSFILLNLTRAGLGSSAEHLVFVQDEAEDSGNDFLSSESTDSSIPWFLRVQELAHDSLIAATRAQLAKNAKTSSNGENVHLGSGDGQSKDSGPLPQVEKKLKCTVEGCDRTFVWPAHFKYHLKTHRNDRSFICPAEGCGKSFYVLQRLKVHMRTHNGEKPFMCHESGCGKQFTTAGNLKNHRRIHTGEKPFLCEAQGCGRSFAEYSSLRKHLVVHSGEKPHQCQVCGKTFSQSGSRNVHMRKHHLQLGAAGSQEQEQTAEPLMGSSLLEEASVPSKNLVSMNSQPSLGGESLNLPNTNSILGVDDEVLAEGSPRSLSSVPDVTHHLVTMQSGRQSYEVSVLTAVNPQELLNQGDLTERRT

SEQ ID NO: 973 - DNA, 405 bp, Rattus norvegicus
  ref <308>: DATABASE ACCESSION NUMBER: EMBL / AA866364
  ref <309>: DATABASE ENTRY DATE: 2000-03-03
tctaagtctcttgaaaacttaactcctgtgcaaaaatgaagatgttttattgccttggggctgggaacccatctcccaggctttcacttcctccattcctcccttcttaggaacagtattggccttagttccggggcctgtctgctgccttccctctcctcctgccagctcttctgcctttgtttgagctctgttgggcttgaggggtttggttctctccccacctccctgtcaccctttttcttctgatcagtttttaggggagggctcatcttttctgcctttatattttttttcctaagaaagtgtttgcctttctttcactctcctaacataacaatcgtggtaacagaatgcaactgctgatttatcgatgtatttaatgtaagtaaaaaaggaaaaaag

SEQ ID NO: 974 - DNA, 438 bp, Rattus norvegicus
  misc_feature (1)..(438): n=a, c, g or t
  ref <308>: DATABASE ACCESSION NUMBER: EMBL / AA875470
  ref <309>: DATABASE ENTRY DATE: 2000-03-03
tggcagacagcgactttgcctccacgttccggctgctcacagtgtttgcntatgggacctatgctgactacttagctgaagccaggaacctccccccacttactgaggctcagaagaacaagcttcgacatctgtcagttgtcactctggctgccaaagtcaagtgtatgccgatgtccttcgtggatctctggaccagcgcaatcagcggctagaggttgactacagcattggacgggacatccagcgccaggacctcagcgccatcgcccaaaccctgcaagagtggtgcgtaggctgtgaggttgtgctgtcaggcattgaagagcaagtcagccgtgccaacctgcacaaggagcagcagctgggcctgaagcagcagatcgagagtgaggttgccaaccttaagaaaaccattaaagttacaactgcggccgc

SEQ ID NO: 975 - DNA, 1868 bp, Homo sapiens
  ref <308>: DATABASE ACCESSION NUMBER: Refseq / NM_016319
  ref <309>: DATABASE ENTRY DATE: 2002-12-23
agcgactcttcagggaggtggcaggaaaggcttggaacagctgccggaggtgacggagcggcggccccgcccggtgcgctggaggtcgaagcttccagctctggacatcctgagcccaagtcccccacactcagtgcagtgatgagtgcggaagtgaaggtgacagggcagaaccaggagcaatttctgctcctagccaagtcggccaagggggcagcgctggccacactcatccatcaggtgctggaggcccctggtgtctacgtgtttggagaactgctggacatgcccaatgttagagagctggctgagagtgactttgcctctaccttccggctgctcacagtgtttgcttatgggacatacgctgactacttagctgaagcccggaatcttcctccactaacagaggctcagaagaataagcttcgacacctctcagttgtcaccctggctgctaaagtaaagtgtatcccatatgcagtgttgctggaggctcttgccctgcgtaatgtgcggcagctggaagaccttgtgattgaggctgtgtatgctgacgtgcttcgtggctccctggaccagcgcaaccagcggctcgaggttgactacagcatcgggcgggacatccagcgccaggacctcagtgccattgcccgaaccctgcaggaatggtgtgtgggctgtgaggtcgtgctgtcaggcattgaggagcaggtgagccgtgccaaccaacacaaggagcagcagctgggcctgaagcagcagattgagagtgaggttgccaaccttaaaaaaaccattaaagttacgacggcagcagcagccgcagccacatctcaggaccctgagcaacacctgactgagctgagggaaccagctcctggcaccaaccagcgccagcccagcaagaaagcctcaaagggcaaggggctccgagggagcgccaagatttggtccaagtcgaattgaaagaactgtcgtttcctccctggggatgtggggtcccagctgcctgcctgcctcttaggagtcctcagagagccttctgtgcccctggccagctgataatcctaggttcatgacccttcacctcccctaaccccaaacatagatcacaccttctctagggaggagtcaaatgtaggtcatgtttttgttggtactttctgttttttgtgacttcatgtgttccattgctccccgctgccatgctctctcccttgtttccttaagagctcagcatctgtccctgttcattacatgtcattgagtaggtgggtagccctgatgggggtcgctctgtctggagcataacccacaggcgttttttctgccaccccatccctgcatgcctgatccccagttcctataccctacccctgacctattgagcagcctctgaagagccatagggcccccacctttactcacaccctgagaattctgggagccagtctgccatgccaggagtcactggacatgttcatcctagaatcctgtcacactacagtcatttcttttcctctctctggcccttgggtcctgggaatgctgctgcttcaaccccagagcctaagaatggcagccgtttcttaacatgttgagagatgattctttcttggccctggccatctcgggaagcttgatggcaatcctggaagggtttaatctccttttgtgagtttggtggggaagggaagggtatatagattgtattaaaaaaaaaaaggtatatatgcatatatctatatataatatgacgcagaaataaatctatgagaaatctatctacaaaaaaaaaaaaaaaaaaaaaaaaaaaaaaaaaaaaaaaaaaaaaaaaaaaaaaaaaaaaaaaaaaaaaaaaaaaa

SEQ ID NO: 976 - protein, 275 aa, Homo sapiens
  ref <308>: DATABASE ACCESSION NUMBER: Refseq / NP_057403
  ref <309>: DATABASE ENTRY DATE: 2002-12-23
MSAEVKVTGQNQEQFLLLAKSAKGAALATLIHQVLEAPGVYVFGELLDMPNVRELAESDFASTFRLLTVFAYGTYADYLAEARNLPPLTEAQKNKLRHLSVVTLAAKVKCIPYAVLLEALALRNVRQLEDLVIEAVYADVLRGSLDQRNQRLEVDYSIGRDIQRQDLSAIARTLQEWCVGCEVVLSGIEEQVSRANQHKEQQLGLKQQIESEVANLKKTIKVTTAAAAAATSQDPEQHLTELREPAPGTNQRQPSKKASKGKGLRGSAKIWSKSN

SEQ ID NO: 977 - DNA, 3609 bp, Rattus norvegicus
  ref <308>: DATABASE ACCESSION NUMBER: EMBL / U70050
  ref <309>: DATABASE ENTRY DATE: 2000-03-04
ggcgcctgctgtgacggcgacggccggacgacgcgcgcggggggctgcggccgcgacgagtgcgacacgtacgtgcgcgtgtgccttaaggagtaccaggccaaggtgacgcccacggggccctgcagctacggctacggcgccacgcccgtgctgggtagcaactccttctacctgccgccggcgggcgctgcgggagaccgagcgcgcgcgcggtctcggaccggcggccaccaggacccgggcctcgtcgtcattccctttcagttcgcctggccgcgttctttcaccctcatcgtggaggcctgggattgggacaatgacaccacaccagatgaggagctgctgattgagcgggtgtcccatgctggcatgatcaaccctgaggaccgctggaagagcctgcacttcagcggccacgtggcacacctggagctgcagatccgagtgcgctgtgacgagaactactacagtgccacctgcaacaagttctgccggccccggaacgacttcttcggccactacacctgtgaccagtacggcaacaaggcctgcatggatggctggatgggcaaggagtgcaaagaagccgtgtgtaaacaaggatgtaatttgctccacgggggatgcactgtgcctggggagtgcaggtgcagctatggctggcagggcaagttctgtgatgaatgtgtcccctaccctggctgcgtgcatggcagctgtgtggagccctggcactgtgactgtgagaccaactggggtggcctgctctgtgacaaagacctgaactactgtggcagccaccacccctgtgtcaatggaggcacctgtatcaacgccgagcctgaccaatacctctgcgcctgcccagatggctacttgggcaagaactgcgaacgggctgagcacgcctgcgcctccaacccgtgtgccaacgggggctcttgccacgaagtgctgtctggctttgaatgccactgtccgtcgggatggagtggacccacctgtgcgcttgacatcgatgagtgtgcctctaatccgtgtgcggcgggtggcacctgcgtggatcaggtggacggcttcgagtgcatctgcccggagcagtgggtgggggctacctgccagctggacgccaatgagtgtgaagggaaaccgtgccttaatgctttttcttgcaaaaacctgattggcggctattactgtgattgcctcccgggctggaagggcgccaactgccacatcaatatcaacgattgccatgggcagtgtcagcatgggggcacctgcaaggacctggtaaatgggtaccagtgcgtatgcccacggggcttcggaggtcgtcactgcgaactagagtactacaagtgtgccagcagcccctgccgtcggggtggcatctgtgaggacctggtggatggcttccgctgccactgcccacggggcctctctggtccgctctgtgaggtggacgtggatctctggtgcgaaccaaacccctgcctcaacggtgctcgctgctacaaccttgaggatgactactactgcgcctgcccagaagactttggcggcaagaactgctctgtgcccagggagacatgccctggtggggcctgtagagtgatcgatggctgtgggttcgaggcaggatccagggcgcatggtgctgcgccctccggcgtgtgcggtcctcacgggcactgtgtcagcctgcctgggggaaacttctcctgcatctgtgacagcggcttcacgggcacctactgccatgagaacatcgacgactgcatgggtcagccctgccgcaacgggggcacgtgcattgatgaagtggactccttcgcgtgcttctgccccagtggctgggaaggagagctctgtgacatcaatcccaacgactgcctccccgacccctgccacagccgcggccgctgctatgacctggtcaatgacttctactgtgtctgcgatgatggctggaaggacaagacctgccactcacgcgagttccagtgtgacgcctacacctgcagcaacggtggcacatgctatgacagcggcgacaccttccgctgcgcgtgccccccaggctggaagggcagcacctgcacgatcgccaagaacagcagctgcgtgcccaatccctgtgtgaatggaggcacctgtgtgggcagtggagactctttctcctgcatctgccgggatggctgggagggccgcacctgcacacacaacaccaatgactgcaaccctctgccctgctacaacggaggcatctgtgtggatggcgtcaactggttccgctgcgagtgtgcacctggctttgcgggtcctgactgccgtatcaacatcgatgagtgccagtcctcaccctgtgcctacggagccacgtgtgtagatgagatcaatgggtaccgctgcagctgcccaccaggacgttccggccccagatgccaggaagtggtcatattcacgaggccctgctggtcccggggcgtgtccttcccacatgggagttcctgggtagaagactgcaacagctgccgctgcctggatggccaccgggactgcagcaaggtgtggtgtggttggaagccttgtctgctgtcccctcagcccagtgctctgagtgcccagtgcccaccagggcagcagtgccgggagaaggccatgggtcagtgtctgcagcccccctgtgagaactggggggagtgtacagcagaggatcctctgccccccagcaccccctgtctgccacggaccactcatttggacaacaactgtgctcgcctcacactgcactttaaccgtgaccaagtgcctcagggcaccaccgtgggcgccatctgctctggaatccgagccctgcccgccacgagggcggcggcacgagaccgcctcctcctgctgctctgtgaccgcgcatcctcaggggccagtgccgtggaggtggctgtgtctttcagccctgcaagggacctgcccgacagcagcctgatccagagcacagcccatgccatcgtggctgccatcacccagagaggaaacagctcactgctgctggctgtcaccgaggtcaaggtggaaacagttgttatgggtggctcttccacaggtctgttggtacctgtgctgtgtagcgtgttcagtgtgctgtggcttgcctgtatggttatctgcgtgtggtggacacggaagcgcaggaaagaacgtgagaggagccggctaccacgggacgagagcgccaacaaccagtgggctccgctcaatcccatccgcaaccccattgagcggccaggcagcagtggtctgggaaccgggggccacaaggacgtactctaccagtgcaagaacttcacaccgccgccccgcagggcaggcgaggcactgcctgggccggccagccacggggctggtggggaggacgaggaggatgaggagctgagccgcggagatgggagactctccagaagcagagaagttcctctcacacaaattcaccaaagaccccagctgctccctgggaaggccagcctgctggctccggggcccaaagtggacaaccgcgccgtcagaagcaccaaggatgtgcgctgtgctggcagggagtag

SEQ ID NO: 978 - DNA, 4963 bp, Homo sapiens
  ref <308>: DATABASE ACCESSION NUMBER: Refseq / NM_145159
  ref <309>: DATABASE ENTRY DATE: 2003-01-17
ctcatgcatatgcaggtgcgcgggtgacgaatgggcgagcgagctgtcagtctcgttccgaacttgttggctgcggtgccgggagcgcgggcgcgcagagccgaggccgggacccgctgccttcaccgccgccgccgtcgccgccgggtgggagccgggccgggcagccggagcgcggccgccagcgagccggagctgccgccgcccctgcacgcccgccgcccaggcccgcgcgccgcggcgctgcgctcgaccccgcccgcgccgccgccgccgccgcctctgccgctgccgctgcctctgcgggcgctcggagggcgggcgggcgctgggaggccggcgcggcggctgggagccgggcgcgggcggcggcggcggggccgggcgggcgggtcgcgggggcaatgcgggcgcagggccgggggcgccttccccggcggctgctgctgctgctggcgctctgggtgcaggcggcgcggcccatgggctatttcgagctgcagctgagcgcgctgcggaacgtgaacggggagctgctgagcggcgcctgctgtgacggcgacggccggacaacgcgcgcggggggctgcggccacgacgagtgcgacacgtacgtgcgcgtgtgccttaaggagtaccaggccaaggtgacgcccacggggccctgcagctacggccacggcgccacgcccgtgctgggcggcaactccttctacctgccgccggcgggcgctgcgggggaccgagcgcgggcgcgggcccgggccggcggcgaccaggacccgggcctcgtcgtcatccccttccagttcgcctggccgcgctcctttaccctcatcgtggaggcctgggactgggacaacgataccaccccgaatgaggagctgctgatcgagcgagtgtcgcatgccggcatgatcaacccggaggaccgctggaagagcctgcacttcagcggccacgtggcgcacctggagctgcagatccgcgtgcgctgcgacgagaactactacagcgccacttgcaacaagttctgccggccccgcaacgactttttcggccactacacctgcgaccagtacggcaacaaggcctgcatggacggctggatgggcaaggagtgcaaggaagctgtgtgtaaacaagggtgtaatttgctccacgggggatgcaccgtgcctggggagtgcaggtgcagctacggctggcaagggaggttctgcgatgagtgtgtcccctaccccggctgcgtgcatggcagttgtgtggagccctggcagtgcaactgtgagaccaactggggcggcctgctctgtgacaaagacctgaactactgtggcagccaccacccctgcaccaacggaggcacgtgcatcaacgccgagcctgaccagtaccgctgcacctgccctgacggctactcgggcaggaactgtgagaaggctgagcacgcctgcacctccaacccgtgtgccaacgggggctcttgccatgaggtgccgtccggcttcgaatgccactgcccatcgggctggagcgggcccacctgtgcccttgacatcgatgagtgtgcttcgaacccgtgtgcggccggtggcacctgtgtggaccaggtggacggctttgagtgcatctgccccgagcagtgggtgggggccacctgccagctggacgtcaacgactgtcgcgggcagtgtcagcatgggggcacctgcaaggacctggtgaacgggtaccagtgtgtgtgcccacggggcttcggaggccggcattgcgagctggaacgagacgagtgtgccagcagcccctgccacagcggcggcctctgcgaggacctggccgacggcttccactgccactgcccccagggcttctccgggcctctctgtgaggtggatgtcgacctttgtgagccaagcccctgccggaacggcgctcgctgctataacctggagggtgactattactgcgcctgccctgatgactttggtggcaagaactgctccgtgccccgcgagccgtgccctggcggggcctgcagagtgatcgatggctgcgggtcagacgcggggcctgggatgcctggcacagcagcctccggcgtgtgtggcccccatggacgctgcgtcagccagccagggggcaacttttcctgcatctgtgacagtggctttactggcacctactgccatgagaacattgacgactgcctgggccagccctgccgcaatgggggcacatgcatcgatgaggtggacgccttccgctgcttctgccccagcggctgggagggcgagctctgcgacaccaatcccaacgactgccttcccgatccctgccacagccgcggccgctgctacgacctggtcaatgacttctactgtgcgtgcgacgacggctggaagggcaagacctgccactcacgcgagttccagtgcgatgcctacacctgcagcaacggtggcacctgctacgacagcggcgacaccttccgctgcgcctgcccccccggctggaagggcagcacctgcgccgtcgccaagaacagcagctgcctgcccaacccctgtgtgaatggtggcacctgcgtgggcagcggggcctccttctcctgcatctgccgggacggctgggagggtcgtacttgcactcacaataccaacgactgcaaccctctgccttgctacaatggtggcatctgtgttgacggcgtcaactggttccgctgcgagtgtgcacctggcttcgcggggcctgactgccgcatcaacatcgacgagtgccagtcctcgccctgtgcctacggggccacgtgtgtggatgagatcaacgggtatcgctgtagctgcccacccggccgagccggcccccggtgccaggaagtgatcgggttcgggagatcctgctggtcccggggcactccgttcccacacggaagctcctgggtggaagactgcaacagctgccgctgcctggatggccgccgtgactgcagcaaggtgtggtgcggatggaagccttgtctgctggccggccagcccgaggccctgagcgcccagtgcccactggggcaaaggtgcctggagaaggccccaggccagtgtctgcgaccaccctgtgaggcctggggggagtgcggcgcagaagagccaccgagcaccccctgcctgccacgctccggccacctggacaataactgtgcccgcctcaccttgcatttcaaccgtgaccacgtgccccagggcaccacggtgggcgccatttgctccgggatccgctccctgccagccacaagggctgtggcacgggaccgcctgctggtgttgctttgcgaccgggcgtcctcgggggccagtgccgtggaggtggccgtgtccttcagccctgccagggacctgcctgacagcagcctgatccagggcgcggcccacgccatcgtggccgccatcacccagcgggggaacagctcactgctcctggctgtcaccgaggtcaaggtggagacggttgttacgggcggctcttccacaggtctgctggtgcctgtgctgtgtggtgccttcagcgtgctgtggctggcgtgcgtggtcctgtgcgtgtggtggacacgcaagcgcaggaaagagcgggagaggagccggctgccgcgggaggagagcgccaacaaccagtgggccccgctcaaccccatccgcaaccccatcgagcggccggggggccacaaggacgtgctctaccagtgcaagaacttcacgccgccgccgcgcagggcggacgaggcgctgcccgggccggccggccacgcggccgtcagggaggatgaggaggacgaggatctgggccgcggtgaggaggactccctggaggcggagaagttcctctcacacaaattcaccaaagatcctggccgctcgccggggaggccggcccactgggcctcaggccccaaagtggacaaccgcgcggtcaggagcatcaatgaggcccgctacgccggcaaggagtaggggcggctgccagctgggccgggacccagggccctcggtgggagccatgccgtctgccggacccggaggccgaggccatgtgcatagtttctttattttgtgtaaaaaaaccaccaaaaacaaaaaccaaatgtttattttctacgtttctttaaccttgtataaattattcagtaactgtcaggctgaaaacaatggagtattctcggatagttgctatttttgtaaagtttccgtgcgtggcactcgctgtatgaaaggagagagcaaagggtgtctgcgtcgtcaccaaatcgtagcgtttgttaccagaggttgtgcactgtttacagaatcttccttttattcctcactcgggtttctctgtggctccaggccaaagtgccggtgagacccatggctgtgttggtgtggcccatggctgttggtgggacccgtggctgatggtgtggcctgtggctgtcggtgggactcgtggctgtcaatgggacctgtggctgtcggtgggacctacggtggtcggtgggaccctggttattgatgtggccctggctgccggcacggcccgtggctgttgacgcacctgtggttgttagtggggcctgaggtcatcggcgtggcccaaggccggcaggtcaacctcgcgcttgctggccagtccaccctgcctgccgtctgtgcttcctcctgcccagaacgcccgctccagcgatctctccactgtgctttcagaagtgcccttcctgctgcgcagttctcccatcctgggacggcggcagtattgaagctcgtgacaagtgccttcacacagacccctcgcaactgtccacgcgtgccgtggcaccaggcgctgcccacctgccggccccggccgcccctcctcgtgaaagtgcatttttgtaaatgtgtacatattaaaggaagcactctgtatatttgattgaataatgccacca

SEQ ID NO: 979 - protein, 1200 aa, Homo sapiens
  ref <308>: DATABASE ACCESSION NUMBER: Refseq / NP_660142
  ref <309>: DATABASE ENTRY DATE: 2003-01-17
MRAQGRGRLPRRLLLLLALWVQAARPMGYFELQLSALRNVNGELLSGACCDGDGRTTRAGGCGHDECDTYVRVCLKEYQAKVTPTGPCSYGHGATPVLGGNSFYLPPAGAAGDRARARARAGGDQDPGLVVIPFQFAWPRSFTLIVEAWDWDNDTTPNEELLIERVSHAGMINPEDRWKSLHFSGHVAHLELQIRVRCDENYYSATCNKFCRPRNDFFGHYTCDQYGNKACMDGWMGKECKEAVCKQGCNLLHGGCTVPGECRCSYGWQGRFCDECVPYPGCVHGSCVEPWQCNCETNWGGLLCDKDLNYCGSHHPCTNGGTCINAEPDQYRCTCPDGYSGRNCEKAEHACTSNPCANGGSCHEVPSGFECHCPSGWSGPTCALDIDECASNPCAAGGTCVDQVDGFECICPEQWVGATCQLDVNDCRGQCQHGGTCKDLVNGYQCVCPRGFGGRHCELERDECASSPCHSGGLCEDLADGFHCHCPQGFSGPLCEVDVDLCEPSPCRNGARCYNLEGDYYCACPDDFGGKNCSVPREPCPGGACRVIDGCGSDAGPGMPGTAASGVCGPHGRCVSQPGGNFSCICDSGFTGTYCHENIDDCLGQPCRNGGTCIDEVDAFRCFCPSGWEGELCDTNPNDCLPDPCHSRGRCYDLVNDFYCACDDGWKGKTCHSREFQCDAYTCSNGGTCYDSGDTFRCACPPGWKGSTCAVAKNSSCLPNPCVNGGTCVGSGASFSCICRDGWEGRTCTHNTNDCNPLPCYNGGICVDGVNWFRCECAPGFAGPDCRINIDECQSSPCAYGATCVDEINGYRCSCPPGRAGPRCQEVIGFGRSCWSRGTPFPHGSSWVEDCNSCRCLDGRRDCSKVWCGWKPCLLAGQPEALSAQCPLGQRCLEKAPGQCLRPPCEAWGECGAEEPPSTPCLPRSGHLDNNCARLTLHFNRDHVPQGTTVGAICSGIRSLPATRAVARDRLLVLLCDRASSGASAVEVAVSFSPARDLPDSSLIQGAAHAIVAAITQRGNSSLLLAVTEVKVETVVTGGSSTGLLVPVLCGAFSVLWLACVVLCVWWTRKRRKERERSRLPREESANNQWAPLNPIRNPIERPGGHKDVLYQCKNFTPPPRRADEALPGPAGHAAVREDEEDEDLGRGEEDSLEAEKFLSHKFTKDPGRSPGRPAHWASGPKVDNRAVRSINEARYAGKE

SEQ ID NO: 980 - DNA, 259 bp, Rattus norvegicus
  ref <308>: DATABASE ACCESSION NUMBER: EMBL / U75929
  ref <309>: DATABASE ENTRY DATE: 2000-07-30
gtgccggactctgaggccatagcctatccacagcctcctcgtcccctgcaccgcccagtgtctcactggctgtgttggaaacgggaattgcataagcttgccttcctcaagcaagaaatatctctagctttcatttccattttgactcttaacactcacccagactctgtgcttatttcatttgggggggggatgtgggcttcctggggtcttggggtggtagtatggaggtaggcagagggaagttacagcacagtca

SEQ ID NO: 981 - DNA, 1664 bp, Rattus norvegicus
  ref <308>: DATABASE ACCESSION NUMBER: Refseq / NM_139105
  ref <309>: DATABASE ENTRY DATE: 2003-01-13
agctagggccatgttttggggctcccgtctgcctttgagagtctttttcgggtcccttcctggccttcttaatacgtggcagagcgtctggaccagaagactacactgtgcaaccaccatgagtcttgacatccagtgtgagcagctgagtgatgcccggtggacagagctccttcccctgatccaacaataccaagtggtcaggctggatgactgtggcctcactgaagtgcggtgcaaagacatcaggtcagcgatccaggccaaccctgccctgacagagctcagcctacgcaccaatgaactgggtgatgctggtgtgggtctggtgctccagggcctgcagaatcccacttgtaagatccagaagctgagccttcagaactgcagcttgacggaagctggctgtggggtcctgcctgatgtgctgcgctctttgtctaccctgcgtgaactacatctcaatgacaaccctctgggggatgaaggcctgaagctgctctgtgaaggactccgggacccccagtgccgtcttgagaagcttcagttggaatactgtaacctcacagctaccagctgcgagcccctggcctcagtgctcagggtgaaacctgactttaaagagctagtattgagcaacaatgacttccatgaggctggtatccacactctgtgccagggcctgaaggattctgcctgtcaactggagtcactcaaactggagaactgtggtatcacatcagccaactgcaaggatctgtgtgatgttgtggcctccaaagcctcactgcaagaactggacttgggcagcaacaagctgggcaacacaggcattgcagcactgtgctcaggactgctgcttcccagctgcaggctgaggactctgtggctctgggactgtgatgtcactgcagaaggctgcaaggacctgtgccgtgtcctcagagccaagcagagcctgaaggaactcagcctagctggcaatgagctgaaggatgagggtgcccaactgctgtgtgagagcctgttagagcctggctgtcagctggagtcactgtgggtaaagacctgtagcctcacagctgcctcttgtccccacttctgctcggtgttgaccaaaaacagttctctgtttgagttgcaaatgagcagcaacccgctgggagactcgggagtcgtggagctttgcaaggccctgggctatccggacacagtgctgcgtgtgctttggctgggagactgtgatgtgacagacagtggctgcagcagccttgccactgtcctgctggccaaccgcagcttgagggaactggacctcagtaacaactgcatgggggacaacggtgtcctacaactgctggagagcctcaaacagcccagctgcatccttcagcagcttgtcctgtatgacatttactggacggatgaggtggaagaccagcttcgggccctggaggaggaaaggccatccctgaggatcatttcctgagatgtacacctctggacacaagatattaatccagccccagaggcagcccaccagatctctggctttggttgtcctagggttggactggcgataagcattgggatcttacttcagtagaaaactttaagacactttataactattaaaatactttgttggcaaaaaaaaaaaaaaa

SEQ ID NO: 982 - protein, 456 aa, Rattus norvegicus
  ref <308>: DATABASE ACCESSION NUMBER: Refseq / NP_620805
  ref <309>: DATABASE ENTRY DATE: 2003-01-13
MSLDIQCEQLSDARWTELLPLIQQYQVVRLDDCGLTEVRCKDIRSAIQANPALTELSLRTNELGDAGVGLVLQGLQNPTCKIQKLSLQNCSLTEAGCGVLPDVLRSLSTLRELHLNDNPLGDEGLKLLCEGLRDPQCRLEKLQLEYCNLTATSCEPLASVLRVKPDFKELVLSNNDFHEAGIHTLCQGLKDSACQLESLKLENCGITSANCKDLCDVVASKASLQELDLGSNKLGNTGIAALCSGLLLPSCRLRTLWLWDCDVTAEGCKDLCRVLRAKQSLKELSLAGNELKDEGAQLLCESLLEPGCQLESLWVKTCSLTAASCPHFCSVLTKNSSLFELQMSSNPLGDSGVVELCKALGYPDTVLRVLWLGDCDVTDSGCSSLATVLLANRSLRELDLSNNCMGDNGVLQLLESLKQPSCILQQLVLYDIYWTDEVEDQLRALEEERPSLRIIS

SEQ ID NO: 983 - DNA, 1087 bp, Rattus norvegicus
  ref <308>: DATABASE ACCESSION NUMBER: Refseq / NM_031655
  ref <309>: DATABASE ENTRY DATE: 2003-01-13
ggaagagggaagaaggcgctgaggaccgcgcacgcccagcccagctgctgacttcaccacctcaccgagacccactccgctggccagcacgctacactgacaggatcctggctgcacccactgtgatctctttgaactaggatagcccgcgctcactgtttccctgaagatggaagaaatcccacccacccactacgctgcgtccagggctgcctcggtggcagagaactgtataaattatcagcaagggacccccaacaaggtattcaaggtgcagacggtccagcaggcaagcaaggaggatatcccaggaagaggccacaagtaccatctgaagttttctgtggaagaaattatccaaaaacaagttacagtgagctgcacggctgaagttctttaccctcgaatgggacaaggctctgcaccggaagtcaacttcacatttgaaggagaaatcggcaagaacccagatgaggaagacaacacgttttatcaaagactcatgtccatgaaggaaccactacaagcacaaaatattccagacaattttggaaatgtgtctccacaaatgaagccggtccaccacttagcctgggtcgcctgtggttatgtaatgtggcagaactcgactgaagacacatggtataaaatggcaaagattcaaacggtcaagcaagtgcaaagaaacgatgacttcattgagttagactacaccgtcctactccacgacgttgcatcgcaggagattatcccctggcaaatgcaagttctgtggcacccacaatacggcacaaaagtaaagcacaacagccgcctcccaaaggaagcaccagcagagtaaacaagaccccaactcggagacagccgtcaacatgccccttaaccatgagtatgactgtcctcactggcacctagctaacaggccaagtgaatcccacagtgtcgctctgtatgtcttggctacaggaccgagctgcatagattccacaataaagagtagactacatgaaagtgtctttccaatagtaatggtactatggctatccactaataaagtcaacttcagcctcacaaaaaaaaaaaaaaa

SEQ ID NO: 984 - protein, 223 aa, Rattus norvegicus
  ref <308>: DATABASE ACCESSION NUMBER: Refseq / NP_113843
  ref <309>: DATABASE ENTRY DATE: 2003-01-13
MEEIPPTHYAASRAASVAENCINYQQGTPNKVFKVQTVQQASKEDIPGRGHKYHLKFSVEEIIQKQVTVSCTAEVLYPRMGQGSAPEVNFTFEGEIGKNPDEEDNTFYQRLMSMKEPLQAQNIPDNFGNVSPQMKPVHHLAWVACGYVMWQNSTEDTWYKMAKIQTVKQVQRNDDFIELDYTVLLHDVASQEIIPWQMQVLWHPQYGTKVKHNSRLPKEAPAE

SEQ ID NO: 985 - DNA, 1617 bp, Rattus norvegicus
  ref <308>: DATABASE ACCESSION NUMBER: Refseq / NM_033230
  ref <309>: DATABASE ENTRY DATE: 2002-11-05
gaattccctgggttaccccggtgtgtgggggccacggataccatgaacgacgtagccattgtgaaggagggctggctgcacaaacgaggggaatatattaaaacctggcggccacgctacttcctcctcaagaatgatggcacctttattggctacaaggaacggcctcaggatgtggagcagcgcgagtccccactcaacaacttctcagtggcacaatgtcagctgatgaagacagagcggccgaggcccaacaccttcatcatccgctgcctgcagtggaccacggtcattgagcgcaccttccatgtggaaacgcctgaggagcgggaagagtggaccaccgccattcagactgtggctgatggactcaaacggcaggaggaggagacgatggacttccggtcaggttcacccagtgacaactcaggtgctgaggagatggaggtggccctggccaagcccaagcaccgtgtgaccatgaacgagtttgagtacctgaagctactgggcaagggcacctttgggaaggtgatcctggtgaaggagaaggccacaggtcgctactatgccatgaagatcctcaagaaggaggtcatcgttgccaaggatgaggttgcccacacgcttactgagaaccgtgtcctgcagaactctaggcatcccttccttacagccctcaagtactcattccagacccacgaccgcctctgctttgtcatggagtacgccaatggaggcgagctcttcttccacctgtctcgtgagcgcgtgttttcagaggaccgggcccgcttctacggtgcggagattgtgtccgccctggactacttgcactccgagaagaacgtggtgtaccgggacctcaagctggagaacctcatgctggacaaggacgggcacatcaagataacggacttcgggctgtgcaaggagggtatcaaggacggtgccaccatgaagacgttctgcgggacacccgagtacctggcccctgaggtgctggaggacaacgactatggccgtgcagtggactggtgggggctgggcgtggtcatgtacgagatgatgtgcggccgcctgcccttctacaaccaggaccatgagaagctgttcgagctcatcctaatggaggagatccgcttcccacgcacactcgggccggaggccaagtccctgctctcggggctgctcaagaaggaccctacacagaggctcggtgggggctccgaggacgccaaggagatcatgcagcaccgcttctttgccaacatcgtgtggcaagatgtgtatgagaagaagctgagcccacctttcaagccccaggtcacctctgagaccgacaccaggtattttgatgaggagttcacagctcagatgatcaccatcacaccgcctgatcaagatgacagcatggagtgtgtggacagtgaacggaggccgcactttccccagttctcctactcagccagtggcacagcctgaggcctggggtggtggctggcagccctgcacccctctgcattgccgagtccagaagccccgcatggatcatctgtacctgatggttttgtttctcggatgtgctggggaggaacctcgccagcctcggaattc

SEQ ID NO: 986 - protein, 480 aa, Rattus norvegicus
  ref <308>: DATABASE ACCESSION NUMBER: Refseq / NP_150233
  ref <309>: DATABASE ENTRY DATE: 2002-11-05
MNDVAIVKEGWLHKRGEYIKTWRPRYFLLKNDGTFIGYKERPQDVEQRESPLNNFSVAQCQLMKTERPRPNTFIIRCLQWTTVIERTFHVETPEEREEWTTAIQTVADGLKRQEEETMDFRSGSPSDNSGAEEMEVALAKPKHRVTMNEFEYLKLLGKGTFGKVILVKEKATGRYYAMKILKKEVIVAKDEVAHTLTENRVLQNSRHPFLTALKYSFQTHDRLCFVMEYANGGELFFHLSRERVFSEDRARFYGAEIVSALDYLHSEKNVVYRDLKLENLMLDKDGHIKITDFGLCKEGIKDGATMKTFCGTPEYLAPEVLEDNDYGRAVDWWGLGVVMYEMMCGRLPFYNQDHEKLFELILMEEIRFPRTLGPEAKSLLSGLLKKDPTQRLGGGSEDAKEIMQHRFFANIVWQDVYEKKLSPPFKPQVTSETDTRYFDEEFTAQMITITPPDQDDSMECVDSERRPHFPQFSYSASGTA

SEQ ID NO: 987 - DNA, 1776 bp, Rattus norvegicus
  ref <308>: DATABASE ACCESSION NUMBER: EMBL / L18889
  ref <309>: DATABASE ENTRY DATE: 2002-08-09
atggaagggaagtggttactgtgtttgctactggtccttggaactgcagctattcaggctcatgatggacatgatgatgacatgattgatattgaagatgatcttgatgatgttatcgaagaggtagaagattcaaaatctaaatcagataccagcactcctccatctccaaaggtcacctacaaagctccagttccaacaggggaggtttattttgctgactcctttgacagagggtctctgtcagggtggattttatctaaagccaaaaaagacgacactgatgatgaaattgccaaatatgacggaaagtgggaggtagatgaaatgaaggaaacaaagcttccaggtgataaaggacttgtattgatgtctcgggccaagcatcatgccatctctgctaaactgaacaagcccttcctgtttgataccaagcctctcattgttcagtatgaggttaactttcagaatggaatagaatgcggtggtgcctacgtgaagctgctatccaagacctcagaactcaacctggatcaattccacgacaagactccgtatactattatgtttggtccagataaatgtggagaggactacaaactgcatttcatctttcgccacaaaaaccccaagacaggcgtatatgaagaaaaacatgctaagaggccagatgcagatctgaagacctatttcactgacaagaaaacacatctttacacattaatcttgaatccagacaatagttttgaaatattagttgaccagtctgttgtgaacagtggaaacctgctaaatgacatgacccctccggtaaacccttcacgtgaaattgaggacccagaagaccggaagcctgaagattgggatgaaaggcccaaaatagcagatccagatgctgtcaagccagatgactgggatgaagatgccccttctaagattccagatgaagaggccacaaagcctgaaggctggttagatgatgaacccgagtatattccagaccctgatgcagagaaaccagaagattgggatgaggatatggacggagaatgggaggctcctcagattgccaaccctaagtgtgagtccgcccctgggtgtggtgtctggcagcgacctatgattgacaaccccaattataagggcaaatggaagcctcctatgattgacaatcctaactaccagggaatctggaaaccaaggaaaataccaaatccagatttctttgaagacctggaaccttttaggatgactcctttcagcgctattggtttggagctctggtccatgacatccgacatcttttttgacaactttatcattagtggtgaccgaagagtagttgatgactgggccaatgatgggtggggcctgaagaaagctgctgatggggctgcagagccaggtgtagtggggcagatgctggaggcagctgaagagcgtccatggctttgggtggtctacattctgactgtagcgttgccagtgttccttgtgatcctcttctgctgttctggaaagaaacagtccaatgctatggagtacaagaagacagatgctccccagccagatgtgaaggacgaagaagggaaggaagaagagaagaacaagggagatgaagaggaagaagaggagaagcttgaagagaaacagaagagtgatgctgaagaagatggtggcactggcagtcaagatgaggaagatagcaagcctaaagcagaggaggatgaaattttgaacagatcaccaagaaacagaaagccacgaagagagtga

SEQ ID NO: 988 - protein, 592 aa, Rattus norvegicus
  misc_feature (1)..(592): Xaa=Unknown amino acid
MEGKWLLCLLLVLGTAAIQAHDGHDDDMIDIEDDLDDVIEEVEDSKSKSDTSTPPSPKVTYKAPVPTGEVYFADSFDRGSLSGWILSKAKKDDTDDEIAKYDGKWEVDEMKETKLPGDKGLVLMSRAKHHAISAKLNKPFLFDTKPLIVQYEVNFQNGIECGGAYVKLLSKTSELNLDQFHDKTPYTIMFGPDKCGEDYKLHFIFRHKNPKTGVYEEKHAKRPDADLKTYFTDKKTHLYTLILNPDNSFEILVDQSVVNSGNLLNDMTPPVNPSREIEDPEDRKPEDWDERPKIADPDAVKPDDWDEDAPSKIPDEEATKPEGWLDDEPEYIPDPDAEKPEDWDEDMDGEWEAPQIANPKCESAPGCGVWQRPMIDNPNYKGKWKPPMIDNPNYQGIWKPRKIPNPDFFEDLEPFRMTPFSAIGLELWSMTSDIFFDNFIISGDRRVVDDWANDGWGLKKAADGAAEPGVVGQMLEAAEERPWLWVVYILTVALPVFLVILFCCSGKKQSNAMEYKKTDAPQPDVKDEEGKEEEKNKGDEEEEEEKLEEKQKSDAEEDGGTGSQDEEDSKPKAEEDEILNRSPRNRKPRREX

SEQ ID NO: 989 - DNA, 390 bp, Rattus norvegicus
  ref <308>: DATABASE ACCESSION NUMBER: EMBL / AA866250
  ref <309>: DATABASE ENTRY DATE: 2000-03-03
aagaattcggcacgagggtgagggtcagggcctgaggtgaggggcaggtcagcggtttcgtgaagtgatacccttccacccttgatccctttcacacattcatgcccacaggttggactcctctactcctaggctccactgcagaggccctgccaagctggcttctttcctctcctgtaaaggggacccatcccaccttgccacggggtccccttcctgtgccaagcaaacccctgtcagaaccaacccctggccccggttctgccagcctcaatggggccaagtggaacctgtgaagggaaagaaatgcaggagctgaggctcccaatttcatggtgcccactggaccttggcactggatgagccaataaacgaagctctgacacctcc

SEQ ID NO: 990 - DNA, 571 bp, Rattus norvegicus
  ref <308>: DATABASE ACCESSION NUMBER: EMBL / AI229655
  ref <309>: DATABASE ENTRY DATE: 1999-01-22
ctcccaacccttttactttattcattcaaaaaacatttattgagtaccttcggtgcccagcagtgagctagtcccaccggcttagtgggagaagggtctctgcttcatcattggtgcctcatccctaaaccccacacttcacgtgcctttagaggatcgacaggaggtggaacctttttgtgggcctcaggaggtctccaaactttaccaagctggctcctcctgtcccaactcatcctccttccctgtactccgtgcagcctcctccatggccccctgctggctgggggcagctcccaggtctctgccaactctgacttctctgtttttaaagcccctccccatacctgctgagtctggagttcaagcccttaggctctctccccagattatgagggttaagtggacccacaaacaagtgccaagggagttggtgaagggagaggatatggttggccgggattagatgaccttcctaattaagtgccttctctgtgaccgagcacctccgtgtgataagaactaaagagaaagctagaccccctaaaaaaagggaactaaagaaaccttt

SEQ ID NO: 991 - DNA, 472 bp, Rattus norvegicus
  ref <308>: DATABASE ACCESSION NUMBER: EMBL / AI237535
  ref <309>: DATABASE ENTRY DATE: 2000-03-03
tgcaaagcgctcctgggcacctacaaacgtttgtaggactcggccagccacagggaaggtagacaagtgctcccggaagtcacccaacccttgcccagcgcagccagaagacgtcccttccttgatctcttcatgagctcgtcttcgtgtcttttagggggtggggaaagtcggaaaagtaacaaacccccaaacccagaaactgctgctggagttgtgccctgcacatgcaaagacgtggaccttgggtgttgctttaagggtttaccgcctgatctcgttaccccactaactgtgattgttactccatttgcatctcgtctgctgatttgccactgcctgccccctcttcctcaagaagaggccttcctggtgccaggctcaaaacccgaagctacagtttgccttatttttcactgtttggcttgatctgtaccatctctcccagccctaatgacagagaccttgcctt

SEQ ID NO: 992 - DNA, 1773 bp, Homo sapiens
  ref <308>: DATABASE ACCESSION NUMBER: Refseq / NM_004862
  ref <309>: DATABASE ENTRY DATE: 2000-11-01
gtttctctccctgcccccgcgacttcgcgcaagatccgggaaggacacccgaggcccctgggagaccctggggaggtgaaagtcagagagcgaagcgggccgtggcccctaggcctgacccctccccgcggggtaaggcgggcaccccgcgagcgcaggggtcctcttactgctgatggcacccagctctgggcccagacgccgctcaccgtccaccgccggtgctgggtaaaatgtcggttccaggaccttaccaggcggccactgggccttcctcagcaccatccgcacctccatcctatgaagagacagtggctgttaacagttattaccccacacctccagctcccatgcctgggccaactacggggcttgtgacggggcctgatgggaagggcatgaatcctccttcgtattatacccagccagcgcccatccccaataacaatccaattaccgtgcagacggtctacgtgcagcaccccatcacctttttggaccgccctatccaaatgtgttgtccttcctgcaacaagatgatcgtgagtcagctgtcctataacgccggtgctctgacctggctgtcctgcgggagcctgtgcctgctgggggtgcatagcgggctgctgcttcatccccttctgcgtggatgccctgcaggacgtggaccattactgtcccaactgcagagctctcctgggcacctacaagcgtttgtaggactcagccagacgtggagggagccgggtgccgcaggaagtcctttccacctctcatccagcttcacgcctggtggaggttctgccctggtggtctcacctctccagggggcccaccttcatgtcttcttttggggggaatacgtcgcaaaactaacaaatctccaaaccccagaaattgctgcttggagtcgtgcataggacttgcaaagacattccccttgagtgtcagttccacggtttcctgcctccctgagaccctgagtcctgccatctaactgtgatcattgccctatccgaatatcttcctgtgatctgccatcagtggctcttttttcctgcttccatgggcctttctggtggcagtctcaaactgagaagccacagttgccttatttttgaggctgttctgcccagagctcggctgaaccagcctttagtgcctaccattatcttatccgtctcttcccgtccctgatgacaaagatcttgccttacagactttacaggcttggctttgagattctgtaactgcagacttcattagcacacagattcactttaatttcttaattttttttttaaatacaaggagggggctattaacacccagtacagacatatccacaaggtcgtaaatgcatgctagaaaaatagggctggatcttatcactgccctgtctccccttgtttctctgtgccagatcttcagtgcccctttccatacagggatttttttctcatagagtaattatatgaacagtttttatgacctccttttggtctgaaatacttttgaacagaatttcttttttttaaaaaaaaacagagatggggtcttactatgttgcccaggctggtgtcgaactcctgggctcaagcgatccttctgccttggcctcccgaagtgctgggattgcaggcataagctaccatgctgggcctgaacataatttcaagaggaggatttataaaaccattttctgtaatcaaatgattggtgtcattttcccatttgccaatgtagtctcacttaaaaaaaaaaaaaaaaaaa

SEQ ID NO: 993 - protein, 228 aa, Homo sapiens
  ref <308>: DATABASE ACCESSION NUMBER: Refseq / NP_004853
  ref <309>: DATABASE ENTRY DATE: 2000-11-01
MSVPGPYQAATGPSSAPSAPPSYEETVAVNSYYPTPPAPMPGPTTGLVTGPDGKGMNPPSYYTQPAPIPNNNPITVQTVYVQHPITFLDRPIQMCCPSCNKMIVSQLSYNAGALTWLSCGSLCLLGVHSGLLLHPLLRGCPAGRGPLLSQLQSSPGHLQAFVGLSQTWREPGAAGSPFHLSSSFTPGGGSALVVSPLQGAHLHVFFWGEYVAKLTNLQTPEIAAWSRA

SEQ ID NO: 994 - DNA, 893 bp, Rattus norvegicus
  ref <308>: DATABASE ACCESSION NUMBER: Refseq / NM_022385
  ref <309>: DATABASE ENTRY DATE: 2002-11-05
cagtggacgtggcggcgccccggctcaattaggagtcgctgccgagtcccggcctgtcactgaggatcggcgagggcgcggcggcggtccatcatgggtggctttttctcaagtatattttccagtctctttggaaccagggaaatgaggattttaattttgggattagatggtgctggaaaaacgacaattttgtacagattgcaggttggagaagttgttactaccattcccactattggatttaatgtagagacggtgacatacaaaaatctcaagttccaagtttgggacttaggcggacagacaagtatcaggccatactggagatgttattattcaaacacagatgcagtcatctatgtcgttgacagttgtgaccgagaccgaattggcatttccaagtcagagttagttgccatgttggaggaagaggagctgaggaaagccattttagtggtgtttgcaaataaacaggacatggagcaggccatgacgccctcagaaatggccaatgcgcttgggttacccgccctgaaggaccggaagtggcagatctttaaaacgtcagcaaccaaaggcaccggcctcgacgaggcaatggaatggttagttgaaacactgaaaagcagacagtgagtccattcacatcagcgcctgtgaaccaaacgctccgtcacagactcactgaaccagtcagatgtacttctcgtgactggtggaagggactgtgtgattctagcatatacagacctgacttcactatttgtaataaatataaaaagcaagtatctggtgagagggttagcttgatcgaatcacccaaatggtttatgtaatgtaaaatatttcttccttgttttcttgtgttaaggtatatattctatttgtat

SEQ ID NO: 995 - protein, 181 aa, Rattus norvegicus
  ref <308>: DATABASE ACCESSION NUMBER: Refseq / NP_071780
  ref <309>: DATABASE ENTRY DATE: 2002-11-05
MGGFFSSIFSSLFGTREMRILILGLDGAGKTTILYRLQVGEVVTTIPTIGFNVETVTYKNLKFQVWDLGGQTSIRPYWRCYYSNTDAVIYVVDSCDRDRIGISKSELVAMLEEEELRKAILVVFANKQDMEQAMTPSEMANALGLPALKDRKWQIFKTSATKGTGLDEAMEWLVETLKSRQ

SEQ ID NO: 996 - DNA, 968 bp, Homo sapiens
  ref <308>: DATABASE ACCESSION NUMBER: Refseq / NM_001177
  ref <309>: DATABASE ENTRY DATE: 2002-12-23
gggggaagttgctggctgactgggcttgcgaggaaaccgcctcggagctgcagcgaaggccaaggaatcactgaagatcggcgagggaggacagggggttcatcatgggtggctttttctcaagtatattttccagtctgtttggaactcgggaaatgagaattttaattttgggattagatggagcaggaaaaaccacaattttgtacagattacaagtgggagaagttgttactactatacctaccattggatttaatgtagagacggtgacgtacaaaaaccttaaattccaagtctgggatttaggaggacagacaagtatcaggccatactggagatgttactattcaaacacagatgcagtcatttatgtagtagacagttgtgaccgagaccgaattggcatttccaaatcagagttagttgccatgttggaggaagaagagctgagaaaagccattttagtggtgtttgcaaataaacaggacatggaacaggccatgacttcctcagagatggcaaattcacttgggttacctgccttgaaggaccgaaaatggcagatattcaaaacgtcagcaaccaaaggcaccggccttgatgaggcaatggaatggttagttgaaacattaaaaagcagacagtaattcagtccattcttctcccctgaaatgaagactacatcacctctctccctttggaaacagtcaagtgtacttcacactactagatgttaaaactatatgattattggcatatactgactgactgcaatatttgtagtaaatagggaaaataagtatttagttggagggataatttgatcgaatcacctgaatgttctatgtaatgtaaaatattcttttcttgctttcttgtgttaaggtatatattctatttgtatggaattcttattcaaatacagttgtattaaagagtatactcctattggatgaaaaaaacct

SEQ ID NO: 997 - protein, 181 aa, Homo sapiens
  ref <308>: DATABASE ACCESSION NUMBER: Refseq / NP_001168
  ref <309>: DATABASE ENTRY DATE: 2002-12-23
MGGFFSSIFSSLFGTREMRILILGLDGAGKTTILYRLQVGEVVTTIPTIGFNVETVTYKNLKFQVWDLGGQTSIRPYWRCYYSNTDAVIYVVDSCDRDRIGISKSELVAMLEEEELRKAILVVFANKQDMEQAMTSSEMANSLGLPALKDRKWQIFKTSATKGTGLDEAMEWLVETLKSRQ

SEQ ID NO: 998 - DNA, 2157 bp, Rattus norvegicus
  ref <308>: DATABASE ACCESSION NUMBER: Refseq / NM_022701
  ref <309>: DATABASE ENTRY DATE: 2003-01-13
gaatctgttggcacggaggaagaagtccctggggaatcttaggactgtcacaggggcgctcaagggactgggcggtggcagaggcagttctcctgataggagggggaagaggtgccacagggccccttcccctctgcaaaggcttcttctctctcccctccagttgcagcctcaactatgtttttcacttgtggcccaaatgaggccatggtggtctccgggttctgcaggagccccccagtcatggtggccggaggccgagtgtttgtcctaccctgcattcaacaaatccaaaggatctctctcaacacactgaccctcaatgtcaagagtgagaaggtttatacccgccacggggtccccatctcagtcacgggcattgcccaggtgaaaatccaggggcaaaacaaggagatgctggcagctgcctgccagatgttcctggggaagacagaggcagagatcgcccacattgccctggagacgctggaaggccaccagagggcaatcatggcccacatgactgtggaggagatctataaggacagacagaagttctcagagcaggttttcaaggtggcctcctccgacctggtcaacatgggtatcagtgtggttagctacactttgaaggacattcacgatgaccaggattacttacactctttggggaaggctcgcacagcacaagtgcagaaagatgctcggattggagaagcagaggccaagagagatgcggggatacgggaggctaaggccaagcaggagaaggtatccgcacagtgcctcagtgaaatagagatggccaaggcccagagggactatgagctgaagaaagccacctacgacattgaggtcaacacccggcgagcacaggcggacctggcctatcagctgcaggtggccaagacgaagcagcagatcgaggagcagcgggtacaggtgcaggtggtggagcgcgcccagcaggtggcagtgcaggagcaggagatagcaaggcgcgagaaggagctggaggcccgggtgcgcaagccagcggaggctgagcgctacaggctggagcgcctggcggaagcagagaaggcccagctgatcatgcaggcagaagctgaagctgagtctgtgcgggtgagttggggcatggcttctgattggcatgaggggagggcttatcagggtttcttgttctctattgcttgttttttgtcctggctgacctggaactcactgtgttaacaagatggcttcaaactcggggagatccatctacctctgcctcccaattactgggattaaaggcattcacaactgttgttgctgtcgctgttgctaacctcctcccttcttccctccttctcctcctccttctccccctctccccacgccccatgtaggaggcagggtggttcatcttgccagtgtggaggtcagatccccctggagattttaagtaaggttgttggcctgactggcaagcacctttaccctctgagtcttattggcctcagaatttggtatccttaatgagttgcctgcccgtaccctccacagatgcgaggggaagctgaggcctttgccgtaggggcccgcgctcgtgctgaggctgagcaaatggccaagaaggcagaagccttccagatgtaccaggaggccgcccagctggacatgctgctggagaaactgccccaggtggcagaagagatcagtggccccctgacctcagccaataagatcacgctggtgtctagcggaagcggaaccatgggggccgccaaagttactggggaagtactggacatcttaagccgtctgccagagagtgtggagagactcacaggcgtcagcatctcccaggtgaatcacaacaagcctttaaggacggcgtgagcccttccaagttcccaatggtacctggacatgtggcccaatggtctcattgcatgcgcctcagttggcctccctgagcatgaccccctgccaagggtgcacatctctccttgccaaatagtctgtgccttgccttggagggcttgctctccgcccatttgccagtgccctgcaccaagactttggttatcttacttcaccccaactatttaacttcctgattaaacgagactgagccctctgggtagctataaaaaaaaaaaaaaaaaa

SEQ ID NO: 999 - protein, 352 aa, Rattus norvegicus
  ref <308>: DATABASE ACCESSION NUMBER: Refseq / NP_073192
  ref <309>: DATABASE ENTRY DATE: 2003-01-13
MFFTCGPNEAMVVSGFCRSPPVMVAGGRVFVLPCIQQIQRISLNTLTLNVKSEKVYTRHGVPISVTGIAQVKIQGQNKEMLAAACQMFLGKTEAEIAHIALETLEGHQRAIMAHMTVEEIYKDRQKFSEQVFKVASSDLVNMGISVVSYTLKDIHDDQDYLHSLGKARTAQVQKDARIGEAEAKRDAGIREAKAKQEKVSAQCLSEIEMAKAQRDYELKKATYDIEVNTRRAQADLAYQLQVAKTKQQIEEQRVQVQVVERAQQVAVQEQEIARREKELEARVRKPAEAERYRLERLAEAEKAQLIMQAEAEAESVRVSWGMASDWHEGRAYQGFLFSIACFLSWLTWNSLC

SEQ ID NO: 1000 - DNA, 5551 bp, Rattus norvegicus
  ref <308>: DATABASE ACCESSION NUMBER: Refseq / NM_134452
  ref <309>: DATABASE ENTRY DATE: 2003-01-13
ctggcatggacgtacacacccgctggaaagctccgcgcccgggcgccccgctgctgtcctcgccgctgctcctgctcctgctgctgctgtgggcgccgcctccgagccgcgcagctcagccaacagatcttctggagatgctagattttcacaatttgccctcaggcgtaacgaaaaccacaggtttctgtgccactcgacgatcttccaaagagccggatgttgcctaccgagtctctaaagatgcacagctcagcatgcccaccaagcagctgtaccctgagtctgactttcctgaggacttctccatcctgacaaccgtgaaagccaagaaaggcagtcaggccttcctggtctccgtttacaatgagcagggcatccagcagttgggactggagctgggccgctcccctgtcttcctctatgaggaccacacagggaagcccgggcctgaagagtatccactcttccctggcatcaacctgtccgatggcaagtggcaccgaatcgctatcagtgtatacaagaaaaatgtcaccttgatcctcgactgtaaaaagaagatcacgaagttcctcaaccgcggcgaccaccccataatagatgtcaacggtatcatcatgtttggctcccggattctggatgatgaaatatttgagggtgacatccaacagttgctcttcgtctccgaccaccgagctgcctatgattactgtgagcactacagccccgactgtgacacagcggtccctgacacacctcagtcacaggaccctaacccagatgaatattacccagaaggagagggtgagacctattactatgagtacccatattatgaagaccctgaagacccgggaaaggagcccgccccctctcagaagccagtggaagccgccagagaaaccacggaggttcctgaggagcagacccagcccccatccgaagcccctacagtgcctgagaccagtgacacggctggcaaggaggacaatccagggatcggggactacgactatgtgcccactgacgactactacactacatccccgtatgaagacttcggctatggcgagggcgtggagaaccccgaccagcccaccaaccctgactcaggggccgagatccccaccagcaccagtgttacctccaattcctccaatccggctccatctccagaggaagggaaggatgacctgggaggtgagttcaccgaggagaccatcaagaatctagatgaaaactactacgacccgtactttgacccggactccgactccaatgtctctccatcggagatagggccaggcatgcctgctaaccaggacaccatctatgaagggattggaggaccccgaggtgagaaagggcaaaagggagaaccagccatcattgagccgggaatgctgatagaggggccccctggccctgaaggccctgctggtcttccaggacctccaggaactacgggtcctactggccaaatgggtgaccctggagaaaggggtccccctgggcgcccaggtcttcctggggctgatggcttgccaggtccccccgggaccatgctcatgctgccgttccgttttggaggtggtggcgacgccggttctaagggccccatggtctctgcccaggaatcccaggcacaggctatccttcagcaagccaggttggcactaaggggaccagctggtccaatgggtctcaccgggagacctggccccatgggtcctcctgggagtggaggtttgaagggtgagccaggagacatgggacctcagggtcctcgaggtgtgcaaggtccacccggcccaacagggaagcctggaagacggggccgtgctgggagtgatggtgccagaggcatgcctggacaaacaggccccaagggtgaccgtggctttgatggtctggctgggttgccgggagagaaaggccatagaggtgaccctggtccttctggcccgccgggactcccaggagatgatggagaaaggggtgacgatggagaagttgggcccagggggctgcctggggagcctggaccacgtggtctgcttgggccaaaaggcccccctggcccacctggacctcctggtgtgacgggtatggatggccagcctggccccaaaggaaatgtgggtccccagggagagcctgggcccccaggacagcagggtaatcctggtgcccagggtcttcccggtccccagggtgccattggtcctccaggagaaaagggtcctttggggaaaccaggtctcccaggaatgcccggagctgatggacccccggggcaccctggcaaagaaggtcctccaggagagaaaggaggccagggtcctcccggcccccagggtcccattggctacccaggtccacgaggagtcaagggggcagatggcatccgagggctgaagggcaccaagggagagaagggtgaagacggcttccctgggtttaaaggcgacatgggaataaagggtgaccggggggagatcggcccacccggcccccgaggagaagatggtcctgaaggcccaaaaggtcgaggtggtcccaatggtgatcctggtcccctggggcccaccggggagaaggggaagctcggagtgccaggattaccagggtacccaggaagacaagggccaaagggttctattggattccctggcttcccgggcgccaacggagagaaaggtggcagggggacacctggaaagccaggaccacggggacagcgaggcccaacgggcccgaggggtgaacgaggcccacggggcatcactgggaagcctggccctaagggcaactcaggaggtgatggcccagccggccctcctggtgagcggggacccaatggaccccaaggccccaccggcttccctggacctaagggtcccccgggtccaccaggcaaggacgggctccccggacatcctgggcagagaggggagactggtttccaaggcaagactggccctccaggccctccaggagtggttggccctcagggtcccacaggcgagacgggtcccatgggggagcgtggccaccctggtcctccaggcccccctggtgaacagggcctcccaggtgctgctgggaaagaagggacgaagggtgacccaggtcctgctggcctccctgggaaggatggacctccaggattgcgtggattccctggggaccgagggctccccggccccgtgggagcactcggactgaaaggcagcgaaggcccccctggccccccaggtcctgcgggttctccaggggagagaggaccagctggtgctgctggacccattggaattccagggagacctgggcctcagggacctccggggcctgctggagagaaaggggttcctggagaggaaggtccgcaaggcccggctggccgagatggcctgcaaggtcccgtggggctccctggaccagccggccccgtgggtcctcctggagaagatggagataagggagagatcggagagcccgggcagaaagggagcaagggcgacaaaggcgagcagggtcctcctgggcctaccggtcctcaaggccccactgggcagccaggcccttcgggagcagatggtgaacctggccctcgtggacagcagggcctgtttgggcagaaaggagatgaaggttcaagaggtttcccaggaccgccagggccagtgggcttgcagggtttaccaggacctccaggagaaaagggtgagacaggagacgtgggccagatgggccctcctggtccaccaggcccccgaggaccctctggagctccaggagctgatgggccacagggtcctccaggagggattggcaaccctggtgcagtcggagaaaagggagagcctggcgaagctggagagcctggccttccaggagaaggaggtcccctgggacctaaaggagaaagaggggagaagggagaggctggcccctctggtgctgctggaccccctggacccaaaggcccacctggagatgatggccccaaaggcagccccggccccgtgggctttcctggagaccctgggccccctggagagccaggcccagcaggtcaagatggcccacctggtgacaaaggggatgatggagaacctgggcagacgggatccccaggccctactggtgaacctggtccatctgggcctccaggaaagaggggtccaccgggccctgcaggccctgaaggcaggcagggggagaaaggagccaagggagaagctggcttagaaggccctcctgggaagactggccccattggtccccaaggggcccctgggaagcctggccctgatggtcttcgtgggatccctggtcctgtgggtgagcaaggcctcccaggatccccaggccctgatggtccacccggccccatgggtcctccaggactccctggcctcaaaggagactccggtcccaaaggtgaaaagggccatccgggcctgattggactcatcggacctccgggcgaacaaggtgaaaaaggtgaccgaggactcccaggcccccagggctcatctggtcctaaaggagaacagggcattacaggtccttctggcccgcttgggcctcctggtcccccaggcttgccgggccctccaggtcccaaaggtgctaaaggttcatcgggtcccactggcccgaagggcgaggcaggccatccaggactccctggtccacccgggcctccaggcgaggtcatccagcccctgccaatccaggcgtccaggactcggcggaacattgatgccagtcagctcctggatgatggggctggggagagctacgtggattatgcagatggcatggaagagatctttggttccctcaactccctgaagctggagattgagcagatgaagcggccactgggcacacagcagaacccagcccgtacctgcaaggaccttcaactctgccatcctgatttcccagacggcgaatactgggtcgatcccaaccaagggtgctccagggactccttcaaagtctactgcaatttcacagctggagggtccacgtgcgtcttccctgacaagaagtctgagggagccagaatcacttcttggcccaaagaaaacccaggttcctggttcagtgaattcaagcgtgggaaactgctctcctatgtggatgctgaaggcaaccctgtgggcgtggtacaaatgaccttcctgcggctgctgagtgcctctgcccagcagaacatcacctacaactgctaccagtccgtggcctggcaggatgccgccacaggcagctacgataaggctatccgcttcttgggctccaacgatgaggaaatgtcttatgataacaacccctacatccgtgccctggtggatggctgtgctaccaagaaaggctaccagaagacggtgctggagattgacacgcccaaagttgagcaagtccccattgtggacatcatgttcaccgactttggtgaagcctcacagaaatttggatttgaagtagggccagcttgcttcctaggctaggagctgtgagcccaccgtctacc

SEQ ID NO: 1001 - protein, 1840 aa, Rattus norvegicus
  ref <308>: DATABASE ACCESSION NUMBER: Refseq / NP_604447
  ref <309>: DATABASE ENTRY DATE: 2003-01-13
MDVHTRWKAPRPGAPLLSSPLLLLLLLLWAPPPSRAAQPTDLLEMLDFHNLPSGVTKTTGFCATRRSSKEPDVAYRVSKDAQLSMPTKQLYPESDFPEDFSILTTVKAKKGSQAFLVSVYNEQGIQQLGLELGRSPVFLYEDHTGKPGPEEYPLFPGINLSDGKWHRIAISVYKKNVTLILDCKKKITKFLNRGDHPIIDVNGIIMFGSRILDDEIFEGDIQQLLFVSDHRAAYDYCEHYSPDCDTAVPDTPQSQDPNPDEYYPEGEGETYYYEYPYYEDPEDPGKEPAPSQKPVEAARETTEVPEEQTQPPSEAPTVPETSDTAGKEDNPGIGDYDYVPTDDYYTTSPYEDFGYGEGVENPDQPTNPDSGAEIPTSTSVTSNSSNPAPSPEEGKDDLGGEFTEETIKNLDENYYDPYFDPDSDSNVSPSEIGPGMPANQDTIYEGIGGPRGEKGQKGEPAIIEPGMLIEGPPGPEGPAGLPGPPGTTGPTGQMGDPGERGPPGRPGLPGADGLPGPPGTMLMLPFRFGGGGDAGSKGPMVSAQESQAQAILQQARLALRGPAGPMGLTGRPGPMGPPGSGGLKGEPGDMGPQGPRGVQGPPGPTGKPGRRGRAGSDGARGMPGQTGPKGDRGFDGLAGLPGEKGHRGDPGPSGPPGLPGDDGERGDDGEVGPRGLPGEPGPRGLLGPKGPPGPPGPPGVTGMDGQPGPKGNVGPQGEPGPPGQQGNPGAQGLPGPQGAIGPPGEKGPLGKPGLPGMPGADGPPGHPGKEGPPGEKGGQGPPGPQGPIGYPGPRGVKGADGIRGLKGTKGEKGEDGFPGFKGDMGIKGDRGEIGPPGPRGEDGPEGPKGRGGPNGDPGPLGPTGEKGKLGVPGLPGYPGRQGPKGSIGFPGFPGANGEKGGRGTPGKPGPRGQRGPTGPRGERGPRGITGKPGPKGNSGGDGPAGPPGERGPNGPQGPTGFPGPKGPPGPPGKDGLPGHPGQRGETGFQGKTGPPGPPGVVGPQGPTGETGPMGERGHPGPPGPPGEQGLPGAAGKEGTKGDPGPAGLPGKDGPPGLRGFPGDRGLPGPVGALGLKGSEGPPGPPGPAGSPGERGPAGAAGPIGIPGRPGPQGPPGPAGEKGVPGEEGPQGPAGRDGLQGPVGLPGPAGPVGPPGEDGDKGEIGEPGQKGSKGDKGEQGPPGPTGPQGPTGQPGPSGADGEPGPRGQQGLFGQKGDEGSRGFPGPPGPVGLQGLPGPPGEKGETGDVGQMGPPGPPGPRGPSGAPGADGPQGPPGGIGNPGAVGEKGEPGEAGEPGLPGEGGPLGPKGERGEKGEAGPSGAAGPPGPKGPPGDDGPKGSPGPVGFPGDPGPPGEPGPAGQDGPPGDKGDDGEPGQTGSPGPTGEPGPSGPPGKRGPPGPAGPEGRQGEKGAKGEAGLEGPPGKTGPIGPQGAPGKPGPDGLRGIPGPVGEQGLPGSPGPDGPPGPMGPPGLPGLKGDSGPKGEKGHPGLIGLIGPPGEQGEKGDRGLPGPQGSSGPKGEQGITGPSGPLGPPGPPGLPGPPGPKGAKGSSGPTGPKGEAGHPGLPGPPGPPGEVIQPLPIQASRTRRNIDASQLLDDGAGESYVDYADGMEEIFGSLNSLKLEIEQMKRPLGTQQNPARTCKDLQLCHPDFPDGEYWVDPNQGCSRDSFKVYCNFTAGGSTCVFPDKKSEGARITSWPKENPGSWFSEFKRGKLLSYVDAEGNPVGVVQMTFLRLLSASAQQNITYNCYQSVAWQDAATGSYDKAIRFLGSNDEEMSYDNNPYIRALVDGCATKKGYQKTVLEIDTPKVEQVPIVDIMFTDFGEASQKFGFEVGPACFLG

SEQ ID NO: 1002 - DNA, 424 bp, Rattus norvegicus
  ref <308>: DATABASE ACCESSION NUMBER: EMBL / AA866411
  ref <309>: DATABASE ENTRY DATE: 2000-03-03
ctttttttatcttgtaatgcaatgtattcagttgtgtactcgtgtagtgtttaaaattgatgcatgtgtgttttataagtgagcaagttggtactttcacttctgtgctttcttggatttttgtacaagagatgtgctgtgctaaacttgtgaaatacattgaggtgttctgtatgttgttctttgaatgggactgatggtccgtatcgacaaggaaggccctggagagttagcaggagttaacaacaacacagacctgaccaagagaaaggtcagggtccctttccatatgactccaattggcacaggaaacatccatgtggaatggactgatttgaattggactgttttcagtttaagcagttagcacactttgcaaaacatgtatccaaccccaccataaataaactttaaaatgagcttt

SEQ ID NO: 1003 - DNA, 1897 bp, Homo sapiens
  ref <308>: DATABASE ACCESSION NUMBER: Refseq / NM_002487
  ref <309>: DATABASE ENTRY DATE: 2003-01-15
acttcctctccaggaatccgcggagggagcgcaggctcgaagagctcctggacgcagaggccctgcccttgccagacggcgcagacatgtcagaacaaagtaaggatctgagcgaccctaactttgcagccgaggcccccaactccgaggtgcacagcagccctggggtttcggagggggttcctccgtccgcgaccctggcagagccgcagagccctcctctaggcccgacggccgctccgcaggccgcgccgcctccccaggccccgaacgacgagggcgacccgaaggccctgcagcaggctgcggaggagggccgcgcccaccaggccccgagcgcggcccagccgggcccggcaccgccagccccggcgcagctggtgcagaaggcgcacgagctcatgtggtacgtgctggtcaaggaccagaagaagatgatcatctggtttccagacatggtgaaagatgtcatcggcagctacaagaagtggtgcaggagcatcctccggcgcaccagcctcatcctcgcccgggtgttcgggctgcacctgaggctaaccagcctgcacaccatggagtttgcgctggtcaaagcgctggagcccgaggagctggacagggtggcgctgagcaaccgcatgcccatgacaggcctcctgctcatgatcctgagcctcatctacgtgaagggccgcggcgccagagagagcgccgtctggaacgtgctgcgcatcctggggctgcggccctggaagaagcactccaccttcggggacgtgcggaagctcatcactgaggagttcgtccaaatgaattacctgaagtaccagcgcgtcccatacgtggagccgcccgaatacgagttcttttggggctcccgggccagccgcgaaatcaccaagatgcaaatcatggagttcctggccagggtctttaagaaagacccccaggcctggccctcccgatacagagaagctctggaggaggccagagctctgcgggaggctaatcccactgcccactaccctcgcagcagtgtctctgaggactagcaaagtctggaggcagatgaatggtttctgaccctcaccagggctgtggaagggtgggggtgggtcattatagtattcaggatttacagtgcagtattcacgtgtaacttttaagttttcagtacagtgcttttatacctttaatgcaatgttgtattcatttgggtactattgtgtagtatttaggatgtatgcatgtttgtttatatgtaagcttggttggtgctttcgcttttgtgctacctttcttggatttttgtaccagagatgtgctaaactgatgaaatacattgagaaagtttccatcttattcttttatatgggactgatgatgtgtgttggggtagactgctcctgcagagtttggaagaagtcaccagcaaagccggcctaaccaagaaaagtcaaggcccttcatgaccttgctgggcacagaaaacaccctcgtggagtacactaatttgaactggactggtctcagtgtgagcacttggcacactttactaaacacatatacaaccccaccgtgagtcaactttaaagtaaacattaaagattcttgtgatacaatcatttttggaaaagtgtactttatcattttaacaaagcagtatggttgggaatgagacaattctctattttacagtgtatacagatacaactatttcccctaatagggtgggaaaaatcgctactcatgattactcctaaatttgtgaagtttatagttctattgtctttaaatgtaactcatgtttatttcaaaaacattcacaaatatagaaaagtatacaaaacaaaacagtaagattgtctgtaatcacatcatatgggaataaaaaaca

SEQ ID NO: 1004 - protein, 321 aa, Homo sapiens
  ref <308>: DATABASE ACCESSION NUMBER: Refseq / NP_002478
  ref <309>: DATABASE ENTRY DATE: 2003-01-15
MSEQSKDLSDPNFAAEAPNSEVHSSPGVSEGVPPSATLAEPQSPPLGPTAAPQAAPPPQAPNDEGDPKALQQAAEEGRAHQAPSAAQPGPAPPAPAQLVQKAHELMWYVLVKDQKKMIIWFPDMVKDVIGSYKKWCRSILRRTSLILARVFGLHLRLTSLHTMEFALVKALEPEELDRVALSNRMPMTGLLLMILSLIYVKGRGARESAVWNVLRILGLRPWKKHSTFGDVRKLITEEFVQMNYLKYQRVPYVEPPEYEFFWGSRASREITKMQIMEFLARVFKKDPQAWPSRYREALEEARALREANPTAHYPRSSVSED

SEQ ID NO: 1005 - DNA, 455 bp, Rattus norvegicus
  ref <308>: DATABASE ACCESSION NUMBER: EMBL / AI177256
  ref <309>: DATABASE ENTRY DATE: 1999-01-22
ggcacgaggtatgcattctgtattgcgaacaaagtccatcctgtgcctctagagttggcacacatgctcgcggatgcattcgggatttttgaaagtaaaccttaaaaactggcagcagtatttgactctggaaaggggaaatcggcgacgagggagaacaacagcttttgctctttgcgactctaggttctctaccatgtggtacttgacggagttttgctttgcatgtgtttttcacttatgaatttgtaaatgactttctcagttcttatcaacctgtatcctggataaacatttcataatcatagtggatattgatagtggatagtgaatgggggaattcgaaaactatacaacataatagatttttttagtacctaacatttagaagtgtggactcactgtcatatttgattcaagcttgttttttttttaataataaaagccataaaata

SEQ ID NO: 1006 - DNA, 629 bp, Rattus norvegicus
  ref <308>: DATABASE ACCESSION NUMBER: EMBL / AI232379
  ref <309>: DATABASE ENTRY DATE: 2000-03-03
cattcagcagggatacatttttattttcaaacagtgttttgactggatcctggtttccttttggcctcctgcagagtccctggaaggaaatttaccaattttctctgctttctattcttatttttatgatgacaatcaaagctggcccgaagaacccaatttgtgactttttttttttaaataatcagtgatgtccttaaaatgtggtctgccaacctgtacaaaatggtcctatatttttgaagagggacgtgagataaaatgatgttatacatcgatatgtatatatctgttgctatgtagacttggagaatactgccaaaacgtgtatgacaagctgtatcactgcctttgtttatatttttttaactgtgatattccccacaggcacgttaactgttgcacttttgaatgtccaaaatttatattttagaaggaataaagagaaaaatacttacatgttcccaacatggtggtgtggtaaatgtgtgagagcaactccatagagagggtcttccaatccaagatggcttccagatacccgtgttcatgttttgtttaaaaaaaaaaagaagtgtaaatggagatctttatatttcaataaatgatttatgatatatgattttaaa

SEQ ID NO: 1007 - DNA, 4301 bp, Rattus norvegicus
  ref <308>: DATABASE ACCESSION NUMBER: Refseq / NM_019206
  ref <309>: DATABASE ENTRY DATE: 2002-11-05
ggcacgagaagtcggaccctcccaccctgctcacaccctccaagtggtccacggagttccgagactttctgaagatagccttggataagaacccagaaacccggcccagtgctgcgcagctgctgcagcatcccttcgtcagtacagtcaccagtaataaggcccttcgggagctggtggctgaggcgaaggctgaggtgatggaggagatcgaggacggcaaggaggacggcagggaggacggcagggaggatgggaaagaggaggattgagacgagaaggatgctgtgagtgctgttccgcccccagtcaaccacactcaggactcctctgccaatggaactcagccaagcctcaactctgacaagcttctccaggattcttctacccccctgcctcccagccagcctcaggagcctgtgaacgggccctgtaaccaaccctcaggggatggatccccccagaacaccagccctgcagatgaggtctccaagaatgacaatggcttaaaggtacctgttcccctccggaagtcccggccattgtccgtggatgccagaattcaggtgaccgaagagaaacaaatcactgaccaggctgagaaccccagttctgcagccagcaaacccccgaaggtcaaccagagccgacctaacagcagcgccctggagactttgggtgtcgagactctggccaatggaggcctggagctccctggctctgtaactccaaaccattctaagagggcgtcggactgtagcaacctgtctacctcagagagcatggactacggcacctccttgtctgctgacctgtcattgaacaaagagacgggctcattgtctctcaagggctcaaaactgcacaacaagaccctgaagaggacccgccggtttgtggtggacggtgtggaggtgagcatcaccacctccaagatcatcagcgaagacgagaagaaagacgaggagatgaggtttctcaggcgccaggaactccgagagcttcggctcctgcagaaagaagagcatcggaaccagacgcagctgagcaccaagcacgagctgcagctggagcagatgcacagacgatttgaacaagaaatcaacgccaagaagaaattctatgacgtggagctagagaacctggagcggcagcagaagcagcaggtggagaagatggagcaggaccacagcgtgcgtcgcagagaggaggccaagcggatccgcctggagcaggatcgagactacgccaggttccaagagcagctcaagcagatgaagaaggaggtgaagaatgaggttgagaaactgccccggcaacagcggaaggagagcatgaagcagaagatggaggagcacgcacagaagaaacaactgctggaccgagactttgtagccaagcagaaggaagacctggagctggccatgaagaagctcacggcagaaaacaggcgtgagatctgtgacaaggaacgtgattgccttaacaagaagcaggagctcctccgagaccgagaggcagccctgtgggagatggaggagcaccagttacaggagagacatcagctggtgaagcagcagcttaaggaccagtacttcctgcagcggcatgacctgctgcgcaagcacgagaaggagcgggagcagatgcagcgctacaaccagcgtatgatggagcagctgaaggtcagacagcagcaggagaaggcgcggctacccaagatccagaggagtgacggcaagacccgcatggccatgtacaagaagagcctgcacatcaatggtgcgggcagtgcctccgagcagcgggagaaggtcaagcagttctcccagcaggaagagaagaggcagaaggcggagaggctgcagcagcagcagaaacacgagaaccagatgcgagacatggtggcacagtgcgagagcaacatgaacgagctgcagcagctgcagaatgaaaagtgtcatctgttagtggagcatgaaacccagaagctgaaggccctggacgagagccataaccagagcctgaaggaatggcgagacaagcttcggccacgcaaaaaggccctggaagaggatttgaaccagaagaagcgggaacaggaaatgttcttcagactaagtgaggaggcagagaccagacccaccacacccaacagagccagcaagttcttcccctacagctctggggatgcttcctaacacacacatgcctgggctgcggtgcggcagtacagccaccagggccaccaaccctctacaaacaagtgactcaggacctcttcctcttgcttctgtgccagctccaactacccagcaccccagttgcccacagcaccaccccagtgcttctgatggatgacctcatcccaactcagattcccatcacctggaagtgacctgggctgttggggtccgggaccgagcgggatgggcgtacccctcctgtttgccaaaacaccagctctactgtctgtgggcacaagcgctactgatgacatcaccacgaacccatccttattgtgatccttgtggttttttcttctccttcagtaattcctcacagtgttggaaaacatccctcagagccattttgcttctcagcagccagctctcaggggtgtccccattaccctgcttcgcacagctgactttgtgctcgatgagacgctgtgtatgtgggggtagggagtggggaaagggaggccagaaatgttcattctgctggtttctgacattttatgccatctcattttgcctctccctgtcacacacacacacacacacacacacacacacacacacacacacacacacacaatgcaaacacacaacttggccctcctgaacctgatcgtaggacacggagtacagagcatgtcaggtggagcagctgctggggcatgctgagtgctggccccaaagcccagagaaggcacaggctgtactgcagcctgcctgccactcgtttggctgcacacaggatcctgtgttcaggggtaaactcccctccacacttgtcttctgctgcctagcgcatgccaatctcgcccttgcccagttgttggcaagtactggggaaggctcctgacctttgacctttgccccagtcctgcactggagtcccactgtacatttccactaagccggacagtcctttggacttctctgtttaggaagagatgcttcccacccctgggaacagccgaagctcaggaaaatgccaagcctcgtgcctgggcctttgggttgctcaggtagcctcccaagatgctgcgccccataggctaccatgcccagaaaagcagctggtcggcccagccggcgttcgctgatagcgccttagggctcagttaaagcacaggtaaatggctggctgctttgtataccctccttttagacagcatcaccccagggattaggatgggatgggtgggggcggggcacccaggcagtggagtctgggagtggctgagacctcagcagtatttccccatcactgccccatgctgagacaaccttctaggacgtttcctcagatgctgactgggtgcttgggaggggagtgggctagtaaaacaaaataggaaaacaggtcttgggactcccagatcttgtgtgcagtaaggaagttcacagagccccaggaaggcgatagttctcagggtagcgagcgtcagcttgctttcaggccgcacaccgaggagtcttgaggaacagttgacttctttcttactggtgcatgggggctgggaaacacaagttgtcagagtgcagctgtgggactcagagatgggaagtgggcaaggccacgccctgcagggctctaccattgtttacaatgtacttggctgcattcgggggtggggggaacttgacagtggctattaggcaaaatgccggttttgtggttcaggtaacagtctttgaccactccctgacgtcattcgtactgtcctcctccttgttgcttccacacttagtcccacctgagctctggtacctctgctgtgccttttttgagtggggtctagccttgtcttccagcctcataatttaacctaagtgcaatgcctgccaccgacaaaggcccgtgaagtattcctcatgtcctgtgctaacgttttctgtataggaacaggcagaaatgtctttagcaccgcggatataactaacttatatttcccttcacgaaggatagaagtaacgggtgtgtcatttccaacggtcatgtataatttttgtaaactgttctctgcaaacaaaaaaaatgtaaatatgcttctaataaaataataaggt

SEQ ID NO: 1008 - protein, 472 aa, Rattus norvegicus
  ref <308>: DATABASE ACCESSION NUMBER: Refseq / NP_062079
  ref <309>: DATABASE ENTRY DATE: 2002-11-05
MDYGTSLSADLSLNKETGSLSLKGSKLHNKTLKRTRRFVVDGVEVSITTSKIISEDEKKDEEMRFLRRQELRELRLLQKEEHRNQTQLSTKHELQLEQMHRRFEQEINAKKKFYDVELENLERQQKQQVEKMEQDHSVRRREEAKRIRLEQDRDYARFQEQLKQMKKEVKNEVEKLPRQQRKESMKQKMEEHAQKKQLLDRDFVAKQKEDLELAMKKLTAENRREICDKERDCLNKKQELLRDREAALWEMEEHQLQERHQLVKQQLKDQYFLQRHDLLRKHEKEREQMQRYNQRMMEQLKVRQQQEKARLPKIQRSDGKTRMAMYKKSLHINGAGSASEQREKVKQFSQQEEKRQKAERLQQQQKHENQMRDMVAQCESNMNELQQLQNEKCHLLVEHETQKLKALDESHNQSLKEWRDKLRPRKKALEEDLNQKKREQEMFFRLSEEAETRPTTPNRASKFFPYSSGDAS

SEQ ID NO: 1009 - DNA, 4221 bp, Homo sapiens
  ref <308>: DATABASE ACCESSION NUMBER: Refseq / NM_005990
  ref <309>: DATABASE ENTRY DATE: 2001-02-03
cagcccgagcccgagcccgagcccgagccggcgccaccgcgcccccggccatggcttttgccaatttccgccgcatcctgcgcctgtctaccttcgagaagagaaagtcccgcgaatatgagcacgtccgccgcgacctggaccccaacgaggtgtgggagatcgtgggcgagctgggcgacggcgccttcggcaaggtttacaaggccaagaataaggagacgggtgctttggctgcggccaaagtcattgaaaccaagagtgaggaggagctggaggactacatcgtggagattgagatcctggccacctgcgaccacccctacattgtgaagctcctgggagcctactatcacgacgggaagctgtggatcatgattgagttctgtccagggggagccgtggacgccatcatgctggagctggacagaggcctcacggagccccagatacaggtggtttgccgccagatgctagaagccctcaacttcctgcacagcaagaggatcatccaccgagatctgaaagctggcaacgtgctgatgaccctcgagggagacatcaggctggctgactttggtgtgtctgccaagaatctgaagactctacagaaacgagattccttcatcggcacgccttactggatggcccccgaggtggtcatgtgtgagaccatgaaagacacgccctacgactacaaagccgacatctggtccctgggcatcacgctgattgagatggcccagatcgagccgccacaccacgagctcaaccccatgcgggtcctgctaaagatcgccaagtcagaccctcccacgctgctcacgccctccaagtggtctgtagagttccgtgacttcctgaagatagccctggataagaacccagaaacccgacccagtgccgcgcagctgctggagcatcccttcgtcagcagcatcaccagtaacaaggctctgcgggagctggtggctgaggccaaggccgaggtgatggaagagatcgaagacggccgggatgagggggaagaggaggacgccgtggatgccgcctccaccctggagaaccatactcagaactcctctgaggtgagtccgccaagcctcaatgctgacaagcctctcgaggagtcaccttccaccccgctggcacccagccagtctcaggacagtgtgaatgagccctgcagccagccctctggggacagatccctccaaaccaccagtcccccagtcgtggcccctggaaatgagaacggcctggcagtgcctgtgcccctgcggaagtcccgacccgtgtcaatggatgccagaattcaggtagcccaggagaagcaagttgctgagcagggtggggacctcagcccagcagccaacagatctcaaaaggccagccagagccggcccaacagcagcgccctggagaccttgggtggggagaagctggccaatggcagcctggagccacctgcccaggcagctccagggccttccaagagggactcggactgcagcagcctctgcacctctgagagcatggactatggtaccaatctctccactgacctgtcgctgaacaaagagatgggctctctgtccatcaaggacccgaaactgtacaaaaaaaccctcaagcggacacgcaaatttgtggtggatggtgtggaggtgagcatcaccacctccaagatcatcagcgaagatgagaagaaggatgaggagatgagatttctcaggcgccaggaactccgagagcttcggctgctccagaaagaagagcatcggaaccagacccagctgagtaacaagcatgagctgcagctggagcaaatgcataaacgttttgaacaggaaatcaacgccaagaagaagttctttgacacggaattagagaacctggagcgtcagcaaaagcagcaagtggagaagatggagcaagaccatgccgtgcgccgccgggaggaggccaggcggatccgcctggagcaggatcgggactacaccaggttccaagagcagctcaaactgatgaagaaagaggtgaagaacgaggtggagaagctcccccgacagcagcggaaggaaagcatgaagcagaagatggaggagcacacgcagaaaaagcagcttcttgaccgggactttgtagccaagcagaaggaggacctggagctggccatgaagaggctcaccaccgacaacaggcgggagatctgtgacaaggagcgcgagtgcctcatgaagaagcaggagctccttcgagaccgggaagcagccctgtgggagatggaagagcaccagctgcaggagaggcaccagctggtgaagcagcagctcaaagaccagtacttcctccagcggcacgagctgctgcgcaagcatgagaaggagcgggagcagatgcagcgctacaaccagcgcatgatagagcagctgaaggtgcggcagcaacaggaaaaggcgcggctgcccaagatccagaggagtgagggcaagacgcgcatggccatgtacaagaagagcctccacatcaacggcgggggcagcgcagctgagcagcgtgagaagatcaagcagttctcccagcaggaggagaagaggcagaagtcggagcggctgcagcaacagcagaaacacgagaaccagatgcgggacatgctggcgcagtgtgagagcaacatgagcgagctgcagcagctgcagaatgaaaagtgccacctcctggtagagcacgaaacccagaaactgaaggccctggatgagagccataaccagaacctgaaggaatggcgggacaagcttcggccgcgcaagaaggctctggaagaggatctgaaccagaagaagcgggagcaggagatgttcttcaagctgagcgaggaggcggagtgcccaaacccctccaccccaagcaaggccgccaagttcttcccctacagttctgcggatgcttcttaacaaccgcccggggctgtggctggcagcttggtgggccccagggccttctccttcattctctgtgaacatgtaactcaggaccccttttccctcttgcgtctgtgccagctcaaatccagcccctcgccctgtgccaccccaactgtgcctgatagacctgccccagcgttcctgacttcttgctggcctgtggagggtgaggtgtaattatttgtcacctgaacctaatgtatattctccttgagccccagatcccttcaagctggaagggatggggctgttggtggggtcagggtccaagaggaatgggtgttctgtggcctcgagtcctctcctgtttgcgaaaataccagttttgctctctgtgggacaaagcactgctgatgaagtccccgtgggctcatccgggctggaattcttggtttttcagccattccctgcagagtcactcaatcatcaagtccctcacagccatttctgttcccagaggagccaggcctgcagctggctgctcaggagatggcctcattcctcctgttctcccagtttgctttccacttaagacaaagccttgtctatgtggggggcggggaccggggaaagagggaggctgaaatgtttattctgcttctcccgtgtttcatgccatctcgcgtcccccttcctgcacatgggtgtgaatgcacacacatacgcgtacacacaggacttggtctgctggcctggcctcttctgcccaggtgggttggaacacgtttgctgcctgagcctgtgccactgagcatgttaggtggagcagttggtgtggcacgtgcggggtgttggcaccggaggcatggaaaagcacaggctgtactgccaggctgcgatgcgtgctggcccccgcacaggctcctgtgtgcagggactgattcctcagcacacgaggcttccacaacccagtctgctccatagcactctggcccaccctgtctgcaggtgaaacaggagggctgtttgcctctgccccatccccccgactgtgttcaggagtcccaccttgcatttcagacctgggctggcagtctgttggacttctcttcaggaagaaaaagcatcagggggaaatggaatgcccctgccccaggaacatggcagaagcacaggttctgtacctcagatggactcctgctgggccttcggggtctcagttggcttcccccagattctgattctacagctgcagaatgtatataacacaataaaagcaaatgtttgaaccagt

SEQ ID NO: 1010 - protein, 968 aa, Homo sapiens
  ref <308>: DATABASE ACCESSION NUMBER: Refseq / NP_005981
  ref <309>: DATABASE ENTRY DATE: 2001-02-03
MAFANFRRILRLSTFEKRKSREYEHVRRDLDPNEVWEIVGELGDGAFGKVYKAKNKETGALAAAKVIETKSEEELEDYIVEIEILATCDHPYIVKLLGAYYHDGKLWIMIEFCPGGAVDAIMLELDRGLTEPQIQVVCRQMLEALNFLHSKRIIHRDLKAGNVLMTLEGDIRLADFGVSAKNLKTLQKRDSFIGTPYWMAPEVVMCETMKDTPYDYKADIWSLGITLIEMAQIEPPHHELNPMRVLLKIAKSDPPTLLTPSKWSVEFRDFLKIALDKNPETRPSAAQLLEHPFVSSITSNKALRELVAEAKAEVMEEIEDGRDEGEEEDAVDAASTLENHTQNSSEVSPPSLNADKPLEESPSTPLAPSQSQDSVNEPCSQPSGDRSLQTTSPPVVAPGNENGLAVPVPLRKSRPVSMDARIQVAQEKQVAEQGGDLSPAANRSQKASQSRPNSSALETLGGEKLANGSLEPPAQAAPGPSKRDSDCSSLCTSESMDYGTNLSTDLSLNKEMGSLSIKDPKLYKKTLKRTRKFVVDGVEVSITTSKIISEDEKKDEEMRFLRRQELRELRLLQKEEHRNQTQLSNKHELQLEQMHKRFEQEINAKKKFFDTELENLERQQKQQVEKMEQDHAVRRREEARRIRLEQDRDYTRFQEQLKLMKKEVKNEVEKLPRQQRKESMKQKMEEHTQKKQLLDRDFVAKQKEDLELAMKRLTTDNRREICDKERECLMKKQELLRDREAALWEMEEHQLQERHQLVKQQLKDQYFLQRHELLRKHEKEREQMQRYNQRMIEQLKVRQQQEKARLPKIQRSEGKTRMAMYKKSLHINGGGSAAEQREKIKQFSQQEEKRQKSERLQQQQKHENQMRDMLAQCESNMSELQQLQNEKCHLLVEHETQKLKALDESHNQNLKEWRDKLRPRKKALEEDLNQKKREQEMFFKLSEEAECPNPSTPSKAAKFFPYSSADAS

SEQ ID NO: 1011 - DNA, 1882 bp, Rattus norvegicus
  ref <308>: DATABASE ACCESSION NUMBER: Refseq / NM_022399
  ref <309>: DATABASE ENTRY DATE: 2003-01-13
cgggggccagtgtgccgccgccccctcggcccgccatgctcctttcggtgccgctcctgcttggcctcctcggcctggctgccgcagaccctgccatctatttcaaagagcagttcttggacggagatgcctggaccaaccgctgggtcgaatccaaacataagtctgattttggcaaattcgtcctcagttctggcaaattctacggggaccaggagaaggataaagggttgcagacaagccaagatgcccgattttacgcgctgtccgccagattcgaacccttcagcaacaagggccagacactggtggtacagttcaccgtgaagcatgagcagaatatcgactgtgggggcggctacgtgaagctgtttccgggtggcttggaccagaaggacatgcatggagactcagaatataacatcatgtttggtccggacatctgcggtcctggcaccaagaaggttcatgtcatctttaactacaagggcaagaacgtgctgatcaacaaggatatccggtgtaaggatgatgaattcacacatctatacacgctgattgtgcggccagacaacacctacgaggtgaaaattgacaacagccaggtggagtcgggctccttggaggatgattgggactttctgccgcccaagaagattaaggatcctgacgctgccaagccagaagactgggatgaacgagccaagattgatgaccccacagattccaagcctgaggactgggacaagccagagcacatccctgaccctgatgctaagaagcctgaggactgggacgaagagatggatggagagtgggaaccaccagtgattcaaaatcctgaatacaagggcgaatggaagccacgtcaaattgacaacccagattacaagggtacctggatacacccagagattgacaatcctgaatactcccccgatgcgaatatctatgcctatgatagttttgctgtactgggcttagacctctggcaggtcaagtctggcacaatttttgacaacttcctcatcaccaatgatgaggcctatgcagaggagtttggcaatgagacctggggtgtcaccaaggctgcagagaagcagatgaaggacaagcaggatgaggagcagaggcttaaggaagaagaagaagacaagaagcgtaaagaggaagaggaggccgaggataaagaggatgaggatgacagagatgaagatgaagatgaagaggatgagaaggaagaagatgaggaggatgccactggccaagccaaggatgagctgtagaggccacaccacctgcctccagggctggactgaggcctgaacacccgccacagagctggctgctccaataatgtctctatgagactcaagaacttttcattttttttccaggcaggttcaggtctggggtggattctgatttttgttccccctgcctcccccaatccctcccccaaccccccctttttttttactggtgtttgtctttaattcttcagccctcaacctcctggcctctcatttttgaatcaacattttttctttctgtccctttctccatctcttggtcactatcctccaactctaggaacaggtatggaggaaaagccctaggcttgagatttcatctgctctcctttctgaatctcagaggagggtaggagaagggggtggtatcttccctccccccagcactgaggaagaatggggctcttcccctttctcccttgcccccaggactgggccatttgtggggcagccagttctagcacagctcacactgagagtgtaagaactacaaacaaaatttctattaaattaagttttgtgtcttcaaaaaaaaaaaaaaaaaaaaaaaaaaaaaaaaaaaaaaaaaa

SEQ ID NO: 1012 - protein, 416 aa, Rattus norvegicus
  ref <308>: DATABASE ACCESSION NUMBER: Refseq / NP_071794
  ref <309>: DATABASE ENTRY DATE: 2003-01-13
MLLSVPLLLGLLGLAAADPAIYFKEQFLDGDAWTNRWVESKHKSDFGKFVLSSGKFYGDQEKDKGLQTSQDARFYALSARFEPFSNKGQTLVVQFTVKHEQNIDCGGGYVKLFPGGLDQKDMHGDSEYNIMFGPDICGPGTKKVHVIFNYKGKNVLINKDIRCKDDEFTHLYTLIVRPDNTYEVKIDNSQVESGSLEDDWDFLPPKKIKDPDAAKPEDWDERAKIDDPTDSKPEDWDKPEHIPDPDAKKPEDWDEEMDGEWEPPVIQNPEYKGEWKPRQIDNPDYKGTWIHPEIDNPEYSPDANIYAYDSFAVLGLDLWQVKSGTIFDNFLITNDEAYAEEFGNETWGVTKAAEKQMKDKQDEEQRLKEEEEDKKRKEEEEAEDKEDEDDRDEDEDEEDEKEEDEEDATGQAKDEL

SEQ ID NO: 1013 - DNA, 275 bp, Homo sapiens
  ref <308>: DATABASE ACCESSION NUMBER: EMBL / AA654394
  ref <309>: DATABASE ENTRY DATE: 2000-03-03
ttttaagacacaaaacttaatttaatagaaattttgtttgtagttcttacactctcagtgtgagctgtgctagaactggctgccccacaagtggcccagtcctgggggcaagggagaaaggggatgagaagagccccattcttcctcagtgcggggggagggaaaacaccacccccttctcctgccctcctctgagatgcaggaaggagagcagatgaaatctcaagcctagggcttctcctctacacccctgttcctagagttggagggtagtg

SEQ ID NO: 1014 - DNA, 867 bp, Rattus norvegicus
  ref <308>: DATABASE ACCESSION NUMBER: EMBL / S79213
  ref <309>: DATABASE ENTRY DATE: 2000-03-04
tggtagtggtttccgcgacaggcaggtgcgactgctttagcccggcctgggctccacggctgcctggagggtctctgcagtgcccaccccttctcctccgggaccccacgccagcagcgaccctgagccagcagccggagcgaccggcaatggcggcctcgacggcctcgcaccggcccatcaagggaatcctgaagaacaagacctctacgacttcctcggtggtggcctcggccgaacagccccgccggaccgtcgaagaggagctgagtaaaaagtctcagaagtgggatgaaatgaacatcctggcaacatatcatccagctgacaaagactacggcttgatgaagatagacgagccagacactccataccacaatatgataggtgatgatgaagatgtctgtagtgattcagaaggcaatgaagtcatgactccagagatcttagcgaaaaagttagctgctgctgagggctccgagccaaagtttcggactcgggaacaagaaagcagtggagaggaagacaatgacctctcccctgaagagcgagaaaagaagcggcagtttgaaatgaaaaggaagcttcattacaacgaaggactgaatattaaattagccagacagttaatttcaaaagacctacatgatgatgacgaagatgaagaaatgtcagagactgcagatgcagacagcatgaatattgaagagtcaaatcaaggatctactgcaggcgaccatctgcagcacaaatcacaaagttcataaacgtgttcatcagtgcagtcgttgtcaaatacaaaccttgttacttataccacactgcttcttgttctctacgactcgtgactatgtaccaaaatacaca

SEQ ID NO: 1015 - DNA, 3177 bp, Rattus norvegicus
  ref <308>: DATABASE ACCESSION NUMBER: Refseq / NM_031047
  ref <309>: DATABASE ENTRY DATE: 2003-02-21
gctgccttggccagagtccggagcagccgccgcccgagcgccccgagctcagttcgctgcctgcgccggctgtctcccggccagacccgaccccgacccggctcggcccggctccacgctcaggtacaccggatagggccacgatggaggtgatgaaccttattgaacagcccatcaaggtgacggagtggcagcagacgtacacctatgactcgggcatccactccggtgtcaatacctgtgtgccctctgtcagcagcaagggcctcctcgatgaggatgacacctgcggcagacagtacacactcaagaaaactaccacctacacacaaggggtgccacagagccaaggcgacctggagtaccagatgtccaccacggccagagccaagcgggtgcgggaggccatgtgcccaggtgtctcaggcgaggacagttctctcctcctggccacccaggtggaggggcagacgaccaacctgcagcgactggccgaaccatcccagctactcaagtcggccattgtacatctcatcaactaccaggacgacgcagagctggccacccgggctctgcctgagctcaccaagctgctcaacgatgaggacccggtagtggtcaccaaggcggctatgatcgtgaaccagctgtccaagaaggaggcatcccgccgtgccctgatgggctcgccccagctggtggcggctgtggtgcggaccatgcagaacaccagtgacctggatactgcccgctgtaccaccagcatcctgcacaacctctcccaccaccgagaggggctgcttgctatcttcaagtctggaggcatccccgccctggtccgaatgctcagttcccccgtagagtctgtcctgttctacgccatcaccacactgcacaacctgctgctctaccaggagggcgccaagatggcggtgcgtctggcagacggactgcagaagatggtgcccctacttaacaagaacaaccccaaattcctggccatcaccaccgactgcctgcagctcctggcctatggcaaccaggagagcaagctgatcatcctggccaatgggggaccccagggtcttgtgcagatcatgaggaactacagctacgagaagcttctgtggaccaccagccgggtgctcaaggtgctctccgtgtgccccagcaacaagcctgccatcgtggaggctggtgggatgcaggctctaggcaagcacttgacaagcaacagcccccgcctggtgcagaactgcctgtggactctgcgcaatctctcggatgtggccaccaagcaggagggcctggagaacgtgctgaagatcctggtcaatcagctgagcgtggatgatgtcaacgtcctcacctgtgccacgggccacctctccaacctgacctgcaacaacagcaaaaacaagacgctggtgacgcagaacagtggcgtggaggcgctcatccacgccatcctcagagccggagacaaggacgacatcacagagcccgccgtttgcgccctgccgcaccttaccagccgccaccctgaggctgagatggcccagaactctgtgcgcctcaactatggaatcccggccattgtgaaactgctcaaccagccgaaccagtggccactggtcaaggcaactatcggcctgatccggaacctggctctgtgccccgccaatcatgccccgctgcaggaggccgcggtcattccccgcctcgttcagctgctggtcaaggcccaccaggatgcccagcgacatgtagctgcgggcacccagcagccctacacggatggtgtgaggatggaggagatcgtggagggctgcaccggagccctgcacatcctcgcccgagatcccatgaaccgcatggagatcttccggctcaacaccattcccctgtttgtccagctcctgtattcctctgtggagaacatccagcgtgtggctgccggagtgctgtgcgagctggcccaggacaaggaggctgccgatgccatagacgcggagggcgcctctgcccctctcatggaactgctccactcccgcaatgaggggaccgcgacctacgctgctgctgtcctgttccgcatctccgaggacaagaacccagattaccgtaagcgagtgtctgtggaactcaccaactcgctcttcaagcatgacccagctgcctgggaggctgcccagagcatgatcccgatcaacgaaccctatgcagacgacatggatgcaacctaccgccccatgtactccagcgatgtgcctctggaccccctggatatgcacatggacatggatggcgactaccccatggacacctacagcgacggcctgagacctccctaccccgctgcagaccacatgctggcctagctggctccacctcactcagagctgtttctcacctggaaagctctccagagcagactgtgggacgagacagtacctaagccccgggagccagcctggacttcctgctgcacacgcgctccagagagttcctccgtagggattttgggatggtgtctctcccgcttttctgtcctgggctggggatccaggctcagtactttctccccctccccactatggctatgaccactaaagctttagactcggcctgtgtccctgtacagcagccctctctgctgactccagctgcctggacccccagggcttcctttgtttttccggggccagttttctcaatgaactaaagcatccaactgccctgacctcctgggatatccaagacacaggttcaaggcccaaacccttcacatccaaagcttcttttgaaaagttcagggaccttcttgggggtagcgggagagagtggagactttttaagtgcccctgctaggacctgcccttctcttcaggatgctaagtctgccttgcccctcccaagggtgaagctccctctcacactgctccacactggcccatctgacctgcagaagtgctctagctcacccctctggtgtgtggtgaggggctttcttctcccactcctttttgactcccaccacctcctgcacatgggtttggggaggactgaaatggaagtcccctcagagagtcttattatcaacactttatgttttggttattggtttttctttcctttttgtttttgtatagaccaaagcaaagaaaataaaataac

SEQ ID NO: 1016 - protein, 745 aa, Rattus norvegicus
  ref <308>: DATABASE ACCESSION NUMBER: Refseq / NP_112309
  ref <309>: DATABASE ENTRY DATE: 2003-02-21
MEVMNLIEQPIKVTEWQQTYTYDSGIHSGVNTCVPSVSSKGLLDEDDTCGRQYTLKKTTTYTQGVPQSQGDLEYQMSTTARAKRVREAMCPGVSGEDSSLLLATQVEGQTTNLQRLAEPSQLLKSAIVHLINYQDDAELATRALPELTKLLNDEDPVVVTKAAMIVNQLSKKEASRRALMGSPQLVAAVVRTMQNTSDLDTARCTTSILHNLSHHREGLLAIFKSGGIPALVRMLSSPVESVLFYAITTLHNLLLYQEGAKMAVRLADGLQKMVPLLNKNNPKFLAITTDCLQLLAYGNQESKLIILANGGPQGLVQIMRNYSYEKLLWTTSRVLKVLSVCPSNKPAIVEAGGMQALGKHLTSNSPRLVQNCLWTLRNLSDVATKQEGLENVLKILVNQLSVDDVNVLTCATGHLSNLTCNNSKNKTLVTQNSGVEALIHAILRAGDKDDITEPAVCALPHLTSRHPEAEMAQNSVRLNYGIPAIVKLLNQPNQWPLVKATIGLIRNLALCPANHAPLQEAAVIPRLVQLLVKAHQDAQRHVAAGTQQPYTDGVRMEEIVEGCTGALHILARDPMNRMEIFRLNTIPLFVQLLYSSVENIQRVAAGVLCELAQDKEAADAIDAEGASAPLMELLHSRNEGTATYAAAVLFRISEDKNPDYRKRVSVELTNSLFKHDPAAWEAAQSMIPINEPYADDMDATYRPMYSSDVPLDPLDMHMDMDGDYPMDTYSDGLRPPYPAADHMLA

SEQ ID NO: 1017 - DNA, 3192 bp, Homo sapiens
  ref <308>: DATABASE ACCESSION NUMBER: Refseq / NM_021991
  ref <309>: DATABASE ENTRY DATE: 2001-02-03
cgccagagtccggagcagccgccgcccgaccgcgccgagctcagttcgctgtccgcgccggctcccaccccggcccgaccccgacccggcccggtcaggccccatactcagtagccacgatggaggtgatgaacctgatggagcagcctatcaaggtgactgagtggcagcagacatacacctacgactcgggtatccactcgggcgccaacacctgcgtgccctccgtcagcagcaagggcatcatggaggaggatgaggcctgcgggcgccagtacacgctcaagaaaaccaccacttacacccagggggtgccccccagccaaggtgacctggagtaccagatgtccacaacagccagggccaaacgggtgcgggaggccatgtgccctggtgtgtcaggcgaggacagctcgcttctgctggccacccaggtggaggggcaggccaccaacctgcagcgactggccgagccgtcccagctgctcaagtcggccattgtgcatctcatcaactaccaggacgatgccgagctggccactcgcgccctgcccgagctcaccaaactgctcaacgacgaggacccggtggtggtgaccaaggcggccatgattgtgaaccagctgtcgaagaaggaggcgtcgcggcgggccctgatgggctcgccccagctggtggccgctgtcgtgcgtaccatgcagaataccagcgacctggacacagcccgctgcaccaccagcatcctgcacaacctctcccaccaccgggaggggctgctcgccatcttcaagtcgggtggcatccctgctctggtccgcatgctcagctcccctgtggagtcggtcctgttctatgccatcaccacgctgcacaacctgctcctgtaccaggagggcgccaagatggccgtgcgcctggccgacgggctgcaaaagatggtgcccctgctcaacaagaacaaccccaagttcctggccatcaccaccgactgcctgcagctcctggcctacggcaaccaggagagcaagctgatcatcctggccaatggtgggccccaggccctcgtgcagatcatgcgtaactacagttatgaaaagctgctctggaccaccagtcgtgtgctcaaggtgctatccgtgtgtcccagcaataagcctgccattgtggaggctggtgggatgcaggccctgggcaagcacctgaccagcaacagcccccgcctggtgcagaactgcctgtggaccctgcgcaacctctcagatgtggccaccaagcaggagggcctggagagtgtgctgaagattctggtgaatcagctgagtgtggatgacgtcaacgtcctcacctgtgccacgggcacactctccaacctgacatgcaacaacagcaagaacaagacgctggtgacacagaacagcggtgtggaggctctcatccatgccatcctgcgtgctggtgacaaggacgacatcacggagcctgccgtctgcgctctgcgccacctcactagccgccaccctgaggccgagatggcccagaactctgtgcgtctcaactatggcatcccagccatcgtgaagctgctcaaccagcccaaccagtggccactggtcaaggcaaccatcggcttgatcaggaatctggccctgtgcccagccaaccatgccccgctgcaggaggcagcggtcatcccccgcctcgtccaactgctggtgaaggcccaccaggatgcccagcgccacgtagctgcaggcacacagcagccctacacggatggtgtgaggatggaggagattgtggagggctgcaccggagcactgcacatcctcgcccgggaccccatgaaccgcatggagatcttccggctcaacaccattcccctgtttgtgcagctcctgtactcgtcggtggagaacatccagcgcgtggctgccggggtgctgtgtgagctggcccaggacaaggaggcggccgacgccattgatgcagagggggcctcggccccactcatggagttgctgcactcccgcaacgagggcactgccacctacgctgctgccgtcctgttccgcatctccgaggacaagaacccagactaccggaagcgcgtgtccgtggagctcaccaactccctcttcaagcatgacccggctgcctgggaggctgcccagagcatgattcccatcaatgagccctatggagatgacatggatgccacctaccgccccatgtactccagcgatgtgccccttgacccgctggagatgcacatggacatggatggagactaccccatcgacacctacagcgacggcctcaggcccccgtaccccactgcagaccacatgctggcctaggcggcctggccccagtgcggttcctcatctgagaggctctccgtgcaggcgatggggcaagacagaaaagtgcctgagctggggaagccggggtgtaacttcctgctgcaccctgcgcctccagaggtcctccgtagggtctttcttgggatagtgttctgctcctgcttttctgtcctgggcatgggtccagggcctgacaccccctccccgcccctgtggccctggccactaaagcttcagactcaagtacccattctgttttcccccagcaacgcccctccaaacctccagcctccctgtctccagctgcctgggcccggaagggctttggttccttctctgggtctgattttctcactgaactccaccgaccaactgccctaagcccccagggcctccagggcccaggttcgagacccaaacccccaaaatccaaaacttctcttgaaaagttcagggaccgtccaggggagatggggaggagatatggagtgagtcacctgctccagaagatgccagcttctctctccagggtgcttagttggctttgcccacccctcactccccagggagctccggggacagcttcctcacacccctgtcccacccacacagctgccctagctgaccccgagaagtgctcttggctgacccctctggtgtgtggtgaggggctttctcttccccttcctgtttcagacccccccatttcccgcacatggtgtggggggctgggggaggtccaagcagagtgttttattattatcgctttatgtttttggttattggtttttttgtatagaccaaagcaaagaaaataaaaataacacag

SEQ ID NO: 1018 - protein, 745 aa, Homo sapiens
  ref <308>: DATABASE ACCESSION NUMBER: Refseq / NP_068831
  ref <309>: DATABASE ENTRY DATE: 2001-02-03
MEVMNLMEQPIKVTEWQQTYTYDSGIHSGANTCVPSVSSKGIMEEDEACGRQYTLKKTTTYTQGVPPSQGDLEYQMSTTARAKRVREAMCPGVSGEDSSLLLATQVEGQATNLQRLAEPSQLLKSAIVHLINYQDDAELATRALPELTKLLNDEDPVVVTKAAMIVNQLSKKEASRRALMGSPQLVAAVVRTMQNTSDLDTARCTTSILHNLSHHREGLLAIFKSGGIPALVRMLSSPVESVLFYAITTLHNLLLYQEGAKMAVRLADGLQKMVPLLNKNNPKFLAITTDCLQLLAYGNQESKLIILANGGPQALVQIMRNYSYEKLLWTTSRVLKVLSVCPSNKPAIVEAGGMQALGKHLTSNSPRLVQNCLWTLRNLSDVATKQEGLESVLKILVNQLSVDDVNVLTCATGTLSNLTCNNSKNKTLVTQNSGVEALIHAILRAGDKDDITEPAVCALRHLTSRHPEAEMAQNSVRLNYGIPAIVKLLNQPNQWPLVKATIGLIRNLALCPANHAPLQEAAVIPRLVQLLVKAHQDAQRHVAAGTQQPYTDGVRMEEIVEGCTGALHILARDPMNRMEIFRLNTIPLFVQLLYSSVENIQRVAAGVLCELAQDKEAADAIDAEGASAPLMELLHSRNEGTATYAAAVLFRISEDKNPDYRKRVSVELTNSLFKHDPAAWEAAQSMIPINEPYGDDMDATYRPMYSSDVPLDPLEMHMDMDGDYPIDTYSDGLRPPYPTADHMLA

SEQ ID NO: 1019 - DNA, 427 bp, Rattus norvegicus
  ref <308>: DATABASE ACCESSION NUMBER: EMBL / U57500
  ref <309>: DATABASE ENTRY DATE: 2000-03-04
ctcattcattaatggctaccaggaaaagaacaaattcattgctgcacaaggaccaaaagaagaaacggtgaatgatttctggagaatgatatgggaacagaacacagccaccattgtcatggtgaccaacctgaaggagagaaaggagtgtaaatgtgcccagtattggccagaccaaggctgctggacctatgggaatgtccgtgtgtctgtcgaggatgtgactgttctggtggactacacagtacggaaattctgcatccagcaggtgggcgacgtcaccaacaggaagccacagcgcctcatcactcagttccatttcaccagctggccagactttggggtgccttttaccccaattggcatgctcaagttcctcaagaaggtgaaagcctgtaaccctcagtatgcaggggctatcgtggtc

SEQ ID NO: 1020 - DNA, 1101 bp, Rattus norvegicus
  ref <308>: DATABASE ACCESSION NUMBER: Refseq / NM_013166
  ref <309>: DATABASE ENTRY DATE: 2003-01-14
agtcacatttcttatttggactagtgaagacagaagcaaaccagctcacttgtgtcctgggacagttgatttaggggatggctttcgcagagcaaacacctctgacccttcaccgccgggacctctgtagccgttctatctggctagcaaggaagattcgttcagacctgactgctcttatggaatcttatgtaaaacatcagggcctgaataaaaatatcaaccttgactcagtggatggtgtaccagtggcaagcactgatcgttggagtgagatgactgaggcagagcgactccaagagaacctccaggcttaccgtaccttccaagggatgttaaccaagctcttagaagaccagagagtacatttcaccccaactgaaggtgacttccatcaggcaatacatactcttatgctccaagtttctgcctttgcctaccagctagaggagttaatggtgcttctggaacagaagatccctgaaaatgaggctgatgggatgcctgccacagttggagatggtggtctctttgagaagaagctatggggcttgaaggtccttcaagagctctcacagtggactgtgaggtctatccatgaccttcgtgtcatttcttctcatcagatgggaatctcagcacttgagagccattatggggccaaagataagcagatgtagccattcgctcatacctctgtctccctttttgatctaatgaaatattgatagttccctggagcctagttttctcagcatcaattttggaacactttagaccacatgcatttcatcaagtagggttggcccacatatgaatagatagatatacatggttattctggctatgcaaatgtgtgcacccattttggtttgcattgggtggtataataaatggatggcccacctatccctttcaccatagtagtgctttaaccttcctgatactaagtaaccttttcaggtgtttaacagtcttacaggcagaagagaaattgtaactcgttttggttgacttctgaaaagactgaataaacaaattggaagtcctagactatcttcattcaaactacccgaataaaaagagtattgttgtacagag

SEQ ID NO: 1021 - protein, 200 aa, Rattus norvegicus
  ref <308>: DATABASE ACCESSION NUMBER: Refseq / NP_037298
  ref <309>: DATABASE ENTRY DATE: 2003-01-14
MAFAEQTPLTLHRRDLCSRSIWLARKIRSDLTALMESYVKHQGLNKNINLDSVDGVPVASTDRWSEMTEAERLQENLQAYRTFQGMLTKLLEDQRVHFTPTEGDFHQAIHTLMLQVSAFAYQLEELMVLLEQKIPENEADGMPATVGDGGLFEKKLWGLKVLQELSQWTVRSIHDLRVISSHQMGISALESHYGAKDKQM

SEQ ID NO: 1022 - DNA, 1788 bp, Rattus norvegicus
  ref <308>: DATABASE ACCESSION NUMBER: EMBL / S72637
  ref <309>: DATABASE ENTRY DATE: 2000-03-04
gcgcctcgccccgcccggggccgcagacggccagcagcgacagacagccgagcctcgcggggccgtcccagcccgaggaccccgggcctgcgacccccgcggctcgcatcccactttctaagacctctaagaggacgcgccggcctcttcgcggccaccgcgcgcgttccagggctccggaggtgacaggcacaatgctttgggtcctggtggggactgttctccctgtcatgttgctggctgccccaccacccatcaacaagctggccctgtttccggacaagagtgcctggtgcgaagccaagaacatcacgcagattgtgggccacagcggctgtgaggccaagtctatccagaacagggcgtgcctaggacaatgcttcagttacagcgtccccaacaccttcccgcagtccacagagtccctggtgcactgtgactcctgcatgccggcccagtccatgtgggagattgtgaccttggagtgccccggccacgaggaggtgcccagggtggacaagctggttgagaagattgtacactgcagctgccaagcctgcggcaaggaacccagtcatgagggcctgaacgtctacatgcagggtgaagatgggccaggctcccagccaggatcgcactcccactcccatccccaccctgggtgccagacccctgaacctgaagaacctcctggagcccctcaagttgaggaagagggggctgaggactgagggcccccaactcttcctcccctcttgtcccctgtggaatgtctggtcccaccctccagggaagagggaggggagaggcagaggcccccctccccctctggcactagatggacttggaatgttgcctggttgccatggagatctgaagggaggggctggagccaagctgcacgatttaatatatgcaagatgaggggaggaagcagacatctttgggacttttcttttggaaggtgaagtgtggtctttcctttcagccttctggagaggagccctctggatagagaggaagcaggttgagctgctgaggatgactgagatcctcagatagggcaggcccaggtcaggacccagacaacggatggggcaggatccccagtgacgggcagagggtgggtatcatgtcagcatcccctttgcaggaggatctaggtaggaagacagctggcagaagtcggaaactccagccccataggtttccctaaaggcctcccctcatgtaaccccttcaatggagtggcttaggagtcaggctggggcaggaccctgctgactcaggtgccagagtgtcactgaagaagaaagaagatccctctcccccacaccctgtccctccctccagagatcttagctctttgctctccccaagttctggactcttctgaaaacagctgcaaccggtcctgccgtccttggggctggtctttctgaaagaggtgacagtttatccccatcacctgggaccgtagtggacaggaggcccctgcctagggcccctgctgacctcagctttctctagctccttattctatccactccttcttcccagctgcactttaaccttagggcagggcaggtggcgaggaagggccctctgtctccttatctgctggcaccattgtgtccagggggttgccagctcaccccctccctgggggtgccccagcccatggctgtttgacgagagccttagagcttgtaactagtagccatctcccctgaacctgagtgtttccatgaataaaatgccttcaacgcctctacaaaaaaaaaaaaa

SEQ ID NO: 1023 - DNA, 482 bp, Rattus norvegicus
  misc_feature (1)..(482): n=a, c, g or t
  ref <308>: DATABASE ACCESSION NUMBER: EMBL / AA892053
  ref <309>: DATABASE ENTRY DATE: 2000-03-03
acacacaaatagtggggcagacaggcgtcatccgcagtgtcacgggaggcatgtgctccgtgtacctgaaagatagtgagaagttgtncagtatctccagtgagcatctggagcccatcacccccaccaagaacaacaaggtgaaagtgattctgggtgaggaccgagaggctaccggggtccttctgagtattgatggtgaggatggcatcatccgaatggacctggaagaccagcagatcaagattctaaacctccgcttcctagggaagctcctggaggcctgaggcccaagcgtgcggagcaagcagcccgctgaggccttgcttggcctaggatggaaccccgagtctggggcaagccagggcaatcactctggatttccttttcctcctcccctggtactctaggaatcagagcagtctgaggaatgtcctgccttctttctgctgtcccagcttgcctttgtgttcaggcctttc

SEQ ID NO: 1024 - DNA, 3762 bp, Homo sapiens
  ref <308>: DATABASE ACCESSION NUMBER: Refseq / NM_003169
  ref <309>: DATABASE ENTRY DATE: 2002-04-15
agagaacagattcggaaactggggaggtctagcatgtggcgtaggagggggtcctcactccgcttcgcgattgccaaaacgagcctgccggaagcgccctaaggggttttcttctcccagggaaccagcggggaaactgaggctcggggtggagcgcaggattgtgggacgcgccaagactgctgtctttcccagcagcagcggaagatgtcggacagcgaggacagcaacttttccgaggaggaggacagcgagcgcagcagtgacggcgaggaggccgaggtagacgaagagcggcggagtgcagcgggcagtgagaaagaagaagagcctgaggacgaagaggaggaggaagaggaggaggaatatgatgaggaagaggaggaagaagatgatgaccgaccccccaagaaaccccgccatggaggcttcattctggacgaggctgatgttgacgatgagtatgaggacgaggaccagtgggaggatggagcagaggacattctagagaaagaagagattgaagcctccaatatcgataatgttgtcctggatgaagatcgttctggggctcgccgcctgcaaaacctctggagggaccagcgagaagaagaactgggcgagtattacatgaagaaatacgccaagtcatctgtgggagagacggtgtatggaggatctgatgagctctcagacgacatcacccagcagcagctgctcccaggagtcaaggatcccaatctgtggactgtcaaatgtaagattggggaggaacgggccacggccatttccttgatgcgcaagttcattgcctaccagttcacagacacgcccctgcagatcaagtcagtagtggcaccagagcatgtgaagggctacatctacgtggaggcctacaagcagacccacgtgaagcaggccattgagggggtgggcaacctgcggcttggctactggaaccagcagatggtgcccatcaaggagatgacagacgtgctcaaagtggtgaaggaggtggccaacctgaaaccaaagtcctgggtccgcctcaagcggggcatctacaaggatgacattgctcaggtggactacgtggagcccagccagaacaccatctccctgaagatgatcccacgcatcgactacgatcgcatcaaggcccgcatgagcttgaaagactggtttgccaaaaggaagaagtttaagcggcctccacagaggctgtttgatgctgagaagatcaggtccctggggggtgatgttgcctctgatggtgacttcctcatctttgaggggaaccgttacagccggaagggctttctgttcaagagcttcgccatgtctgctgtgatcacggagggtgtgaagccaacactctctgagctggaaaagtttgaggaccagccagagggcattgacctggaggtggtgactgagagcacagggaaggagcgggagcacaacttccaacctggggacaacgtggaggtctgtgagggtgagctcatcaacctgcagggcaagatcctcagcgtggatggcaacaagatcaccatcatgcccaagcatgaggacctcaaggacatgttggagttcccagcccaggaacttagaaaatacttcaagatgggggaccacgtgaaggtgattgctggccgattcgagggcgacacaggcctcattgtgcgggtggaggagaatttcgttatcctgttctctgacctcaccatgcatgagctgaaggtgctcccccgggacctgcagctctgctcagagacagcatcaggtgtggatgttgggggccagcatgaatggggcgagctggtgcagctggatccccagactgtgggtgtcatcgtgcgactagaacgggagaccttccaggtgctgaacatgtacgggaaggtggtgactgtcagacatcaggctgtgacccggaagaaggacaaccgctttgctgtggccttggactcagagcagaacaacatccatgtgaaagacatcgttaaggtcattgatggcccccactcaggccgagaaggggagattcgccatctcttccgaagcttcgccttcctacattgcaagaaactggtggagaacgggggcatgtttgtctgcaagacccgccacctggtgctggctgggggctcaaagccccgtgatgtgaccaacttcaccgtgggtggctttgcgcctatgagtccccggatcagcagccccatgcaccccagtgctggaggtcagcgtggcggctttggtagcccaggtggcggcagtggtggcatgagcaggggccggggccggagggacaacgaactcatcggccagaccgtgcgcatctcccaggggccctacaaaggctacatcggtgtggtgaaagatgccacagagtccacggcccgtgtggagctgcactccacctgccagaccatctctgtggaccgtcagcggctcaccacggtgggctcacggcgcccgggcggcatgacctcgacctatgggaggacgcccatgtatggctcccagacgcccatgtatggctctggctcccgaacacccatgtacggctcacagacacccctccaggatggtagccgcaccccacactacggctcacagacgcccctgcatgatggcagccgcactcctgcccagagtggggcctgggaccccaacaaccccaacacgccgtcacgggctgaggaagaatatgagtatgctttcgatgatgagcccaccccgtccccgcaggcctatgggggaacccccaatccccaaacacctggctacccagacccctcgtccccacaggtcaacccacaatacaacccgcagacgccagggacgccggccatgtacaacacagaccagttctctccctatgctgccccctccccacaaggttcctaccagcccagccccagcccccagagctaccaccaggtggcgccaagcccagcaggctaccagaatacccactccccagccagctaccaccctacaccgtcgcccatggcctatcaggctagccccagcccgagccccgttggctacagtcctatgacacctggagctccctcccctggtggctacaacccacacacgccaggctcaggcatcgagcagaactccagcgactgggtaaccactgacattcaggtgaaggtgcgggacacctacctggatacacaggtggtgggacagacaggtgtcatccgcagtgtcacggggggcatgtgctctgtgtacctgaaggacagtgagaaggttgtcagcatttccagtgagcacctggagcctatcacccccaccaagaacaacaaggtgaaagtgatcctgggcgaggatcgggaagccacgggcgtcctactgagcattgatggtgaggatggcattgtccgtatggaccttgatgagcagctcaagatcctcaacctccgcttcctggggaagctcctggaagcctgaagcaggcagggccggtggacttcgtcggatgaagagtgatcctccttccttccctggcccttggctgtgacacaagatcctcctgcagggctaggcggattgttctggatttccttttgtttttccttttagttttccatcttttccctccctggtgctcattggaatctgagtagagtctgggggagggtccccaccttcctgtacctcctccccacagcttgcttttgttgtaccgtctttcaataaaaagaagctgtttggtctaaaaaaaaaaaaaaaaaaaaaaaa

SEQ ID NO: 1025 - protein, 1087 aa, Homo sapiens
  ref <308>: DATABASE ACCESSION NUMBER: Refseq / NP_003160
  ref <309>: DATABASE ENTRY DATE: 2002-04-15
MSDSEDSNFSEEEDSERSSDGEEAEVDEERRSAAGSEKEEEPEDEEEEEEEEEYDEEEEEEDDDRPPKKPRHGGFILDEADVDDEYEDEDQWEDGAEDILEKEEIEASNIDNVVLDEDRSGARRLQNLWRDQREEELGEYYMKKYAKSSVGETVYGGSDELSDDITQQQLLPGVKDPNLWTVKCKIGEERATAISLMRKFIAYQFTDTPLQIKSVVAPEHVKGYIYVEAYKQTHVKQAIEGVGNLRLGYWNQQMVPIKEMTDVLKVVKEVANLKPKSWVRLKRGIYKDDIAQVDYVEPSQNTISLKMIPRIDYDRIKARMSLKDWFAKRKKFKRPPQRLFDAEKIRSLGGDVASDGDFLIFEGNRYSRKGFLFKSFAMSAVITEGVKPTLSELEKFEDQPEGIDLEVVTESTGKEREHNFQPGDNVEVCEGELINLQGKILSVDGNKITIMPKHEDLKDMLEFPAQELRKYFKMGDHVKVIAGRFEGDTGLIVRVEENFVILFSDLTMHELKVLPRDLQLCSETASGVDVGGQHEWGELVQLDPQTVGVIVRLERETFQVLNMYGKVVTVRHQAVTRKKDNRFAVALDSEQNNIHVKDIVKVIDGPHSGREGEIRHLFRSFAFLHCKKLVENGGMFVCKTRHLVLAGGSKPRDVTNFTVGGFAPMSPRISSPMHPSAGGQRGGFGSPGGGSGGMSRGRGRRDNELIGQTVRISQGPYKGYIGVVKDATESTARVELHSTCQTISVDRQRLTTVGSRRPGGMTSTYGRTPMYGSQTPMYGSGSRTPMYGSQTPLQDGSRTPHYGSQTPLHDGSRTPAQSGAWDPNNPNTPSRAEEEYEYAFDDEPTPSPQAYGGTPNPQTPGYPDPSSPQVNPQYNPQTPGTPAMYNTDQFSPYAAPSPQGSYQPSPSPQSYHQVAPSPAGYQNTHSPASYHPTPSPMAYQASPSPSPVGYSPMTPGAPSPGGYNPHTPGSGIEQNSSDWVTTDIQVKVRDTYLDTQVVGQTGVIRSVTGGMCSVYLKDSEKVVSISSEHLEPITPTKNNKVKVILGEDREATGVLLSIDGEDGIVRMDLDEQLKILNLRFLGKLLEA

SEQ ID NO: 1026 - DNA, 1386 bp, Rattus norvegicus
  ref <308>: DATABASE ACCESSION NUMBER: Refseq / NM_130411
  ref <309>: DATABASE ENTRY DATE: 2003-01-13
atgagccggcaggtggttcgctccagcaaattccgccacgtgtttggacagccagccaaagctgaccagtgctatgaggatgtgcgcgtctcacaaaccacttgggacagtggcttctgcgctgtcaaccccaagttcatggctctgatctgtgaggccagtgggggaggggccttcctggtgctacccctaggcaagactggacgagtagacaagaatgtgcccctggtgtgcggccacactgcccctgtgctagacatcgcctggtgtccacacaatgacaacgtcattgccagtggctctgaggactgcacagttatggtgtgggagatcccggatgggggcctggtgctgcccttgcgggagcctgttgtcaccttggagggccacaccaagcgggttggcatcgtggcctggcaccccacagcccagaatgtactgctcagcgcaggttgtgacaatgtgatcctggtgtgggatgtgggcactggggcagccgtgctgacgctgggcccggatgtgcacccggacacaatctacagtgtggattggagccgggatggtgctctcatctgtacctcctgccgtgacaagcgtgttcgcgtcatcgagcctcgcaaaggcactgttgtggctgagaaggagcgtcctcatgagggaactcggccagtgcatgctgtgtttgtgtcagaagggaagattctaaccacggggttcagtcgcatgagtgagcggcaggtggcgctgtgggacacaaagcacctggaggagccactgtccctgcaggagctggacacaagcagtggagtcctgctacctttttttgaccctgataccaacatcgtctacctctgtggcaagggtgacagctctatccggtattttgagatcacgtctgaggctccgttcctgcattatctttccatgttcagttccaaggagtctcaacgtggtatgggctacatgcccaaacgtggcctggaagtgaataagtgcgagattgccagattctataagcttcatgagcggaaatgtgagcctattgccatgacagtgcctagaaagtcggacctgttccaggaggacctgtatccacccactgccggacccgaccccgccctcacagctgaggagtggctgagcggtcgtgatgctggccccctcctcatttccctcaaggatggctacgtgcccccaaagagcagggagctgagagtcaacaggggcctggacagtgctcgcagaagagctacaccggagcccagtagcactcttagctcggacaccgtgtcacggctggaggaggatgtgaggaatctcaacgccatagtgcaaaagcttcaagagcgcctggacaggctggaggagactgttcaggccaagtag

SEQ ID NO: 1027 - protein, 461 aa, Rattus norvegicus
  ref <308>: DATABASE ACCESSION NUMBER: Refseq / NP_569095
  ref <309>: DATABASE ENTRY DATE: 2003-01-13
MSRQVVRSSKFRHVFGQPAKADQCYEDVRVSQTTWDSGFCAVNPKFMALICEASGGGAFLVLPLGKTGRVDKNVPLVCGHTAPVLDIAWCPHNDNVIASGSEDCTVMVWEIPDGGLVLPLREPVVTLEGHTKRVGIVAWHPTAQNVLLSAGCDNVILVWDVGTGAAVLTLGPDVHPDTIYSVDWSRDGALICTSCRDKRVRVIEPRKGTVVAEKERPHEGTRPVHAVFVSEGKILTTGFSRMSERQVALWDTKHLEEPLSLQELDTSSGVLLPFFDPDTNIVYLCGKGDSSIRYFEITSEAPFLHYLSMFSSKESQRGMGYMPKRGLEVNKCEIARFYKLHERKCEPIAMTVPRKSDLFQEDLYPPTAGPDPALTAEEWLSGRDAGPLLISLKDGYVPPKSRELRVNRGLDSARRRATPEPSSTLSSDTVSRLEEDVRNLNAIVQKLQERLDRLEETVQAK

SEQ ID NO: 1028 - DNA, 1659 bp, Homo sapiens
  ref <308>: DATABASE ACCESSION NUMBER: Refseq / NM_007074
  ref <309>: DATABASE ENTRY DATE: 2002-12-23
tcagcgggcgagtccccggctcctccagctccttcctcctcttcctcctcctcctccacctccggcttttgggggatcactgtcctctctcggcagcagaatgagccggcaggtggtccgctccagcaagttccgccacgtgtttggacagccggccaaggccgaccagtgctatgaagatgtgcgcgtctcacagaccacctgggacagtggcttctgtgctgtcaaccctaagtttgtggccctgatctgtgaggccagcgggggaggggccttcctggtgctgcccctgggcaagactggacgtgtggacaagaatgcgcccacggtctgtggccacacagcccctgtgctagacatcgcctggtgcccgcacaatgacaacgtcattgccagtggctccgaggactgcacagtcatggtgtgggagatcccggatgggggcctgatgctgcccctgcgggagcccgtcgtcaccctggagggccacaccaagcgtgtgggcattgtggcctggcacaccacagcccagaacgtgctgctcagtgcaggttgtgacaacgtgatcatggtgtgggacgtgggcactggggcggccatgctgacactgggcccagaggtgcacccagacacgatctacagtgtggactggagccgagatggaggcctcatttgtacctcctgccgtgacaagcgcgtgcgcatcatcgagccccgcaaaggcactgtcgtagctgagaaggaccgtccccacgaggggacccggcccgtgcgtgcagtgttcgtgtcggaggggaagatcctgaccacgggcttcagccgcatgagtgagcggcaggtggcgctgtgggacacaaagcacctggaggagccgctgtccctgcaggagctggacaccagcagcggtgtcctgctgcccttctttgaccctgacaccaacatcgtctacctctgtggcaagggtgacagctcaatccggtactttgagatcacttccgaggcccctttcctgcactatctctccatgttcagttccaaggagtcccagcggggcatgggctacatgcccaaacgtggcctggaggtgaacaagtgtgagatcgccaggttctacaagctgcacgagcggaggtgtgagcccattgccatgacagtgcctcgaaagtcggacctgttccaggaggacctgtacccacccaccgcagggcccgaccctgccctcacggctgaggagtggctggggggtcgggatgctgggcccctcctcatctccctcaaggatggctacgtacccccaaagagccgggagctgagggtcaaccggggcctggacaccgggcgcaggagggcagcaccagaggccagtggcactcccagctcggatgccgtgtctcggctggaggaggagatgcggaagctccaggccacggtgcaggagctccagaagcgcttggacaggctggaggagacagtccaggccaagtagagccccgcagggcctccagcagggtcagccattcacacccatccactcacctcccattcccagccacatggcagagaaaaaaatcataataaaatggctttattttctggtaaaaaaaaaaaaaaaaaaaaaaaaaaaaaaaaaaaaaaaaaaaaaaaaaaagggggggggga

SEQ ID NO: 1029 - protein, 461 aa, Homo sapiens
  ref <308>: DATABASE ACCESSION NUMBER: Refseq / NP_009005
  ref <309>: DATABASE ENTRY DATE: 2002-12-23
MSRQVVRSSKFRHVFGQPAKADQCYEDVRVSQTTWDSGFCAVNPKFVALICEASGGGAFLVLPLGKTGRVDKNAPTVCGHTAPVLDIAWCPHNDNVIASGSEDCTVMVWEIPDGGLMLPLREPVVTLEGHTKRVGIVAWHTTAQNVLLSAGCDNVIMVWDVGTGAAMLTLGPEVHPDTIYSVDWSRDGGLICTSCRDKRVRIIEPRKGTVVAEKDRPHEGTRPVRAVFVSEGKILTTGFSRMSERQVALWDTKHLEEPLSLQELDTSSGVLLPFFDPDTNIVYLCGKGDSSIRYFEITSEAPFLHYLSMFSSKESQRGMGYMPKRGLEVNKCEIARFYKLHERRCEPIAMTVPRKSDLFQEDLYPPTAGPDPALTAEEWLGGRDAGPLLISLKDGYVPPKSRELRVNRGLDTGRRRAAPEASGTPSSDAVSRLEEEMRKLQATVQELQKRLDRLEETVQAK

SEQ ID NO: 1030 - DNA, 436 bp, Rattus norvegicus
  ref <308>: DATABASE ACCESSION NUMBER: EMBL / AI639384
  ref <309>: DATABASE ENTRY DATE: 2000-03-04
gggaaagtgcaattcgtaataaaaatgttgagaaatggcaagttccatccagaaccatgaaattagagctgtgaaaatgatcaaaaaataccaatgctttatcaatagccagttgttttatcacagtataataaagactgatcgccattcccgaggctcatcagactatgaaaatgatattcgctacaaaggacgtctcttcccctaaggttgtccagacaaggcttccctggcacagcagcatgtctctgcttctaaagccctcctctcttgtctctcatacctgttaatgtttgcagttttcttttcacttccagatatggtttgcgttcagagacatttgacatttccttctgcctttacccatattttaaaatataagtactgaatacctctttctgttaataaatatattcctaaaaagctttgaaattaa

SEQ ID NO: 1031 - DNA, 2114 bp, Homo sapiens
gggggcggagagcgcccccgggggcggggcacgcaagtgacggcggcgcgggtggtggagcgctgggcggccaggctccctggctggccggtttgggcgtctgggccgtgaaggtgggacctcctgttccgggccgcaagtttccctctccagccgcccgccgttcgtagcatgtcccccagaactcggggagcgcaggcaggacaggcttagagaagacgcggtccccagcgcttgggccacggacgtcccaccccgctcctctgtcgctggagaaccgccgggccgagccactgggagaagcaggccagagccttccagggcctccggcccgtggacccgaggaggatgagctggctttttcccctgaccaagagcgcctcctcctccgcggctgggtcccccggtggcctcaccagcctccagcagcagaagcagcgcctgatcgagtccctccggaactcacactccagtatagccgaaatacagaaagatgtggaatacagattgccattcaccataaacaacctgacaattaacattaatatattgcttcctccacagtttcctcaggaaaaaccagtgatcagtgtttatccaccaatacgacatcacttaatggataaacaaggagtgtatgttacctctccattagtaaacaattttacaatgcactcagatcttggaaaaattattcagagtctgttggatgagttttggaagaatcctccagttttagctcctacttcaacagcatttccttatctatacagtaacccaagtgggatgtctccttatgcttctcagggttttccatttcttcctccatatcctccacaagaagcaaacaggagtatcacttctttatctgttgctgacactgtttcttcttcaacaacaagtcataccacagccaagcctgccgctccttcatttggtgtcctttcaaatctgccattacccattcccacagtggatgcttcaataccgacaagccaaaatggttttgggtacaagatgccagatgtccctgatgcatttccagaactctcagaactaagtgtgtcacaactcacagatatgaatgaacaagaggaggtattactagaacagtttctgactttgcctcaactaaaacaaattattaccgacaaagatgacttagtaaaaagtattgaggaactagcaagaaaaaatctccttttggagcccagcttggaagccaaaagacaaactgttttagataagtatgaattacttacacagatgaagtccactttcgaaaagaagatgcaaaggcagcatgaacttagtgagagctgtagtgcaagtgcccttcaggcaagattgaaagtagctgcacatgaagctgaggaagaatctgataatattgcagaagacttcttggagggaaagatggaaatagatgattttctcagtagcttcatggaaaagagaacaatttgccactgtagaagagccaaggaagagaaacttcagcaggcgatagcaatgcacagccaatttcatgctccactatagattttcctggaaacatgaactgccaagagaggaatgggacacaaaaccaaacactgttttatatttatggtttgcaaactggcatttcatcagtggctaaattcacagatatcctatatagattgtatacagaactgagactgattttgtaccgattagaatgattgctatgatctttgagaaatttttctgcactatttgcactgaaatgtttatttattgttgataaattgtatcatatttaagttccactgctgttcctcttaccttgattaaatgcctatgcatgtacttttagctagtttttaatattttataaaacttcatttaaatttgtatttttaacttgaagttccatttcgttatcaaggatggtatttagatttttttcctcttaaccttttttcaaaaactattttcaactgtgaggaaacccttatttttctttctttgtggataaaactttcaaaagcaatttaagatattcatagtgttaggaaacaccaaacctgcctatgtgccatctcacaaaagaaacttttaatacctacaataaatcaaaagaataaacc

SEQ ID NO: 1032 - protein, 397 aa, Homo sapiens
MSWLFPLTKSASSSAAGSPGGLTSLQQQKQRLIESLRNSHSSIAEIQKDVEYRLPFTINNLTININILLPPQFPQEKPVISVYPPIRHHLMDKQGVYVTSPLVNNFTMHSDLGKIIQSLLDEFWKNPPVLAPTSTAFPYLYSNPSGMSPYASQGFPFLPPYPPQEANRSITSLSVADTVSSSTTSHTTAKPAAPSFGVLSNLPLPIPTVDASIPTSQNGFGYKMPDVPDAFPELSELSVSQLTDMNEQEEVLLEQFLTLPQLKQIITDKDDLVKSIEELARKNLLLEPSLEAKRQTVLDKYELLTQMKSTFEKKMQRQHELSESCSASALQARLKVAAHEAEEESDNIAEDFLEGKMEIDDFLSSFMEKRTICHCRRAKEEKLQQAIAMHSQFHAPL

SEQ ID NO: 1033 - DNA, 3564 bp, Rattus norvegicus
  ref <308>: DATABASE ACCESSION NUMBER: Refseq / NM_017321
  ref <309>: DATABASE ENTRY DATE: 2003-02-27
cgctgagtagatcactgttaagtttgagacttgtttcaaactaaaaaatgatgagggatatagcccagtagtaaagttacatgcctagatttctcagtgagtgccttggagcatgactcagtggtggagccctgcctagaatccccagtgagggcctgggttcttgcttgcacccgcctgtgtgctccgtgctccgtgagccccgctgtgagcgagacacgtgaccgtcagtaatcatgaagaatccatttgcgcaccttgccgagcccttggaccctgcacagccaggaaagaaattcttcaacttgaataaattggaggactcaagatatggacgcttaccgttctctatcagagttctcctggaggccgccgttcggaactgtgacgagtttttggtgaagaagaatgacattgagaatatcctgaactggagtatcatgcagcataagagcatagaagtgccgtttaagccagcccgagtcatactgcaggactttacgggcgtgcctgctgtggttgattttgcagcaatgcgcgatgctgtgaagaagttgggaggaaatccagagaaaataaaccctgtctgccccgctgaccttgtaatcgatcattccatccaggttcatttcaacagaagggcagacagtttgcagaagaatcaagacctggaatttgaaaggaatagagaacgatttgaatttttaaagtggggttcccaggccttttgcaacatgaggattattcctcctggctcaggaattattcaccaagtgaatctggagtatttggcaagagtagtgtttgatcaggatggatgttactacccagatagcctcgtgggcacagattctcacaccaccatgattgatggtctgggagttcttggttggggtgtaggtggtattgaagcagaagctgtcatgctgggtcagccaatcagcatggtgcttccccaggtgattggctacaagctgatggggaagcctcaccctctggtaacctccacggacattgtgctcaccattaccaagcacctccgacaagttggggtcgtgggcaaattcgtggagtttttcgggccaggagtggcccagctgtccattgctgaccgagctacgattgccaacatgtgcccagagtacggcgcgacggcagccttcttcccggtcgacgacgttagcatcgcgtacctggtgcagacaggtcgtgaggaagacaaagtaaagcacattaaaaggtatcttcaggctgtaggcatgtttcgagacttcagtgactcctctcaagacccagacttcactcaggtcgtggagttagatttgaaaacagttgtgccttgctgcagtggacctaaaagacctcaggacaaagttgctgtgtctgagattgaaaaggactttgaaagctgccttggagccaagcaaggatttaaaggttttcaagttgctccagaccatcacaatgaccacaagacgtttatctataacgacagtgaattcactcttgctcatggctccgtggtgatcgccgccatcactagctgcacaaacaccagcaatccgtccgtgatgttaggcgcaggattgttagcaaagaaagccgtagaggctggcctgaatgtgaagccttacgtcaaaaccagcctgtctcctgggagtggagtggtcacctactaccttcgagagagtggagtcatgccttacctgtcccagttagggtttgacgtggtgggctacggctgcatgacctgcatcggcaacagtggacccctccccgaacctgtggtggaggctatcacccagggagaccttgtggctgttggggtactgtctggaaacaggaattttgaaggacgagtccatcctaacacccgggccaactacttagcatctcccccactagtaatagcatatgcaattgcaggcaccgtcaggatcgacttcgagaaagagcctttgggagtgaacgcacagggccaacaagtgtttctgaaggatatctggccaactcgagatgagatccaggaggtggagcggaagtatgtcatccccggcatgttcaaggaggtctatcagaagatagagactgtaaacaaaagctggaatgccttagcagccccttcagagaagctgtatgcgtggaaccccaagtctacttatatcaagtcaccgccattctttgaaagcttgactttagatctccagccccccaagtctatagtggatgcctatgtgctactaaatctaggagattccgtaacaacggaccatatctctccagcggggaacattgcaagaaacagccctgccgctcgctacttgacgaacagaggcctgacgccacgagatttcaactcctacggctcccgccggggtaacgacgccatcatggcacgggggacatttgccaacattcgcttgctgaacaagtttctgaacaagcaggcccctcagactgtccaccttccttcaggagaaaccctcgatgtgttcgatgccgctgagcggtaccagcaggctggacttcccctgattgttctggctggcaaagagtacggttcaggcagctcccgagactgggcagccaaaggtcctttcctgctgggaatcaaagctgtcctggcagagagctacgagcgcactcactgcagcaacctggttggcatgggggtgatcccccttgagtatctccccggcgaaactgcagactctctgggactcacgggtcgggaaaggtacacgatccacattcccgaacaccttaagccccgcatgaaggttcagataaagctggacaccgggaagaccttccaggccgtgatgaggttcgacaccgacgtggagctcacttacttccacaatggaggcatcctgaactacatgatccgaaagatggcccagtaggtgctggcctctcaggagacccgcgcttggtgctagacccaatgaggtaccaggcctccgctggtggaggcctgcgagcagccacctctacttctcgtgagggtgctagcaagatgagcaagtgggccctgccattcctggaggctcagcggcaggagtctctagttcggtgatttgttaatcttttatccttttctgtaatccggaatctagaatcatgggaaggtccatagtcccaaagagagctaccttctctttaaagtcactcatcaccggtcattgatttttttcactctgactaatcttcagcagaactagccagtatctcagaagtgtctcctaccctttctgttactctgtctgtctgtgctcagtgacacccttccctggagagcccattcctccgtgtatcacaccagtgttaacgacatagcttcagactctgtcacacttcaaattcatagtaatctgtgtgatcccttccttccaagtgagcgaagaccttgtggcatggctggccgtcccaagtgtttgattacctaccttccaatcaccgtgagttgtcttttaccattttcaacatttgttgacagggtttgaaagtaaccggggagcgagacaggatttctaattgaataagattaaatatattttcatg

SEQ ID NO: 1034 - protein, 889 aa, Rattus norvegicus
  ref <308>: DATABASE ACCESSION NUMBER: Refseq / NP_059017
  ref <309>: DATABASE ENTRY DATE: 2003-02-27
MKNPFAHLAEPLDPAQPGKKFFNLNKLEDSRYGRLPFSIRVLLEAAVRNCDEFLVKKNDIENILNWSIMQHKSIEVPFKPARVILQDFTGVPAVVDFAAMRDAVKKLGGNPEKINPVCPADLVIDHSIQVHFNRRADSLQKNQDLEFERNRERFEFLKWGSQAFCNMRIIPPGSGIIHQVNLEYLARVVFDQDGCYYPDSLVGTDSHTTMIDGLGVLGWGVGGIEAEAVMLGQPISMVLPQVIGYKLMGKPHPLVTSTDIVLTITKHLRQVGVVGKFVEFFGPGVAQLSIADRATIANMCPEYGATAAFFPVDDVSIAYLVQTGREEDKVKHIKRYLQAVGMFRDFSDSSQDPDFTQVVELDLKTVVPCCSGPKRPQDKVAVSEIEKDFESCLGAKQGFKGFQVAPDHHNDHKTFIYNDSEFTLAHGSVVIAAITSCTNTSNPSVMLGAGLLAKKAVEAGLNVKPYVKTSLSPGSGVVTYYLRESGVMPYLSQLGFDVVGYGCMTCIGNSGPLPEPVVEAITQGDLVAVGVLSGNRNFEGRVHPNTRANYLASPPLVIAYAIAGTVRIDFEKEPLGVNAQGQQVFLKDIWPTRDEIQEVERKYVIPGMFKEVYQKIETVNKSWNALAAPSEKLYAWNPKSTYIKSPPFFESLTLDLQPPKSIVDAYVLLNLGDSVTTDHISPAGNIARNSPAARYLTNRGLTPRDFNSYGSRRGNDAIMARGTFANIRLLNKFLNKQAPQTVHLPSGETLDVFDAAERYQQAGLPLIVLAGKEYGSGSSRDWAAKGPFLLGIKAVLAESYERTHCSNLVGMGVIPLEYLPGETADSLGLTGRERYTIHIPEHLKPRMKVQIKLDTGKTFQAVMRFDTDVELTYFHNGGILNYMIRKMAQ

SEQ ID NO: 1035 - DNA, 1247 bp, Rattus norvegicus
  ref <308>: DATABASE ACCESSION NUMBER: Refseq / NM_053862
  ref <309>: DATABASE ENTRY DATE: 2003-01-13
aattccccccctggctggggacaagttattactttgagtaatccttaaatgaagagtgggtaaagcccatatacggaagagagactccagtcaacaatatcaataagttgaagaagaaaaatgttgtccttaagcaatctacaaaatatcatctataacccgacaatcccctatgtcagtaccattactgagcagttgaagcctggctctttgatcgtgatccgtggccatgttcctaaagattcagaaagattccaagtagactttcagcatggcaacagcctgaagccgagagctgatgtggccttccactttaaccctcgcttcaaaaggtccaactgcattgtttgtaacacactgacaaatgagaaatggggctgggaggagatcacccacgacatgcctttcagaaaagaaaagtcctttgagattgtgatcatggtgctaaagaacaaattccacgtggctgtgaatggaaagcacattctgctgtatgcccacaggatcaacccagagaagatagacacactgggcatcttcggcaaagtgaacattcactccatcgggttcagattcagctcggatttacagagtatggaaacatctactctgggactgacacagataagtaaagaaaatatacaaaagtctggcaagctccatttgagcctgccatttgaagcaaggttgaatgcctccatgggccctggacgaaccgttgtcgttaaaggagaagtgaatacaaatgccacaagctttaatgttgacctagtggcaggaaggtcaagggatatcgctctgcacttgaacccacgcctgaatgtgaaagcgtttgtaagaaactcctttcttcaggatgcctggggagaagaggagagaaacattacctgcttcccatttagttctgggatgtactttgagatgataatttactgtgatgtccgagagttcaaggttgcagtaaatggtgtgcacagcctggagtacaagcacagatttaaagacctaagcagcatcgacacactagcagttgatggcgatatccgtttgctggatgtaaggagctggtagctatcatgactgccagaaccctggaaatacaaaatggcttatccgatactggccatgtcaaatgcatctcgctttcaccacattgttatactgttaagttgagctcgcacaacatcaagtcctactggtgttgtcaggcctggccatgcagtgtggctacctctgaattcccagga

SEQ ID NO: 1036 - protein, 316 aa, Rattus norvegicus
  ref <308>: DATABASE ACCESSION NUMBER: Refseq / NP_446314
  ref <309>: DATABASE ENTRY DATE: 2003-01-13
MLSLSNLQNIIYNPTIPYVSTITEQLKPGSLIVIRGHVPKDSERFQVDFQHGNSLKPRADVAFHFNPRFKRSNCIVCNTLTNEKWGWEEITHDMPFRKEKSFEIVIMVLKNKFHVAVNGKHILLYAHRINPEKIDTLGIFGKVNIHSIGFRFSSDLQSMETSTLGLTQISKENIQKSGKLHLSLPFEARLNASMGPGRTVVVKGEVNTNATSFNVDLVAGRSRDIALHLNPRLNVKAFVRNSFLQDAWGEEERNITCFPFSSGMYFEMIIYCDVREFKVAVNGVHSLEYKHRFKDLSSIDTLAVDGDIRLLDVRSW

SEQ ID NO: 1037 - DNA, 7009 bp, Rattus norvegicus
  ref <308>: DATABASE ACCESSION NUMBER: Refseq / NM_053817
  ref <309>: DATABASE ENTRY DATE: 2003-01-13
ttctgggatttgaatctttccaaggaggaaacacccagcaaactcagttgattaaacaccaaactgacagattcccaactcttcggttcaactccgaggtcttttttgtggcgtcctgggagctctgttatgggcaagaactgcctctggccagcaccatgaagcctgaatcagcttccgctccgctctgggcctcactccacctgagtactcagttgcttgcggttccccttcccagggtctgctgctggtagacagtcaaacctcagcactggtccttggtttgggctacctttcacctggctcacttccctcttacggcaccctgagctccagcccggtccttggtttccctggctaggacatatttgctgggaggaagacattgctgaaggtttattcccatcctgggctacttctccttgaatcaaggcctccggatccacatggatagctgagatcttttcttggagaaagatacttcctccttgcctcatccctggtttgcctcacccgaccgacattctctgtctgtttcttctgcctctttattggatttcttgcctgtgtgcctatctagggccgtgttgttctttttcctcctgcccctttcctcctagcattcccgtgtgtgttcttcttgtcttttcttgtaccactctgttttctttcctttccctcaccaacgcctagcccctaactcccgccccagggctgttccctggcctgcctgttcctctctgctccgacccagcagccaacatgagctttaccctccactcagttttcttcaccctgaaggtgagcagctttctgggctccctggtggggctctgcctgggtctggagttcatgggcctccctaaccagtgggcccgctatctacgctgggatgctagcacgcgcagtgacctgagcttccagttcaagaccaatgtttccactgggctgctcctgtatttggatgatggtggtgtctgtgacttcctctgcctctccctggtggatggccgtgttcagctccgctttagcatggactgcgccgagaccactgtgttgtccaacaagcaggtgaacgacagcagttggcacttcctcatggtgagccgtgaccgtgtgcgcactgggctggtgattgatggtgagggccagtctggtgagctacgggcccagcggccctacatggatgtggtcagtgatttgttcctcggtggcgggcccgctgacattcgaccttctgccctgacccttgatggagtacagaacatgcctggctttaagggattaatgctggatctcaagtatggcaactcggaacctcggcttctcgggagccagagtgtccagttagaagcagagggaccctgtggcgagcgtccctgtgaaaatggtgggatctgcttcctcttggatggtcatcccacctgtgactgttctaccactggctatggcggcacactctgctcagaagatgtcagtcaaggtccaggcctctcccatcttatgatgagtgaacaaggtagaagtaaagctcgagaggagaacgtggccaccttccgaggctcagagtatctgtcctatgacctgtcccagaaccccatccagagcagcagcagtgaaatcaccctttcctttaagacctggcaacgcaatgggctcatcctccacacgggcaagtcggccgactatgttaacctggctctgaaggatggtgcggtctccttggtcattaacctggggtccggggcctttgaggccattgtggagccagtgaatgggaaattcaacgacaacgcctggcatgatgtcaaagtgacacgcaatcttcggcaggtgacaatctctgttgatggcatcctaacaacaacaggctacactcaagaggactacaccatgctgggctcagatgactcctcctatgttgggcccagcccaagcactgcggacttgccaggctcacctgtgagcaacaacttcatgggctgccttaaagaggttgtttataagaataatgacatccgtctggagctgtctcgcttggcccggattggggccaccaagatgaaaatctatggtgaagttgtgttcaagtgtgagaacgtggccactctggaccccatcaactttgagaccccagaggcttacatcagcttgcccaagtggaacaccaaacgtatgggttccatctcctttgactttcgcaccactgagcccaacggtctgatcctcttaactcacgggaaaccccaagaaaggaaagacgtccggagccagaagaacacaaaagttgacttctttgctgtggaacttcttgatggcaacctgtatttgctgcttgacatgggctctggcaccatcaaagtgaaggccactcagaagaaagccaatgatggggaatggtaccacgtggacattcagcgggatggcagatcaggtaccatatctgtgaacagcaggcgcacaccgttcaccgccagtgggcaaagtgaaatcttggacctggagggggacatgtatctgggcggactgccagagaaccgggctggcctcattctccccacggagctctggactgccatgctcaactacggttatgtgggctgcatccgcgacctgttcatcgatgggcgcagcaaaaacatccggcagctggcggagatgcagaatgcagcaggcgtcaagtcctcctgttcacgcatgagcgccaagcagtgtgacagctacccctgcaagaacaatgcggtgtgcaaggacggctggaaccgcttcatctgcgactgcactggcaccggctactggggtagaacctgtgaaagagaggcatccatcctgagctatgacggcagcatgtatatgaaggtcatcatgcccatggtgatgcacacagaggcagaggatgtttccttccggttcatgtcccagcgagcctatgggctactggtagcgactacctccagggattctgcagatacactgcgtctagagttggatggtgggcgtgtcaagctcatggttaacttagactgtatcaggataaactgtaactccagcaaaggacctgagaccctgtacgcagggcagaagctcaatgacaatgagtggcataccgtccgggtagtgcgaagaggaaaaagccttaaactaacagtggacgatgatgtggctgagggtacgatggtgggcgaccacacccgcctggagttccacaatattgagactggtatcatgacggagaagcgttacatctccgtggtcccctccagtttcatcggccatctacagagcctcatgttcaatggcttgctgtacatcgatttgtgcaaaaatggtgacatcgactactgcgaactgaaggctcgttttggactgagaaacatcatcgctgaccctgtcacttttaagaccaagagcagctacctgacccttgccaccctccaggcttacacttccatgcatctctttttccagttcaagaccacttcagctgatggcttcattctcttcaacagtggtgatggcaataattttattgcagttgaattggtcaaggggtacatacactatgtgtttgatcttggcaatggtcccaatgtgatcaaaggcaacagtgaccgtcctctgaatgacaaccagtggcacaacgttgtcatcactcgggacaacagtaatacccacagcctgaaagtggacaccaaggtagtcactcaggtcatcaatggtgccaagaatctggatttgaaaggtgacctctatatggctggcttagcccagggcatgtatagcaaccttccaaagctcgtggcctctcgggatggatttcagggttgcctggcctctgtggacttgaatgggcgcctgcctgatctcatcaacgatgctctccacaggagtggacagattgatcgaggctgtgaaggacccagtacaacctgtcaggaggattcatgtgccaaccagggggtttgcatgcagcagtgggaaggttttacatgtgactgctccatgacatcatattctggaaaccagtgcaatgaccctggtgccacatatatctttgggaaaagcggtggtctcatcctctacacctggccagcaaatgacagacccagcacacgctctgaccgcctcgccgtgggattcagcaccactgtgaaggatggtgtcttagtacgcatcgacagtgcccctggacttggcgactttctccagcttcacatagaacaagggaaaattggagttgtcttcaatattggcacagttgacatctccatcaaagaagagagaacccctgtcaacgatggcaaataccatgtggtgcgcttcaccagaaatggggccaatgcaacccttcaggtggacaactggccagtgaatgagcattatcctacaggcaacactgataatgaacgccgccaaatggtaaaacagaaaatccccttcaaatataatcggcctgtagaggagtggctgcaggaaaaaggccggcagctaaccatcttcaacacccaggcgcaaatagccatcggaggaaaggacaaaggacgtctcttccaaggccaactctctgggctctattatgatggtttgaaagtactgaacatggcggctgagaacaaccctaatattaaaatcaatggaagtgtccggctagtgggagaagtcccatcagtctcgggaacaacacatacaacctccatgccacctgaaatgtctaccactgtcatggaaaccaccaccacgatggctacgaccaccacccgcaaaaaccgctctacagccagcattcagccaacatcagatgaccttgtttcatctgctgaatgctcaagtgatgatgaagactttgtcgagtgtgaaccaagtacaggtaggtcagccagaagctctaatgcagctaggatcactccgtgccgcccttacatggacatggcgactcacttacacatttacccttctcatcttcatctcctgtgtagtacactcatagacacacccctcccctttccgcaccccttctttcccatgctccccccttctttagcgttgttaaaatttatgtgctgtcatccacccccctaaattaagaaaaatctcaaaatttgtcaaaaagacaatacaaatctaaatatttatctgaaaactaacaatgaagaaattcattccaaatcctatagatgcatagattttttttaaggcaaattataatttttttcactttcagtcctagaaagaagaattattttaaatttaaaaaccaatgcccatcctaagtccctccaaagtaaaacttgttaaagtgcagatttttttcttttcatgttatgtggtgtgaatgtttgtgttgttgcctccctgtatcatcctctgttgtaaattactatatctgaaaaactagacattttgctcaaaagtttttaagaaataacaacaataacaacaacaacagcaactacaacaacaaaaaaaagcaactttcaagaatgtggcaattctatttgtccaagagcattcttacacaactttcttttgtaaattttttcttccatgccaaaaaacatgcgggcaatttgttgatgaggtgaattagttattcctcttcttgtagaagaccctttagctacccctcctattgctactcgtgtaccctccattacactcccccctaccttccgccccctcctcaccattattgagaccaccaaagattccctgtccatgacctctgaggcggggttaccttgcctgtcggaccaaggcagcgatggttgtgatgatgatggcttggtgatatctgggtatggctcaggggaaacctttgactctaacctgccccctactgatgatgaagatttttacaccaccttctccttggtaacagataagagtctttccacttcaatcttcgaaggtggctacaaagcgcatgcgcccaagtgggaatccaaggactttagacctaacaaagtctcggaaactagtagaactacaaccacctctttgtcccctgagctgatccgcttcacagcgtcctcctcgtctgggatggtgcccaaattgccagctggcaaaatgaataaccgtgatctcaaaccccagcctgatatagtcttgcttccgttgcccactgcctatgagctagacagcaccaaactgaagagcccactaattacttgccccatgttccgtaatgtgcccacagcaaaccccacggagccaggaatcagacgggttccgggggcctcagaggtgatccgggagtccaacagtacaacagggatggtcgtcggcattgtggctgctgccgccctctgcatcttgatcctcctgtacgccatgtacaagtacaggaacagggacgaggggtcctatcaagtggacgagacgaggaactacatcagcaactcggcccagagcaacggcacgctcatgaaggagaaacaagccagctccaagagcggccataagaaacagaaaaacaaggacaaggagtattatgtgtaaacatcacaccaccagtcgtatgcgaattgaaaacagaattatttctatacacacacctgaatactttgacaatgagatttaacttgttggatatgttcggtgagttggggtataccacgactatggtgggaaaaaccatttttaaaaggacacatacgatggtgtatctctctgtaatggtgagccatggtgcagggtcatagcctttgcctgaagacagaaaattctctctgccctgctgtatcataaagcacacacttagtgccctggagcaagtccatgactccacttgactttggaagcttccttctctccgggaccttttgaaaggggcagaagactatgtgacttacttggtccttcgatccaagtgagtctgtaatgatgtttgtgactctcgactgtaacaatgttggcttatttttgtttgtttgtttaattatgtaaaaaaacaaaaacaaaaaaatgagaaaagaaaaatgctttaaaaaaatacaaacaaaacaat

SEQ ID NO: 1038 - protein, 1438 aa, Rattus norvegicus
  ref <308>: DATABASE ACCESSION NUMBER: Refseq / NP_446269
  ref <309>: DATABASE ENTRY DATE: 2003-01-13
MSFTLHSVFFTLKVSSFLGSLVGLCLGLEFMGLPNQWARYLRWDASTRSDLSFQFKTNVSTGLLLYLDDGGVCDFLCLSLVDGRVQLRFSMDCAETTVLSNKQVNDSSWHFLMVSRDRVRTGLVIDGEGQSGELRAQRPYMDVVSDLFLGGGPADIRPSALTLDGVQNMPGFKGLMLDLKYGNSEPRLLGSQSVQLEAEGPCGERPCENGGICFLLDGHPTCDCSTTGYGGTLCSEDVSQGPGLSHLMMSEQGRSKAREENVATFRGSEYLSYDLSQNPIQSSSSEITLSFKTWQRNGLILHTGKSADYVNLALKDGAVSLVINLGSGAFEAIVEPVNGKFNDNAWHDVKVTRNLRQVTISVDGILTTTGYTQEDYTMLGSDDSSYVGPSPSTADLPGSPVSNNFMGCLKEVVYKNNDIRLELSRLARIGATKMKIYGEVVFKCENVATLDPINFETPEAYISLPKWNTKRMGSISFDFRTTEPNGLILLTHGKPQERKDVRSQKNTKVDFFAVELLDGNLYLLLDMGSGTIKVKATQKKANDGEWYHVDIQRDGRSGTISVNSRRTPFTASGQSEILDLEGDMYLGGLPENRAGLILPTELWTAMLNYGYVGCIRDLFIDGRSKNIRQLAEMQNAAGVKSSCSRMSAKQCDSYPCKNNAVCKDGWNRFICDCTGTGYWGRTCEREASILSYDGSMYMKVIMPMVMHTEAEDVSFRFMSQRAYGLLVATTSRDSADTLRLELDGGRVKLMVNLDCIRINCNSSKGPETLYAGQKLNDNEWHTVRVVRRGKSLKLTVDDDVAEGTMVGDHTRLEFHNIETGIMTEKRYISVVPSSFIGHLQSLMFNGLLYIDLCKNGDIDYCELKARFGLRNIIADPVTFKTKSSYLTLATLQAYTSMHLFFQFKTTSADGFILFNSGDGNNFIAVELVKGYIHYVFDLGNGPNVIKGNSDRPLNDNQWHNVVITRDNSNTHSLKVDTKVVTQVINGAKNLDLKGDLYMAGLAQGMYSNLPKLVASRDGFQGCLASVDLNGRLPDLINDALHRSGQIDRGCEGPSTTCQEDSCANQGVCMQQWEGFTCDCSMTSYSGNQCNDPGATYIFGKSGGLILYTWPANDRPSTRSDRLAVGFSTTVKDGVLVRIDSAPGLGDFLQLHIEQGKIGVVFNIGTVDISIKEERTPVNDGKYHVVRFTRNGANATLQVDNWPVNEHYPTGNTDNERRQMVKQKIPFKYNRPVEEWLQEKGRQLTIFNTQAQIAIGGKDKGRLFQGQLSGLYYDGLKVLNMAAENNPNIKINGSVRLVGEVPSVSGTTHTTSMPPEMSTTVMETTTTMATTTTRKNRSTASIQPTSDDLVSSAECSSDDEDFVECEPSTGRSARSSNAARITPCRPYMDMATHLHIYPSHLHLLCSTLIDTPLPFPHPFFPMLPPSLALLKFMCCHPPP

SEQ ID NO: 1039 - DNA, 3381 bp, Homo sapiens
  ref <308>: DATABASE ACCESSION NUMBER: Refseq / NM_138970
  ref <309>: DATABASE ENTRY DATE: 2003-01-17
atatgacttgcccatttgtgaatttggctccccaactcctcgcttcacttcacctgtgcctccctggtccgcgcacttcgcaggcgcccgcccgcctctcggccacctctgcagcctgccaggcacctcctcttgcgctctcgctgatttcgcccacccacctccctccaccccgtgccacgttggtttgggtggctgctccgcaccgggttcctcctcctctcctctttccctccagtccttcttattctcttcctctggctgcggtggctgctgctgctgctggttttcatccagttgggaaacccaggaagccggcggctgctccgtggcgctagtccagcacgcccagggttaaaagcctcgcgcccttccgcggagactcccaggaacacccgaagaactcttccacctgcagcccccttttgcctggcagttctgcattgcatctcatggaagtggaaacaggaaaataaaaatgttcaaactccttggatgttgggataaactcacctgaacccacttgggttcgggctgcctccttctcttccttcattgccacctttcctctgtgtggctcccgggagtgtgcggttaagtcatcagactcgaagtgcctagagatccggaggaagccgcgccggtcttcccctgacatgcgtggcatgccggggctccgtaggaggtttgctatacctgggaggaccctggcattctaaatttcagctccgggaaagagaaggggctttttgccttttatcttttttttttctttctttaagtagtaattttttaactgattcattgtttggaaagcgcatattgcttccctcttccccgaattctggcaactcttcctcctgctatgatgggcccttgggcatcatgaacttcattactcctcactggctggaattcaaactgcccatctgtagtggtcccgtgcgttgaccatgcacctgagaatccacgcgagacggagccctcctcgccggccggcctggacgcttgggatctggttcctgttctggggatgtatcgtcagctctgtatggagttcttctaatgtagcttcctcctcctccacctcttcctcgccggggtctcactctcagcacgagcaccatttccatggcagcaagcatcactcagtgcctatttctatctatcgttcccctgtttcccttcgaggaggacacgctggcgctacgtacatctttgggaaaagtggtgggcttatcctctacacctggccagccaatgacaggcccagcacgcggtctgaccgccttgccgtgggcttcagcaccactgtgaaggatggcatcttggtccgcatcgacagtgctccaggacttggtgacttcctccagcttcacatagaacaggggaaaattggagttgtcttcaacattggcacagttgacatctccatcaaagaggagagaacccctgtaaatgacggcaaataccatgtggtacgcttcaccaggaacggcggcaacgccaccctgcaggtggacaactggccagtgaatgaacattatcctacaggccggcagttaaccatcttcaacactcaggcgcaaatagccattggtggaaaggacaaaggacgcctcttccaaggccaactctctgggctctattatgatggtttgaaagtactgaacatggcggctgagaacaaccccaatattaaaatcaatggaagtgttcggctggttggagaagtcccatcaattttgggaacaacacagacgacctccatgccaccagaaatgtctactactgtcatggaaaccactactacaatggcgactaccacaacccgtaagaatcgctctacagccagcattcagccaacatcagatgatcttgtttcatctgctgaatgttcaagtgatgatgaagactttgttgaatgtgagccgagtacaggaggtgaattagttatccctcttcttgtagaagaccctttagctacccctcctattgctactcgtgcaccttccattacactcccccctacctttcgccccctcctcaccattattgagaccaccaaagattccctgtccatgacctctgaggcggggttaccttgcttgtcggaccaaggcagcgatggttgtgatgatgatggcttggtgatatctgggtatggctcaggggaaacctttgactctaacctgccccctactgatgatgaagatttttacaccaccttctccttggtaacagataagagtctttccacttcaatcttcgaaggtggctacaaagcacatgcgcccaagtgggaatccaaggactttagacctaacaaagtctccgaaactagtaggactactaccacatctttatcccctgagctgatccgcttcacagcttcctcctcgtctgggatggtgcccaaattgccagctggcaaaatgaataaccgtgatctcaaaccccagcctgatatagtcttgcttccgttgcccactgcctatgagctagacagcaccaaactgaagagcccactaattacttcccccatgttccgtaatgtgcccacagcaaaccccacggagccgggaatcagacgggttccgggggcctcagaggtgatccgggagtcgagcagcacaacagggatggtcgtcggcattgtggctgctgccgccctctgcatcttgatcctcctgtacgccatgtacaagtacaggaacagggacgaggggtcctatcaagtggacgagacgcggaactacatcagcaactccgcccagagcaacggcacgctcatgaaggagaagcagcagagctcgaagagcggccacaagaaacagaaaaacaaggacagggagtattacgtgtaaacatgcgaacactgctcacacgcgagttttcacagttatttctatccacgcctatgaatctttggacggtgagatctcacagatgtcagaactgctggaactatgaaatggggtatataaccacgactctggtggggaaaaccgttttttaaaggacacacacacacacagcgatgcatctctctctaaagctcagccacggctgcggcaaggtcccagcggtcgctgggagacagaaggttttgtgccctgctgtatcataaagcacacacttagcgctctggagccggacggtggctccaccacttccgcaggcctggaaacttccttctccggaggaccttttactaaaaggtagaagacttcatggcttacttgttccataactccaagtgagtctgtaatgtttgtgaagcttgactgtaaccatgttttttctgtttaattatgtaaaaaacaaaactacaacaacaaaaaaagaaaaaagttaaaaaagaaaaaaacaccaaaaaac

SEQ ID NO: 1040 - protein, 637 aa, Homo sapiens
  ref <308>: DATABASE ACCESSION NUMBER: Refseq / NP_620426
  ref <309>: DATABASE ENTRY DATE: 2003-01-17
MHLRIHARRSPPRRPAWTLGIWFLFWGCIVSSVWSSSNVASSSSTSSSPGSHSQHEHHFHGSKHHSVPISIYRSPVSLRGGHAGATYIFGKSGGLILYTWPANDRPSTRSDRLAVGFSTTVKDGILVRIDSAPGLGDFLQLHIEQGKIGVVFNIGTVDISIKEERTPVNDGKYHVVRFTRNGGNATLQVDNWPVNEHYPTGRQLTIFNTQAQIAIGGKDKGRLFQGQLSGLYYDGLKVLNMAAENNPNIKINGSVRLVGEVPSILGTTQTTSMPPEMSTTVMETTTTMATTTTRKNRSTASIQPTSDDLVSSAECSSDDEDFVECEPSTGGELVIPLLVEDPLATPPIATRAPSITLPPTFRPLLTIIETTKDSLSMTSEAGLPCLSDQGSDGCDDDGLVISGYGSGETFDSNLPPTDDEDFYTTFSLVTDKSLSTSIFEGGYKAHAPKWESKDFRPNKVSETSRTTTTSLSPELIRFTASSSSGMVPKLPAGKMNNRDLKPQPDIVLLPLPTAYELDSTKLKSPLITSPMFRNVPTANPTEPGIRRVPGASEVIRESSSTTGMVVGIVAAAALCILILLYAMYKYRNRDEGSYQVDETRNYISNSAQSNGTLMKEKQQSSKSGHKKQKNKDREYYV

SEQ ID NO: 1041 - DNA, 393 bp, Rattus norvegicus
  ref <308>: DATABASE ACCESSION NUMBER: EMBL / D45240
  ref <309>: DATABASE ENTRY DATE: 2002-10-12
caggttctatcatggaccagatggaggctttgcccggctcagccatttggtgctctgtggcttctctgctccttcctgaagccccttcttgaaaggtgaagtggccagtaacccacggcctccacctttcacccactctctttacttccttacccagcaacaaactcatcatctcagagaactgctctgattggctgcttactgcaagggtcttcccctaacctagactccgtttctttttatctccatcttgctcccttgctccccaaacaaacgttgttaaagccacccagcccggcaatggtcctctttgtggagctggtccaggtatttctaaccataatgagcttcctgggtccccggggagtatgggccatcaagggtaagtgctgg

SEQ ID NO: 1042 - DNA, 430 bp, Rattus norvegicus
  misc_feature (1)..(430): n=a, c, g or t
  ref <308>: DATABASE ACCESSION NUMBER: EMBL / AA848268
  ref <309>: DATABASE ENTRY DATE: 2000-03-03
gaagatactgtttcatggagaaggagatcaggagcctgagctggaacctggtgatgtcataattgtgcttgatcagaaggatcatagtgtctttcagagacgaggccatgatttgatcatgaaaatgaaaattcagctctctgaagctctttgtggcttcaagaagacaataaaaacgctggatgatcgagtcctcatcatttcgtctaagtcaggtgaggtgataaagcatggagacctcaagtgtgtccgcaatgaggggatgcccatctacaaagcccccctggagaaggggatgcttatcatacagttcttagtagtcttccctgaaaaacagtggctttctctagagaagcttcctcagctggaggctctgcttcnccctcggcagaaggtgaggatcacagatgatatggatcacgtggagctg

SEQ ID NO: 1043 - DNA, 900 bp, Rattus norvegicus
  ref <308>: DATABASE ACCESSION NUMBER: Refseq / NM_012678
  ref <309>: DATABASE ENTRY DATE: 2003-01-13
cgcgagcccagtggagcgagtgagctatggccggcctcaactcactggaggcggtgaagcgcaagatccaggccctgcagcagcaggcggacgacgcagaggaccgtgcgcagggcctgcagcgcgagctggatggcgagcgcgaacggcgcgagaaagctgaaggagatgcggccgctctcaaccgtcgcatccagctggtggaggaagagctggaccgggctcaggagcgactggccacagccctgcagaagctggaggaggcagagaaggctgctgacgagagtgagagaggcatgaaggtgatagagaaccgagccatgaaagacgaggagaagatggagatccaggagatgcagctcaaagaagccaagcacatcgctgaggaggctgaccggaagtatgaggaggttgctcgtaagttggtcatcctggagggtgagctggagagagcagaggagcgggcggaggtgtctgaactaaagagtagcgacctggaagaggagctcaagaacgtaactaacaatctgaaatcactggaggctgcttctgaaaagtactctgaaaaggaggataaatatgaagaagaaatcaagcttctgtctgacaaactgaaagaggctgagacccgagctgagtttgcggaaaggacagtttctaaactggagaagacaatcgatgacctggaagaaaaacttgcccaggccaaagaagagaacgtgggcttgcatcagacactggaccagacactaaacgaacttaactgtatataaaccaaaccagaagagtcctgtcttgataccaactccactccagagagtgcaccctgtcttcctctcttataagaagttccgcttactaccatgtctccaccttgctggaaaggccaagcagaaaaat

SEQ ID NO: 1044 - protein, 248 aa, Rattus norvegicus
  ref <308>: DATABASE ACCESSION NUMBER: Refseq / NP_036810
  ref <309>: DATABASE ENTRY DATE: 2003-01-13
MAGLNSLEAVKRKIQALQQQADDAEDRAQGLQRELDGERERREKAEGDAAALNRRIQLVEEELDRAQERLATALQKLEEAEKAADESERGMKVIENRAMKDEEKMEIQEMQLKEAKHIAEEADRKYEEVARKLVILEGELERAEERAEVSELKSSDLEEELKNVTNNLKSLEAASEKYSEKEDKYEEEIKLLSDKLKEAETRAEFAERTVSKLEKTIDDLEEKLAQAKEENVGLHQTLDQTLNELNCI

SEQ ID NO: 1045 - DNA, 526 bp, Rattus norvegicus
  misc_feature (1)..(526): n=a, c, g or t
  ref <308>: DATABASE ACCESSION NUMBER: EMBL / AA866482
  ref <309>: DATABASE ENTRY DATE: 2000-03-03
ggtgataggtgtggatgtggttatagaagccaggcttgtggaaagtaggcaggtacatttatggaaaggaccggaattccacagtgggaggctggctggcttggcaattgtgagaaaagcatacagctggaagagagatgtagaagtctacattccccaatgtccccaccntagcctcccacagagcattccccaaccgaccagaattttcatcctcctgggaattctcccccttgaatacccttgagagtttgaaggacttaactaaaagtggtgaacttgggaaagttgggctgttttaagtccagggatgaggcttaagatcttaataacataacactttcttgtttaattcatgatttaaccttggaatcagctttctgagagctgagcttcaaaattcatcaagagagtagtttctgcaccctcccctctcccttagtagcctgggacttcggacaaacggacggaccatagcagtgctctgaaagttactgtacgcctgaaataaactgtatttttcttt

SEQ ID NO: 1046 - DNA, 477 bp, Homo sapiens
  misc_feature (1)..(477): n=a, c, g or t
  ref <308>: DATABASE ACCESSION NUMBER: EMBL / AV721137
  ref <309>: DATABASE ENTRY DATE: 2000-10-05
gtctctagccagtctttgtctctcaagggttggggttctgatttcctcttagagataggctcaccttatcttccaaggctcaccttatcttccaaggccaaggagaggtcaaggactggatctggctttgccaggtggctgggacccgaaggagtaggatgcatacctgaggggctccgtagatatacagcaccaagggttcattttcagggaccacgaaccatgccttgtgccatcctttgccacccttctccatgtagtgcaggaagctgcagatgacgctgttctctgcagccactgaggcctgtttctgtggccagagacaccgggcatcaatgttgacagaaggcctagcctggctcctcctagctttaatacctcctcagtgtagggactgctattcctatctcagatgaagacgctcaagctcaggtggcaggagtgatttgtccagtgccacccagtgtcagctaggcn

SEQ ID NO: 1047 - DNA, 428 bp, Rattus norvegicus
  ref <308>: DATABASE ACCESSION NUMBER: EMBL / AA875414
  ref <309>: DATABASE ENTRY DATE: 2000-03-03
ccttcctcttgctccacttactcccctcggttcttaccagccaccgttcactcgagccacccttccctctgagcatgtattccggacttgtcactgacttcccctttagagcaggtggtagagtgaaggctctcagcaggaaaggtgttcctgcccctcacctggaaggctggcctctggcttgtcttccatgggttctcacctgccctctgccctctcccctcagcaattcctgtaaagggttaaaaatttaactggattttttttttaaactactgatgacttgacttaaaaaaatacaaagatactggatgctaacttgatactaaccatcagattgtacagtttgattgttgctgtaaatatggtagagttttgtttttgttttgtttttcgcccccatactactgaataaactagttctgtgc

SEQ ID NO: 1048 - DNA, 10531 bp, Homo sapiens
  ref <308>: DATABASE ACCESSION NUMBER: Refseq / NM_001408
  ref <309>: DATABASE ENTRY DATE: 2001-12-20
taggagccggaggaggagccgccgccgccgttgacccggccgccggccgggagctgggagagatgcggagcccggccaccggcgtccccctcccaacgccgccgccgccgctgctgctgctgttgctgctgctgctgccgccgccactattgggagaccaagtggggccctgtcgttccttggggtccaggggacgaggctcttcgggggcctgcgcccccatgggctggctctgtccatcctcagcgtcgaacctctggctctacaccagccgctgcagggatgcgggcactgagctgactggccacctggtaccccaccacgatggcctgagggtttggtgtccagaatccgaggcccatattcccctaccaccagctcctgaaggctgcccctggagctgtcgcctcctgggcattggaggccacctttccccacagggcaagctcacactgcccgaggagcacccgtgcttaaaggctccacggctcagatgccagtcctgcaagctggcacaggcccccgggctcagggcaggggaaaggtcaccagaagagtccctgggtgggcgtcggaaaaggaatgtaaatacagccccccagttccagccccccagctaccaggccacagtgccggagaaccagccagcaggcacccctgttgcatccctgagggccatcgacccggacgagggtgaggcaggtcgactggagtacaccatggatgccctctttgatagccgctccaaccagttcttctccctggacccagtcactggtgcagtaaccacagccgaggagctggatcgtgagaccaagagcacccacgtcttcagggtcacggcgcaggaccacggcatgccccgacgaagtgccctggctacactcaccatcttggttactgacaccaatgaccatgaccctgtgttcgagcagcaggagtacaaggagagcctcagggagaacctggaggttggctatgaggtgctcactgtcagggccacggatggtgatgcccctcccaatgccaatattctgtaccgcctgctggaggggtctgggggcagcccctctgaagtctttgagatcgaccctcgctctggggtgatccgaacccgtggccctgtggatcgggaagaggtggaatcctaccagctgacggtagaggcaagtgaccagggtcgggacccgggtcctcggagtaccacagccgctgttttcctttctgtggaggatgacaatgataatgccccccagtttagtgagaagcgctatgtggtccaggtgagggaggatgtgactccaggggccccagtactccgagtcacagcctcggatcgagacaaggggagcaatgccgtggtgcactatagcatcatgagtggcaatgctcggggacagttttatctggatgcccagactggagctctggatgtggtgagccctcttgactatgagacgaccaaggagtacaccctacgggtgcgagcacaggatggtggccgtcccccactctctaatgtctctggcttggtgacagtacaggtcctggatatcaacgacaatgcccccatcttcgtcagcacccctttccaggctactgtcctggagagcgtccccttaggctacctggttctccatgtccaggctatcgacgctgatgctggtgacaatgcccgcctggaataccgccttgctggggtgggacatgacttccccttcaccatcaacaatggcacaggctggatctctgtggctgctgaactggaccgggaggaagttgatttctacagctttggggtagaagctcgagaccatggcactccagcactcactgcctcggccagtgtcagcgtgactgtcctggatgtcaacgacaacaatccaacctttacccaaccagagtacacagtgcggctcaatgaggatgcagctgtgggcaccagcgtggtgacggtgtcagctgtggaccgtgatgctcatagtgtcatcacctaccagatcaccagtggcaatactcgaaaccgcttctccatcaccagccaaagtggtggtgggctggtatcccttgccctgccactggactacaaacttgagcggcagtatgtgttggctgttaccgcctccgatggcactcggcaggacacggcacagattgtggtgaatgtcaccgacgccaacacccatcgtcctgtctttcagagctcccactatacagtgaatgttaatgaggaccggccggcaggcaccacggtggtgctgatcagcgccacggatgaggacacaggtgagaatgcccgcatcacctacttcatggaggacagcatcccccagttccgcatcgatgcagacacgggggctgtcaccacccaggctgagctggactacgaagaccaagtgtcttacaccctggccattactgctcgggacaatggcattccccagaagtccgacaccacctacctggagatcctggtgaacgacgtgaatgacaatgcccctcagttcctgcgagactcctaccagggcagtgtctatgaggatgtgccacccttcactagcgtcctgcagatctcagccactgatcgtgattctggacttaatggcagggtcttctacaccttccaaggaggcgacgatggagacggtgactttattgttgagtccacgtcaggcatcgtgcgaacgctacggaggctggatcgagagaacgtggcccagtatgtcttgcgggcatatgcagtggacaaggggatgcccccagcccgcacacctatggaagtgacagtcactgtgttggatgtgaatgacaatccccctgtctttgagcaggatgagtttgatgtgtttgtggaagagaacagccccattgggctagccgtggcccgggtcacagccactgaccccgatgaaggcaccaatgcccagattatgtaccagattgtggagggcaacatccctgaggtcttccagctggacatcttctccggggagctgacagccctggtagacttagactacgaggaccggcctgagtacgtcctggtcatccaggccacgtcagctcctctggtgagccgggctacagtccacgtccgcctccttgaccgcaatgacaacccaccagtgctgggcaactttgagatccttttcaacaactatgtcaccaatcgctcaagcagcttccctgggggtgccattggccgagtacctgcccatgaccctgatatctcagatagtctgacttacagctttgagcggggaaatgaactcagcctggtcctgctcaatgcctccacgggtgagctgaagctaagccgcgcactggacaacaaccggcctctggaggccatcatgagcgtgctggtgtcagacggcgtacacagcgtgaccgcccagtgcgcgctgcgtgtgaccatcatcaccgatgagatgctcacccacagcatcacgctgcgcctggaggacatgtcacccgagcgcttcctgtcaccactgctaggcctcttcatccaggcggtggccgccacgctggccacgccaccggaccacgtggtggtcttcaacgtacagcgggacaccgacgcccccgggggccacatcctcaacgtgagcctgtcggtgggccagccgccagggcccgggggcgggccgcccttcctgccctctgaggacctgcaggagcgcctatacctcaaccgcagcctgctgacggccatctcggcacagcgcgtgctgcccttcgacgacaacatctgcctgcgggagccctgcgagaactacatgcgctgcgtgtcggtgctgcgcttcgactcctccgcgcccttcatcgcctcctcctccgtgctcttccggcccatccaccccgtcggagggctgcgctgccgctgcccgcccggcttcacgggtgactactgcgagaccgaggtggacctctgctactcgcggccctgtggcccccacgggcgctgccgcagccgcgagggcggctacacctgcctctgtcgtgatggctacacgggtgagcactgtgaggtgagtgctcgctcaggccgttgcaccccgggtgtctgcaagaatgggggcacctgtgtcaacctgctggtgggcggtttcaagtgcgattgcccatctggagacttcgagaagccctactgccaggtgaccacgcgcagcttccccgcccactccttcatcacctttcgcggcctgcgccagcgtttccacttcaccctggccctctcgtttgccacaaaggagcgcgacgggttgctgttgtacaatgggcgtttcaatgagaagcatgactttgtggccctcgaggtgatccaggagcaggtccagctcaccttctctgcaggggagtcaaccaccacggtgtccccattcgtgcccggaggagtcagtgatggccagtggcatacggtgcagctgaaatactacaataagccactgttgggtcagacagggctcccacagggcccatcagagcagaaggtggctgtggtgaccgtggatggctgtgacacaggagtggccttgcgcttcggatctgtcctgggcaactactcctgtgctgcccagggcacccagggtggcagcaagaagtctctggatctgacggggcccctgctactaggcggggtgcctgacctgcccgagagcttcccagtccgaatgcggcagttcgtgggctgcatgcggaacctgcaggtggacagccggcacatagacatggctgacttcattgccaacaatggcaccgtgcctggctgccctgccaagaagaacgtgtgtgacagcaacacttgccacaatgggggcacttgcgtgaaccagtgggacgcgttcagctgcgagtgccccctgggctttgggggcaagagctgcgcccaggaaatggccaatccacagcacttcctgggcagcagcctggtggcctggcatggcctctcgctgcccatctcccaaccctggtacctcagcctcatgttccgcacgcgccaggccgacggtgtcctgctgcaggccatcaccagggggcgcagcaccatcaccctacagctacgagagggccacgtgatgctgagcgtggagggcacagggcttcaggcctcctctctccgtctggagccaggccgggccaatgacggtgactggcaccatgcacagctggcactgggagccagcggggggcctggccatgccattctgtccttcgattatgggcagcagagagcagagggcaacctgggcccccggctgcatggtctgcacctgagcaacataacagtgggcggaatacctgggccagccggcggtgtggcccgtggctttcggggctgtttgcagggtgtgcgggtgagcgatacgccagagggggttaacagcctggatcccagccatggggagagcatcaacgtggagcaaggctgtagcctgcctgacccttgtgactcaaacccgtgtcctgctaacagctattgcagcaacgactgggacagctattcctgcagctgtgatccaggttactatggtgacaactgtactaatgtgtgtgacctgaacccgtgtgagcaccagtctgtgtgtacccgcaagcccagtgccccccatggctatacctgcgagtgtcccccaaattaccttgggccatactgtgagaccaggattgaccagccttgtccccgtggctggtggggacatcccacatgtggcccatgcaactgtgatgtcagcaaaggctttgacccagactgcaacaagacaagcggcgagtgccactgcaaggagaaccactaccggcccccaggcagccccacctgcctcttgtgtgactgctaccccacaggctccttgtccagagtctgtgaccctgaggatggccagtgtccatgcaagccaggtgtcatcgggcgtcagtgtgaccgctgtgacaacccttttgctgaggtcaccaccaatggctgtgaagtgaattatgacagctgcccacgagcgattgaggctgggatctggtggccccgtacccgcttcgggctgcctgctgctgctccctgtcccaaaggctcctttgggactgctgtgcgccactgtgatgagcacagggggtggctccccccaaacctcttcaactgcacgtccatcaccttctcagaactgaagggcttcgctgagcggctacagcggaatgagtcaggcctagactcagggcgctcccagcagctagccctgctcctgcgcaacgccacgcagcacacagctggctacttcggcagcgacgtcaaggtggcctaccagctggccacgcggctgctggcccacgagagcacccagcggggctttgggctgtctgccacacaggacgtgcacttcactgagaatctgctgcgggtgggcagcgccctcctggacacagccaacaagcggcactgggagctgatccagcagacagagggtggcaccgcctggctgctccagcactatgaggcctacgccagtgccctggcccagaacatgcggcacacctacctaagccccttcaccatcgtcacgcccaacattgtcatctccgtagtgcgcttggacaaagggaactttgctggggccaagctgccccgctacgaggccctgcgtggggagcagcccccggaccttgagacaacagtcattctgcctgagtctgtcttcagagagacgccccccgtggtcaggcccgcaggccccggagaggcccaggagccagaggagctggcacggcgacagcgacggcacccggagctgagccagggtgaggctgtggccagcgtcatcatctaccgcaccctggccgggctactgcctcataactatgaccctgacaagcgcagcttgagagtccccaaacgcccgatcatcaacacacccgtggtgagcatcagcgtccatgatgatgaggagcttctgccccgggccctggacaaacccgtcacggtgcagttccgcctgctggagacagaggagcggaccaagcccatctgtgtcttctggaaccattcaatcctggtcagtggcacaggtggctggtcggccagaggctgtgaagtcgtcttccgcaatgagagccacgtcagctgccagtgcaaccacatgacgagcttcgctgtgctcatggacgtttctcggcgggagaatggggagatcctgccactgaagacactgacatacgtggctctaggtgtcaccttggctgcccttctgctcaccttcttcttcctcactctcttgcgtatcctgcgctccaaccaacacggcatccgacgtaacctgacagctgccctgggcctggctcagctggtcttcctcctgggaatcaaccaggctgacctcccttttgcctgcacagtcattgccatcctgctgcacttcctgtacctctgcaccttttcctgggctctgctggaggccttgcacctgtaccgggcactcactgaggtgcgcgatgtcaacaccggccccatgcgcttctactacatgctgggctggggcgtgcctgccttcatcacagggctagccgtgggcctggaccccgagggctacgggaaccctgacttctgctggctctccatctatgacacgctcatctggagttttgctggcccggtggcctttgccgtctcgatgagtgtcttcctgtacatcctggcggcccgggcctcctgtgctgcccagcggcagggctttgagaagaaaggtcctgtctcgggcctgcagccctccttcgccgtcctcctgctgctgagcgccacgtggctgctggcactgctctctgtcaacagcgacaccctcctcttccactacctctttgctacctgcaattgcatccagggccccttcatcttcctctcctatgtggtgcttagcaaggaggtccggaaagcactcaagcttgcctgcagccgcaagcccagccctgaccctgctctgaccaccaagtccaccctgacctcgtcctacaactgccccagcccctacgcagatgggcggctgtaccagccctacggagactcggccggctctctgcacagcaccagtcgctcgggcaagagtcagcccagctacatccccttcttgctgagggaggagtccgcactgaaccctggccaagggccccctggcctgggggatccaggcagcctgttcctggaaggtcaagaccagcagcatgatcctgacacggactccgacagtgacctgtccttagaagacgaccagagtggctcctatgcctctacccactcatcagacagtgaggaggaagaagaggaggaggaagaggaggccgccttccctggagagcagggctgggatagcctgctggggcctggagcagagagactgcccctgcacagtactcccaaggatgggggcccagggcctggcaaggccccctggccaggagactttgggaccacagcaaaagagagtagtggcaacggggcccctgaggagcggctgcgggagaatggagatgccctgtctcgagaggggtccctaggcccccttccaggctcttctgcccagcctcacaaaggcatccttaagaagaagtgtctgcccaccatcagcgagaagagcagcctcctgcggctccccctggagcaatgcacagggtcttcccggggctcctccgctagtgagggcagccggggcggcccccctccccgcccaccgccccggcagagcctccaggagcagctgaacggggtcatgcccatcgccatgagcatcaaggcaggcacggtggatgaggactcgtcaggctccgaatttctcttctttaacttcctgcattaaccctgggccgtggttcctacgcccgaggctcccttcccttccccagccgcactcatgccctgctcctgtcttgtgctttatcctgccccgctccccatcgcctgcccgcagcagcgacgaaacgtccatctgaggagcctgggccttgccgggaggggtactcaccccacctaaggccatctagtgccaactccccccccaccattcccctcactgcactttggacccctggggccaacatctccaagacaaagtttttcagaaaagaggaaaaaaagaatttaaaaaaggatctccactcttcatgacttcagggattcattttttttatacgctggaaattgactcccctttcccttcccaaagaggataggacctcccaggatgcttcccagcctctcctcagtttcccatctgctgtgcctctgggaggagagggactcctggggggcctgcccctcatacgccatcaccaaaaggaaaggacaaagccacacgcagccagggcttcacacccttcaggctgcacccgggcaggcctcagaacggtgaggggccagggcaaagggtgtgtctcgtcctgcccgcactgcctctcccaggaactggaaaagccctgtccggtgagggggcagaaggactcagcgcccctggacccccaaatgctgcatgaacacattttcaggggagcctgtgcccccaggcgggggtcgggcagccccagcccctctccttttcctggactctggccgtgcgcggcagcccaggtgtttgctcagttgctgacccaaaagtgcttcatttttcgtgcccgccccgcgccccgggcaggccagtcatgtgttaagttgcgcttctttgctgtgatgtgggtgggggaggaagagtaaacacagtgctggctcggctgccctgagggtgctcaatcaagcacaggtttcaagtctgggttctggtgtccactcacccaccccaccccccaaaatcagacaaatgctactttgtctaacctgctgtggcctctgagacatgttctatttttaaccccttcttggaattggctctcttcttcaaaggaccaggtcctgttcctctttctccccgactccaccccagctccctgtgaagagagagttaatatatttgttttatttatttgctttttgcgttgggatgggttcgtgtccagtcccgggggtctgatatggccatcacaggctgggtgttcccagcagccctggcttgggggcttgacgcccttccccttgccccaggccatcatctccccacctctcctcccctctcctcagttttgccgactgcttttcatctgagtcaccatttactccaagcatgtattccagacttgtcactgactttccttctggagcaggtggctagaaaaagaggctgtgggcaggaaagaaaggctcctgtttctcatttgtgaggccagcctctggcttttctgccgtggattctccccctgtcttctcccctcagcaattcctgcaaagggttaaaaatttaactggtttttactactgatgacttaaaaaaaatacaaagatgctggatgctaacttgatactaaccatcagattgtacagtttggttgttgctgtaaatatggtagcgttttgttgttgttgttttttcatgccccatactactgaataaactagttctgtgcgggt

SEQ ID NO: 1049 - protein, 2923 aa, Homo sapiens
  ref <308>: DATABASE ACCESSION NUMBER: Refseq / NP_001399
  ref <309>: DATABASE ENTRY DATE: 2001-12-20
MRSPATGVPLPTPPPPLLLLLLLLLPPPLLGDQVGPCRSLGSRGRGSSGACAPMGWLCPSSASNLWLYTSRCRDAGTELTGHLVPHHDGLRVWCPESEAHIPLPPAPEGCPWSCRLLGIGGHLSPQGKLTLPEEHPCLKAPRLRCQSCKLAQAPGLRAGERSPEESLGGRRKRNVNTAPQFQPPSYQATVPENQPAGTPVASLRAIDPDEGEAGRLEYTMDALFDSRSNQFFSLDPVTGAVTTAEELDRETKSTHVFRVTAQDHGMPRRSALATLTILVTDTNDHDPVFEQQEYKESLRENLEVGYEVLTVRATDGDAPPNANILYRLLEGSGGSPSEVFEIDPRSGVIRTRGPVDREEVESYQLTVEASDQGRDPGPRSTTAAVFLSVEDDNDNAPQFSEKRYVVQVREDVTPGAPVLRVTASDRDKGSNAVVHYSIMSGNARGQFYLDAQTGALDVVSPLDYETTKEYTLRVRAQDGGRPPLSNVSGLVTVQVLDINDNAPIFVSTPFQATVLESVPLGYLVLHVQAIDADAGDNARLEYRLAGVGHDFPFTINNGTGWISVAAELDREEVDFYSFGVEARDHGTPALTASASVSVTVLDVNDNNPTFTQPEYTVRLNEDAAVGTSVVTVSAVDRDAHSVITYQITSGNTRNRFSITSQSGGGLVSLALPLDYKLERQYVLAVTASDGTRQDTAQIVVNVTDANTHRPVFQSSHYTVNVNEDRPAGTTVVLISATDEDTGENARITYFMEDSIPQFRIDADTGAVTTQAELDYEDQVSYTLAITARDNGIPQKSDTTYLEILVNDVNDNAPQFLRDSYQGSVYEDVPPFTSVLQISATDRDSGLNGRVFYTFQGGDDGDGDFIVESTSGIVRTLRRLDRENVAQYVLRAYAVDKGMPPARTPMEVTVTVLDVNDNPPVFEQDEFDVFVEENSPIGLAVARVTATDPDEGTNAQIMYQIVEGNIPEVFQLDIFSGELTALVDLDYEDRPEYVLVIQATSAPLVSRATVHVRLLDRNDNPPVLGNFEILFNNYVTNRSSSFPGGAIGRVPAHDPDISDSLTYSFERGNELSLVLLNASTGELKLSRALDNNRPLEAIMSVLVSDGVHSVTAQCALRVTIITDEMLTHSITLRLEDMSPERFLSPLLGLFIQAVAATLATPPDHVVVFNVQRDTDAPGGHILNVSLSVGQPPGPGGGPPFLPSEDLQERLYLNRSLLTAISAQRVLPFDDNICLREPCENYMRCVSVLRFDSSAPFIASSSVLFRPIHPVGGLRCRCPPGFTGDYCETEVDLCYSRPCGPHGRCRSREGGYTCLCRDGYTGEHCEVSARSGRCTPGVCKNGGTCVNLLVGGFKCDCPSGDFEKPYCQVTTRSFPAHSFITFRGLRQRFHFTLALSFATKERDGLLLYNGRFNEKHDFVALEVIQEQVQLTFSAGESTTTVSPFVPGGVSDGQWHTVQLKYYNKPLLGQTGLPQGPSEQKVAVVTVDGCDTGVALRFGSVLGNYSCAAQGTQGGSKKSLDLTGPLLLGGVPDLPESFPVRMRQFVGCMRNLQVDSRHIDMADFIANNGTVPGCPAKKNVCDSNTCHNGGTCVNQWDAFSCECPLGFGGKSCAQEMANPQHFLGSSLVAWHGLSLPISQPWYLSLMFRTRQADGVLLQAITRGRSTITLQLREGHVMLSVEGTGLQASSLRLEPGRANDGDWHHAQLALGASGGPGHAILSFDYGQQRAEGNLGPRLHGLHLSNITVGGIPGPAGGVARGFRGCLQGVRVSDTPEGVNSLDPSHGESINVEQGCSLPDPCDSNPCPANSYCSNDWDSYSCSCDPGYYGDNCTNVCDLNPCEHQSVCTRKPSAPHGYTCECPPNYLGPYCETRIDQPCPRGWWGHPTCGPCNCDVSKGFDPDCNKTSGECHCKENHYRPPGSPTCLLCDCYPTGSLSRVCDPEDGQCPCKPGVIGRQCDRCDNPFAEVTTNGCEVNYDSCPRAIEAGIWWPRTRFGLPAAAPCPKGSFGTAVRHCDEHRGWLPPNLFNCTSITFSELKGFAERLQRNESGLDSGRSQQLALLLRNATQHTAGYFGSDVKVAYQLATRLLAHESTQRGFGLSATQDVHFTENLLRVGSALLDTANKRHWELIQQTEGGTAWLLQHYEAYASALAQNMRHTYLSPFTIVTPNIVISVVRLDKGNFAGAKLPRYEALRGEQPPDLETTVILPESVFRETPPVVRPAGPGEAQEPEELARRQRRHPELSQGEAVASVIIYRTLAGLLPHNYDPDKRSLRVPKRPIINTPVVSISVHDDEELLPRALDKPVTVQFRLLETEERTKPICVFWNHSILVSGTGGWSARGCEVVFRNESHVSCQCNHMTSFAVLMDVSRRENGEILPLKTLTYVALGVTLAALLLTFFFLTLLRILRSNQHGIRRNLTAALGLAQLVFLLGINQADLPFACTVIAILLHFLYLCTFSWALLEALHLYRALTEVRDVNTGPMRFYYMLGWGVPAFITGLAVGLDPEGYGNPDFCWLSIYDTLIWSFAGPVAFAVSMSVFLYILAARASCAAQRQGFEKKGPVSGLQPSFAVLLLLSATWLLALLSVNSDTLLFHYLFATCNCIQGPFIFLSYVVLSKEVRKALKLACSRKPSPDPALTTKSTLTSSYNCPSPYADGRLYQPYGDSAGSLHSTSRSGKSQPSYIPFLLREESALNPGQGPPGLGDPGSLFLEGQDQQHDPDTDSDSDLSLEDDQSGSYASTHSSDSEEEEEEEEEEAAFPGEQGWDSLLGPGAERLPLHSTPKDGGPGPGKAPWPGDFGTTAKESSGNGAPEERLRENGDALSREGSLGPLPGSSAQPHKGILKKKCLPTISEKSSLLRLPLEQCTGSSRGSSASEGSRGGPPPRPPPRQSLQEQLNGVMPIAMSIKAGTVDEDSSGSEFLFFNFLH

SEQ ID NO: 1050 - DNA, 814 bp, Rattus norvegicus
  ref <308>: DATABASE ACCESSION NUMBER: EMBL / AB012230
  ref <309>: DATABASE ENTRY DATE: 1999-09-17
atgaactctggcgtgaacctgcagaggtcgctgtcttctccaccgagcagcaaaagacccaaaactatatccatagatgaaaatatggagccaagtcctacaggagacttttacccctctccaaattcaccagctgctggaagtcgaacatggcatgagcgagatcaagatatgtcttctccaactacaatgaagaagcctgagaagccactgtttagctctacatctccacaggattcttccccaagattgagcacttttccccagcaccaccatcccggaatacctggagtcgcgcacagtgtcatctcaactcgaactccacctccaccctcaccgttgccatttccaacgcaagctatccttcctccagcaccatcaagttacttttctcatccaacaatcagatatcctcctcacctgaatcctcaggatactctgaagaactatgtaccttcttatgacccgtccagtcctcaaacgagccagcctaacagcagtggtcaagtagtagggaaagtgcctggccatttcacgcctgtcttggcaccctctccccatcccagtgcagtgcgacctgtgaccctgaccatgacagatactaaacccatcactacatccactgaagcctacacagcctcaggcacatctcaagccaatcgatatgtgggactaagcccaagagacccatccttcctgcatcagcaacagctgaggatttgtgactggaccatgaatcaaaacggcaggcatttataccccagtaccagtgaggatacattgggaattacttggcaaagtcctggtacctggg

SEQ ID NO: 1051 - DNA, 2840 bp, Rattus norvegicus
  ref <308>: DATABASE ACCESSION NUMBER: Refseq / NM_012791
  ref <309>: DATABASE ENTRY DATE: 2003-01-14
agagtctcaagttttcagagtggctttgctcttactgtgctttcattcgcagctgttatagttttgccgctggactcttccctcccttcccccaccccatcaggatgatatgagacttgaaagaagacgatgcatacaggaggagagacttcagcatgcaaaccttcatctgtccggctcgcaccgtcattctcattccatgctgctggccttcagatggctgcacagatgccccattcacatcagtacagtgaccgtcgccagccaaacataagtgaccagcaggtttctgccttatcatattctgaccagattcagcaacctctaactaaccaggtgatgcctgacattgtcatgttacagaggcggatgccccaaaccttccgtgatccagcaactgctcctctgagaaaactctctgtggacttgatcaaaacatacaagcatattaatgaggtttactatgcaaaaaagaagcgaagacaccaacagggccagggggacgattctagtcataagaaggagcggaaggtttacaacgatggttacgatgacgataactatgattacattgtaaaaaacggagaaaagtggatggaccgttatgaaatcgactccttaataggcaaaggttcatttggacaggttgtgaaagcatatgacagagtggaacaagaatgggtcgccattaaaatcatcaagaacaagaaggcgtttctgaatcaagcgcagatagaagtgcggctgcttgagctcatgaacaaacatgacactgagatgaagtactacatagtgcatttgaaacgccactttatgtttcggaaccatctctgtctagtgtttgaaatgctgtcctataatctctatgatttgttgaggaacaccaacttccgaggggtctctttgaacctgacacgaaagtttgcacaacagatgtgcacagcattgcttttccttgcgactccagaacttagtatcattcactgtgacttaaagccggagaacatccttctgtgtaaccccaaacgaagtgcaatcaagattgttgactttggcagctcttgtcagttggggcagaggatataccagtatattcagagtcgcttctatcggtctccagaggtgctactgggaatgccttatgaccttgctatcgacatgtggtcccttggatgtatcttggttgaaatgcacactggagagcctctgttcagtggtgccaatgaggtggatcagatgaataaaatagtggaagtcttgggcatcccacctgctcatattcttgaccaagcaccgaaagcaagaaagttctttgagaagttgcctgatggcacttggagcttaaagaagaccaaagatggaaaacgggagtacaaaccaccaggaacccgtaaacttcataatattcttggagtggaaacaggaggacctggcgggcggcgtgctggggagtcaggtcacactgtagctgactacttgaagttcaaagacctcattttaaggatgcttgattatgaccccaaaactcggattcaaccttattatgccctgcagcacagttttttcaagaaaacagctgatgaaggtacaaacacaagcaacagtgtgtccaccagccctgccatggagcagtcccagtcttcaggcaccacctccagcacctcctccagctcaggtggatcctcgggaacgagcaacagtgggagagccaggtcggatccgacgcaccagcatcggcacagtggcgggcacttcgctgctgctgtccaggccatggactgtgagacacatagtccccaggtgcgccagcagtttccggctcctctgggctggtcaggcactgaagctcctacacaagtcactgttgaaactcatcctgttcaagaaacaacctttcatgtagcccctcagcagaatgcattgcatcatcaccatggaaacagttcccatcatcaccaccaccaccatcaccaccaccaccaccatggacagcaagccttgggtaaccggaccaggccaagggtctacaattctccaacaaatagctcctctacccaggattctatggaggttggccacagtcaccactccatgacatccctgtcttcctcaacaacttcttcctcgacatcttcctcctctactggtaatcaaggcaatcaggcctatcagaaccgcccagtggctgctaacaccttggactttggacagaatggagctatggacgttaatttgaccgtctactccaatccccgccaagagactggcatagctggacatccaacataccaattttctgctaatacaggtcctgcacattacatgactgaaggacatctgacgatgaggcaaggggctgatagagaagagtctcccatgacaggagtttgtgtgcaacagagtcctgtagctagctcgtgactacattgaaacttgagtttgtttcttgtgtgtttttatagaagtggtgtttttttcccaaaaacaaaagtgcaaagctgcttgaatcagaaggagattaacacactgaaccgctacgagagggcaaagctgacttttttttttaacttgaaaagattgcaaagggacaatgaagtttttaagagccatgtccacccatcttcatggagcgctcagagtgtcctctttctgcctcccccatttaacttccatctcccggtcacagtgggttttgtctttctatccaacaaaagttaatgttcagctgttggtcttggtcatttgccaactaattttaaaataaaaaggcactgcacataatttgcataaagggccccatagggtgttttggttttttcatttttattttttcccctttt

SEQ ID NO: 1052 - protein, 763 aa, Rattus norvegicus
  ref <308>: DATABASE ACCESSION NUMBER: Refseq / NP_036923
  ref <309>: DATABASE ENTRY DATE: 2003-01-14
MHTGGETSACKPSSVRLAPSFSFHAAGLQMAAQMPHSHQYSDRRQPNISDQQVSALSYSDQIQQPLTNQVMPDIVMLQRRMPQTFRDPATAPLRKLSVDLIKTYKHINEVYYAKKKRRHQQGQGDDSSHKKERKVYNDGYDDDNYDYIVKNGEKWMDRYEIDSLIGKGSFGQVVKAYDRVEQEWVAIKIIKNKKAFLNQAQIEVRLLELMNKHDTEMKYYIVHLKRHFMFRNHLCLVFEMLSYNLYDLLRNTNFRGVSLNLTRKFAQQMCTALLFLATPELSIIHCDLKPENILLCNPKRSAIKIVDFGSSCQLGQRIYQYIQSRFYRSPEVLLGMPYDLAIDMWSLGCILVEMHTGEPLFSGANEVDQMNKIVEVLGIPPAHILDQAPKARKFFEKLPDGTWSLKKTKDGKREYKPPGTRKLHNILGVETGGPGGRRAGESGHTVADYLKFKDLILRMLDYDPKTRIQPYYALQHSFFKKTADEGTNTSNSVSTSPAMEQSQSSGTTSSTSSSSGGSSGTSNSGRARSDPTHQHRHSGGHFAAAVQAMDCETHSPQVRQQFPAPLGWSGTEAPTQVTVETHPVQETTFHVAPQQNALHHHHGNSSHHHHHHHHHHHHHGQQALGNRTRPRVYNSPTNSSSTQDSMEVGHSHHSMTSLSSSTTSSSTSSSSTGNQGNQAYQNRPVAANTLDFGQNGAMDVNLTVYSNPRQETGIAGHPTYQFSANTGPAHYMTEGHLTMRQGADREESPMTGVCVQQSPVASS

SEQ ID NO: 1053 - DNA, 806 bp, Rattus norvegicus
  ref <308>: DATABASE ACCESSION NUMBER: Refseq / NM_017257
  ref <309>: DATABASE ENTRY DATE: 2003-01-14
tgcgaaagctggggctgctatcccagattcgagagctggcaagtggggaagcatggccaagccttgtggggttcgcttgagtggagaagcccgtaaacaggtggatgccttcagacaaaatcttttccaggaggctgaggacttcctttgcactttcttgccacggaaaatcatatccctgagtcagctcttgcaagaggattccctcaatgtggctgacctctcctccctccgggctcctctggacatccctatcccagatcccccacccaaggatgatgagatggaaaccgagcaggagaagaaagaagtccctaagtgtggcttcctccctgggaatgagaagcttctggccctgcttgccttggttaagccagaagtctggactctcaaagagaagtgcattctggtaatcacatggatccagcacctgatccccaagattgaggacggaaatgattttggggtggcaattcaggagaaggtgctggagagagtgaatgctgtcaagaccaaagtggaagccttccagacagccatctccaagtatttctcagagcgtggggatgctgtagccaaggcctccaaggacacccatgtaatggattaccgggccttggtgcacgagcgagatgaagcagcctatggggcgcttagggccatggtgctggacctgagagccttctatgctgagcttcatcacatcatcagcagcaacctagagaaaattgtcaacccaaagggtgaagaaaagccatctatgtactgagcaaaggattagaaggaaaataaatgatttatacttt

SEQ ID NO: 1054 - protein, 238 aa, Rattus norvegicus
  ref <308>: DATABASE ACCESSION NUMBER: Refseq / NP_058953
  ref <309>: DATABASE ENTRY DATE: 2003-01-14
MAKPCGVRLSGEARKQVDAFRQNLFQEAEDFLCTFLPRKIISLSQLLQEDSLNVADLSSLRAPLDIPIPDPPPKDDEMETEQEKKEVPKCGFLPGNEKLLALLALVKPEVWTLKEKCILVITWIQHLIPKIEDGNDFGVAIQEKVLERVNAVKTKVEAFQTAISKYFSERGDAVAKASKDTHVMDYRALVHERDEAAYGALRAMVLDLRAFYAELHHIISSNLEKIVNPKGEEKPSMY

SEQ ID NO: 1055 - DNA, 452 bp, Rattus norvegicus
  misc_feature (1)..(452): n=a, c, g or t
  ref <308>: DATABASE ACCESSION NUMBER: EMBL / AA893327
  ref <309>: DATABASE ENTRY DATE: 2000-03-03
tgatcaccatccagttctgtggaacgggctgtggcatttcccaaaatccccacctgtggctgcagactgagtgctggcctgctcagacccctcggctctcagcaggctgtactccaccntcaggcttgagccacacaggagcttctagaaccgttttacactgtcacggtcttgccggctcagccctgcttgtcttgcacatctgacctagcagaggctggggtgggtggtagcatgctaactaagagaatcggaagaagttcccaaagctggcccctcactccagtacaatccagagcagccctcctgcccagacgagagcagcgctccacagcacaggttggggaaacgcctgcgaaggccgtggccggaggaagcagccgatgggcagaggtttccaaactacttgaaggtctttaaaaaaatgtcccaggacaacaaaaatcaagatg

SEQ ID NO: 1056 - DNA, 3041 bp, Homo sapiens
  ref <308>: DATABASE ACCESSION NUMBER: Refseq / XM_045498
  ref <309>: DATABASE ENTRY DATE: 2003-01-03
ggagtgttgttaaccggaggggcagccgcagtcgcgcggattgagcgggctcgcggcgctgggttcctggtctccgggccagggcaatgttccgcacggcagtgatgatggcggccagcctggcgctgaccggggctgtggtggctcacgcctactacctcaaacaccagttctaccccactgtggtgtacctgaccaagtccagccccagcatggcagtcctgtacatccaggcctttgtccttgtcttccttctgggcaaggtgatgggcaaggtgttctttgggcaactgagggcagcagagatggagcaccttctggaacgttcctggtacgccgtcacagagacttgtctggccttcaccgtttttcgggatgacttcagcccccgctttgttgcactcttcactcttcttctcttcctcaaatgtttccactggctggctgaggaccgtgtggactttatggaacgcagccccaacatctcctggctctttcactgccgcattgtctctcttatgttcctcctgggcatcctggacttcctcttcgtcagccacgcctatcacagcatcctgacccgtggggcctctgtgcagctggtgtttggctttgagtatgccatcctgatgacgatggtgctcaccatcttcatcaagtatgtgctgcactccgtggacctccagagtgagaacccctgggacaacaaggctgtgtacatgctctacacagagctgtttacaggcttcatcaaggttctgctgtacatggccttcatgaccatcatgatcaaggtgcacaccttcccactctttgccatccggcccatgtacctggccatgagacagttcaagaaagctgtgacagatgccatcatgtctcgccgagccatccgcaacatgaacaccctgtatccagatgccaccccagaggagctccaggcaatggacaatgtctgcatcatctgccgagaagagatggtgactggtgccaagagactgccctgcaaccacattttccataccagctgcctgcgctcctggttccagcggcagcagacctgccccacctgccgtatggatgtccttcgtgcatcgctgccagcgcagtcaccaccacccccggagcctgcggatcaggggccaccccctgccccccaccccccaccactcttgcctcagccccccaacttcccccagggcctcctgcctccttttcctccaggcatgttcccactgtggccccccatgggcccctttccacctgtcccgcctccccccagctcaggagaggctgtggctcctccatccaccagtgcagcagccctttctcggcccagtggagcagctacaaccacagctgctggcaccagtgctactgctgcttctgccacagcatctggcccaggctctggctctgccccagaggctggccctgcccctggtttccccttccctcctccctggatgggtatgcccctgcctccaccctttgccttccccccaatgcctgtgccccctgcgggctttgctgggctgaccccagaggagctacgagctctggagggccatgagcggcagcacctggaggcccggctgcagagcctgcgtaacatccacacactgctggacgccgccatgctgcagatcaaccagtacctcaccgtgctggcctccttggggcccccccggcctgccacttcagtcaactccactgaggagactgccactacagttgttgctgctgcctcctccaccagcatccctagctcagaggccacgaccccaaccccaggagcctccccaccagcccctgaaatggaaaggcctccagctcctgagtcagtgggcacagaggagatgcctgaggatggagagcccgatgcagcagagctccgccggcgccgcctgcagaagctggagtctcctgttgcccactgacactgccccagcccagccccagcctctgctcttttgagcagccctcgctggaacatgtcctgccaccaagtgccagctccctctctgtctgcaccagggagtagtacccccagctctgagaaagaggcggcatcccctaggccaagtggaaagaggctggggttcccatttgactccagtcccaggcagccatggggatctcgggtcagttccagccttcctctccaactcttcagccctgtgttctgctggggccatgaaggcagaaggtttagcctctgagaagccctcttcttcccccacccctttccaggagaaggggctgcccctccaagccctacttgtatgtgcggagtcacactgcagtgccgaacagtattagctcccgttcccaagtgtggactccagaggggctggaggcaagctatgaacttgctcgctggcccacccctaagactggtacccatttccttttcttaccctgatctccccagaagcctcttgtggtggtggctgtgccccctatgccctgtggcatttctgcgtcttactggcaaccacacaactcagggaaaggaatgcctgggagtgggggtgcaggcgggcagcactgagggaccctgccccgcccctccccccaggcccctttcctctgcagcttctcaagtgagactgacctgtctcacccagcagccactgcccagccgcactccaggcaagggccagtgcgcctgctcctgaccactgcaatcccagcgcccaaggaaggccacttctcaactggcagaacttctgaagtttagaattggaattacttccttactagtgtcttttggcttaaattttgtcttttgaagttgaatgcttaatcccgggaaagaggaacaggagtgccagactcctggtctttccagtttagaaaaggctctgtgccaaggagggaccacaggagctgggacctgcctgcccctgtcttttccccttggttttgtgttacaagagttgttggagacagtttcagatgattatttaatttgtaaatattgtacaaattttaatagcttaaattgtatatacagccaaataaaaacttgcattaac

SEQ ID NO: 1057 - protein, 617 aa, Homo sapiens
  ref <308>: DATABASE ACCESSION NUMBER: Refseq / XP_045498
  ref <309>: DATABASE ENTRY DATE: 2003-01-03
MFRTAVMMAASLALTGAVVAHAYYLKHQFYPTVVYLTKSSPSMAVLYIQAFVLVFLLGKVMGKVFFGQLRAAEMEHLLERSWYAVTETCLAFTVFRDDFSPRFVALFTLLLFLKCFHWLAEDRVDFMERSPNISWLFHCRIVSLMFLLGILDFLFVSHAYHSILTRGASVQLVFGFEYAILMTMVLTIFIKYVLHSVDLQSENPWDNKAVYMLYTELFTGFIKVLLYMAFMTIMIKVHTFPLFAIRPMYLAMRQFKKAVTDAIMSRRAIRNMNTLYPDATPEELQAMDNVCIICREEMVTGAKRLPCNHIFHTSCLRSWFQRQQTCPTCRMDVLRASLPAQSPPPPEPADQGPPPAPHPPPLLPQPPNFPQGLLPPFPPGMFPLWPPMGPFPPVPPPPSSGEAVAPPSTSAAALSRPSGAATTTAAGTSATAASATASGPGSGSAPEAGPAPGFPFPPPWMGMPLPPPFAFPPMPVPPAGFAGLTPEELRALEGHERQHLEARLQSLRNIHTLLDAAMLQINQYLTVLASLGPPRPATSVNSTEETATTVVAAASSTSIPSSEATTPTPGASPPAPEMERPPAPESVGTEEMPEDGEPDAAELRRRRLQKLESPVAH

SEQ ID NO: 1058 - DNA, 1435 bp, Rattus norvegicus
  ref <308>: DATABASE ACCESSION NUMBER: Refseq / NM_019907
  ref <309>: DATABASE ENTRY DATE: 2003-01-14
tgatgtattttggcagctgctcctgctttgcgggttgagggggacaggacgacccgtggaaggatggtgtgtgaaaagtgtgaaaagaaactcggcagggttatcactccagacacatggaaggacggggcccggaacaccacagaaagtggtggaaggaagctgaacgaaaacaaagctctgacttcgaagaaagcaaggtttgatccatatggaaaaaataagttctccacttgcagaatttgtaaaagttctgtacaccagccaggttctcattactgtcaaggctgtgcctacaagaaaggcatctgtgcgatgtgtggcaaaaaggttttggatactaaaaactacaagcagacttccgtctagtctgttgaagattccaactctacggttgtatttgtgcttcagcttttcaagcgtaacacggatgtccatctcacaaaatgacctgtttgaggatgaatgattcagtctgaagcagggacgttgatcagtattgatctgtctgctctcatgaagttgtgaatgaagtttctgccttaggtggttattttccttgtgagcattttactgaactagataagtgacaaaattaatgaacgaggtttcccaacttgtgtacgcactgtctactcgacattatctaattaatgagtacgcactgtctactcgacattatctgtataattaatgagtaaggtgttccctacttctgtacgcactgtctactagacattatccatataattcctatctgacccacgcgttttatttatagatattgcaaatgtgaaatcactgattctttgctctgaacttgacatccagacttgagatttctcactttctcacaaacattgcagttcttagaacaaacagggccttagttactgcattttcatgagctataatgtctgagaccatttttgcagagtggttccttggtgaccagtcctgccacaagtctaagataagttgcatttttatttaaagttgctgttgctgctaaagtgagtttcttttacgtgtgactgagtgccatggggcccgatgtccaggcagacactgaagttcagagacgtgcgttctgtcagcattatcttaaattcaaatgagaatacatttattctgtttgggaatgttctttgaagaaggatacatagctttccttaacaccccccaacccccgctgccacttcctcagaaataaagcaggcctctggcctctgacattgctgcagcctgccagggggctgctgtgaatgaaggtttttcttgttgccttctttgggttgggccttccacctttaaaaccctcagcctacccagagaccaaaagcatattctctgtttttatctgcaggatcttaaatgcatatcactgtgtaatgtgagacctactataaacaatgaaaaaataaaaaaaaaaaaa

SEQ ID NO: 1059 - protein, 101 aa, Rattus norvegicus
  ref <308>: DATABASE ACCESSION NUMBER: Refseq / NP_063972
  ref <309>: DATABASE ENTRY DATE: 2003-01-14
MVCEKCEKKLGRVITPDTWKDGARNTTESGGRKLNENKALTSKKARFDPYGKNKFSTCRICKSSVHQPGSHYCQGCAYKKGICAMCGKKVLDTKNYKQTSV

SEQ ID NO: 1060 - DNA, 411 bp, Rattus norvegicus
  ref <308>: DATABASE ACCESSION NUMBER: EMBL / AI230294
  ref <309>: DATABASE ENTRY DATE: 1999-01-22
tgggcccagcccagcagatcctgccgaggcccacccgaaaagcattgtacgccttggcttccaggcctgacatcgtgggtctccgtctggtcctctgtggcttggagaggggacaagcccagtgtaggctcctgccagattactccatgctagcacactccctgtccctcacctctgctgatcaggccttggggtcttccctgtgaggcccaggctgtgctggagctgcgtgccctgccctgccccctcccccaggtctggtgctgaggacgcagctcctctcagggtccgaagtctccaaactgaaatgtatatttttgctaggagccccagcttcctgtgtttttaatataaatagtgtatacagactgatggaactttaaataaatgggaagtaagtatttaagagtt

SEQ ID NO: 1061 - DNA, 3301 bp, Homo sapiens
  misc_feature (1)..(3301): n=a, c, g or t
  ref <308>: DATABASE ACCESSION NUMBER: Refseq / NM_006238
  ref <309>: DATABASE ENTRY DATE: 2002-11-05
gaattctgcggagcctgcgggacggcggcgggttggcccgtaggcagccgggacagtgttgtacagtgttttgggcatgcacgtgatactcacacagtggcttctgctcaccaacagatgaagacagatgcaccaacgagggtctggaatggtctggagtggtctggaaagcagggtcagatacccctggaaaactgaagcccgtggagcaatgatctctacaggactgcttcaaggctgatgggaaccaccctgtagaggtccatctgcgttcagacccagacgatgccagagctatgactgggcctgcaggtgtggcgccgaggggagatcagccatggagcagccacaggaggaagcccctgaggtccgggaagaggaggagaaagaggaagtggcagaggcagaaggagccccagagctcaatgggggaccacagcatgcacttccttccagcagctacacagacctctcccggagctcctcgccaccctcactgctggaccaactgcagatgggctgtgacggggcctcatgcggcagcctcaacatggagtgccgggtgtgcggggacaaggcatcgggcttccactacggtgttcatgcatgtgaggggtgcaagggcttcttccgtcgtacgatccgcatgaagctggagtacgagaagtgtgagcgcagctgcaagattcagaagaagaaccgcaacaagtgccagtactgccgcttccagaagtgcctggcactgggcatgtcacacaacgctatccgttttggtcggatgccggaggctgagaagaggaagctggtggcagggctgactgcaaacgaggggagccagtacaacccacaggtggccgacctgaaggccttctccaagcacatctacaatgcctacctgaaaaacttcaacatgaccaaaaagaaggcccgcagcatcctcaccggcaaagccagccacacggcgccctttgtgatccacgacatcgagacattgtggcaggcagagaaggggctggtgtggaagcagttggtgaatggcctgcctccctacaaggagatcagcgtgcacgtcttctaccgctgccagtgcaccacagtggagaccgtgcgggagctcactgagttcgccaagagcatccccagcttcagcagcctcttcctcaacgaccaggttacccttctcaagtatggcgtgcacgaggccatcttcgccatgctggcctctatcgtcaacaaggacgggctgctggtagccaacggcagtggctttgtcacccgtgagttcctgcgcagcctccgcaaacccttcagtgatatcattgagcctaagtttgaatttgctgtcaagttcaacgccctggaacttgatgacagtgacctggccctattcattgcggccatcattctgtgtggagaccggccaggcctcatgaacgttccacgggtggaggctatccaggacaccatcctgcgtgccctcgaattccacctgcaggccaaccaccctgatgcccagtacctcttccccaagctgctgcagaagatggctgacctgcggcaactggtcaccgagcacgcccagatgatgcagcggatcaagaagaccgaaaccgagacctcgctgcaccctctgctccaggagatctacaaggacatgtactaacggcggcacccaggcctccctgcagactccaatggggccagcactggaggggcccacccacatgacttttccattgaccagctctcttcctgtctttgttgtctccctctttctcagttcctctttcttttctaattcctgttgctctgtttcttcctttctgtaggtttctctcttcccttctcccttctcccttgccctccctttctctctcctatccccacgtctgtcctcctttcttattctgtgagatgttttgtattatttcaccagcagcatagaacaggacctctgcttttgcacaccttttccccaggagcagaagagagtgggcctgccctctgccccatcattgcacctgcaggcttaggtcctcacttctgtctcctgtcttcagagcaaaagacttgagccatccaaagaaacactaagctctctgggcctgggttccagggaaggctaagcatggcctggactgactgcagccccctatagtcatggggtccctgctgcaaaggacagtggcagaccccggcagtagagccgagatgcctccccaagactgtcattgcccctccgatcgtgaggccacccactgacccaatgatcctctccagcagcacacctcagccccactgacacccagtgtccttccatcttcacactggtttgccaggccaatgttgctgatggcccctccagcacacacacataagcactgaaatcactttacctgcaggcaccatgcacctcccttccctccctgaggcaggtgagaacccagagagaggggcctgcaggtgagcaggcagggctgggccaggtctccggggaggcaggggtcctgcaggtcctggtgggtcagcccagcacctcgcccagtgggagcttcccgggataaactgagcctgttcattctgatgtccatttgtcccaatagctctactgccctccccttcccctttactcagcccagctggccacctagaagtctccctgcacagcctctagtgtccggggaccttgtgggaccagtcccacaccgctggtccctgccctcccctgctcccaggttgaggtgcgctcacctcagagcagggccaaagcacagctgggcatgccatgtctgagcggcgcagagccctccaggcctgcaggggcaaggggctggctggagtctcagagcacagaggtaggagaactggggttcaagcccaggcttcctgggtcctgcctggtcctccctcccaaggagccattctatgtgactctgggtggaagtgcccagcccctgcctgacggnnnnnnngatcactctctgctggcaggattcttcccgctccccacctacccagctgatgggggttggggtgcttctttcagccaaggctatgaagggacagctgctgggacccacctccccccttccccggccacatgccgcgtccctgcccccacccgggtctggtgctgaggatacagctcttctcagtgtctgaacaatctccaaaattgaaatgtatatttttgctaggagccccagcttcctgtgtttttaatataaatagtgtacacagactgacgaaactttaaataaatgggaattaaatatttaaaaaaaaaagcggccgcgaattc

SEQ ID NO: 1062 - protein, 441 aa, Homo sapiens
  ref <308>: DATABASE ACCESSION NUMBER: Refseq / NP_006229
  ref <309>: DATABASE ENTRY DATE: 2002-11-05
MEQPQEEAPEVREEEEKEEVAEAEGAPELNGGPQHALPSSSYTDLSRSSSPPSLLDQLQMGCDGASCGSLNMECRVCGDKASGFHYGVHACEGCKGFFRRTIRMKLEYEKCERSCKIQKKNRNKCQYCRFQKCLALGMSHNAIRFGRMPEAEKRKLVAGLTANEGSQYNPQVADLKAFSKHIYNAYLKNFNMTKKKARSILTGKASHTAPFVIHDIETLWQAEKGLVWKQLVNGLPPYKEISVHVFYRCQCTTVETVRELTEFAKSIPSFSSLFLNDQVTLLKYGVHEAIFAMLASIVNKDGLLVANGSGFVTREFLRSLRKPFSDIIEPKFEFAVKFNALELDDSDLALFIAAIILCGDRPGLMNVPRVEAIQDTILRALEFHLQANHPDAQYLFPKLLQKMADLRQLVTEHAQMMQRIKKTETETSLHPLLQEIYKDMY

SEQ ID NO: 1063 - DNA, 1547 bp, Rattus norvegicus
  ref <308>: DATABASE ACCESSION NUMBER: Refseq / NM_019237
  ref <309>: DATABASE ENTRY DATE: 2003-01-13
ctgctgctgctgctgctgctgctgttgctgctgctgctgtttccagcactccccctacacaatgctgcctgctgccctaacctccctgctggggccattccttctagcctgggtgctgcctcttgcccgaggccagacccccaactacacgagaccagtgttcctgtgtggaggggatgtgaccggggagtcgggttacgtggcaagtgagggtttccccaacctctaccccccaaacaagaagtgcatctggacaataacggtgcctgagggccagactgtgtccctgtccttccgagtctttgatatggaactccacccttcctgccgctatgatgctctggaggtctttgctggatccgggacctcaggccagcgacttggacgcttctgtggcaccttcaggcctgcgcctgtagttgcacctggcaaccaagtgactttaaggatgacaactgacgagggcactgggggacgaggattcctgctctggtacagcggtcgggccacctcaggcactgagcaccagttttgcggggggcggatggagaaggcgcagggaaccctgaccacgcccaactggcctgagtcggattaccccccaggcatcagctgttcctggcacatcattgcaccctcaaaccaggtgatcatgctaaccttcgggaagtttgatgtggagcctgacacatactgccgatatgactctgtcagtgtgttcaatggagctgtgagtgacgactcaaagaggctggggaaattttgcggagacaaggcccctagccccatctcttccgaagggaatgagctcctggtccagtttgtatcagatctcagtgtcactgccgatggcttctcagcctcctacaggaccctgccacgggatgccgtggaaaaggagtcagccccaagtccaggggaggatgcacagcatggtccccagtcccgctctgaccctaagacaggaactgggcccaaagtcaaaccacccagtaagcctaaagtccagcctgtagagaaacctgagggctctcctgctacccaggcaactccagttgctccagatgcccccagcatcacttgcccaaagcagtacaagcggtcaggcaccttgcagagcaacttttgctccagtagcctggtggtgacaggaacagtgaaggccatggtccggggcccaggggagggcctcactgtcaccgtcagtctcctgggtgtctacaaaaccggagacctggacctgccctctccagctagtggcacctctctgaagttctatgtgccctgcaagcagatgccccccatgaagaaaggagccagttacctgctgatgggtcaggtggaagagaacagaggccccatccttcctccggagagcttcgtggtgctctacaggcccaaccaggaccagatcctgagtaacctaagcaagagaaagtgcccctcccagcctaggccagatgcctgatgtcctcgccagatcagagtgtggtgcttttatccaaataaatgtttcttgactcaggaaggaaaaaaaaaaaaaaaaa

SEQ ID NO: 1064 - protein, 468 aa, Rattus norvegicus
  ref <308>: DATABASE ACCESSION NUMBER: Refseq / NP_062110
  ref <309>: DATABASE ENTRY DATE: 2003-01-13
MLPAALTSLLGPFLLAWVLPLARGQTPNYTRPVFLCGGDVTGESGYVASEGFPNLYPPNKKCIWTITVPEGQTVSLSFRVFDMELHPSCRYDALEVFAGSGTSGQRLGRFCGTFRPAPVVAPGNQVTLRMTTDEGTGGRGFLLWYSGRATSGTEHQFCGGRMEKAQGTLTTPNWPESDYPPGISCSWHIIAPSNQVIMLTFGKFDVEPDTYCRYDSVSVFNGAVSDDSKRLGKFCGDKAPSPISSEGNELLVQFVSDLSVTADGFSASYRTLPRDAVEKESAPSPGEDAQHGPQSRSDPKTGTGPKVKPPSKPKVQPVEKPEGSPATQATPVAPDAPSITCPKQYKRSGTLQSNFCSSSLVVTGTVKAMVRGPGEGLTVTVSLLGVYKTGDLDLPSPASGTSLKFYVPCKQMPPMKKGASYLLMGQVEENRGPILPPESFVVLYRPNQDQILSNLSKRKCPSQPRPDA

SEQ ID NO: 1065 - DNA, 1510 bp, Homo sapiens
  ref <308>: DATABASE ACCESSION NUMBER: Refseq / NM_002593
  ref <309>: DATABASE ENTRY DATE: 2000-10-31
atcctgctgctgccgccaccgctgctgctgctctgcaaaattcagctgctgcctctgtcttgaggaccccagcgcctttcccccggggccatgctgcctgcagccacagcctccctcctggggcccctcctcactgcctgcgccctgctgccttttgcccagggccagacccccaactacaccagacccgtgttcctgtgcggaggggatgtgaagggggaatcaggttacgtggcaagtgaggggttccccaactcctacccccctaataaggagtgcatctggaccataacggtccccgagggccagactgtgtccctctcattccgagtcttcgacctggagctgcaccccgcctgccgctacgatgctctggaggtcttcgctgggtctgggacttccggccagcggctcggacgcttttgtgggaccttccggcctgcgcccctagtcgcccccggcaaccaggtgaccctgaggatgacgacggatgagggcacaggaggacgaggcttcctgctctggtacagcgggcgggccacctcgggctctgagcaccaattttgcggggggcggctggagaaggcccagggaaccctgaccacgcccaactggcccgagtccgattaccccccgggcatcagctgttcctggcacatcatcgcgcccccggaccaggtcatcgcgctgaccttcgagaagtttgacctggagccggacacctactgccgctatgactcggtcagcgtcttcaacggagccgtgagcgacgactcccggaggctggggaagttctgcggcgacgcagtcccgggctccatctcctccgaagggaatgaactcctcgtccagttcgtctcagatctcagtgtcaccgctgatggcttctcagcctcctacaagaccctgccgcggggcactgccaaagaagggcaagggcccggccccaaacggggaactgagcctaaagtcaagctgccccccaagtcccaacctccggagaaaacagaggaatctccttcagcccctgatgcacccacctgcccaaagcagtgccgccggacaggcaccttgcagagcaacttctgtgccagcagccttgtggtgactgcgacagtgaagtccatggttcgggagccaggggagggccttgccgtgactgtcagtcttattggtgcttataaaactggaggactggacctgccaactccacccactggtgcctccctgaagttttacgtgccttgcaagcagtgcccccccatgaagaaaggagtcagttatctgctgatgggccaggtagaagagaacagaggccccgtccttcctccagagagctttgtggttctccaccggcccaaccaggaccagatcctcaccaacctaagcaagaggaagtgcccctctcaacctgtgcgggctgctgcgtcccaggactgagacgcaggccagccccggcccctagccctcaggcctctcttcttatccaaataaatgtttcttaatgaaa

SEQ ID NO: 1066 - protein, 449 aa, Homo sapiens
  ref <308>: DATABASE ACCESSION NUMBER: Refseq / NP_002584
  ref <309>: DATABASE ENTRY DATE: 2000-10-31
MLPAATASLLGPLLTACALLPFAQGQTPNYTRPVFLCGGDVKGESGYVASEGFPNSYPPNKECIWTITVPEGQTVSLSFRVFDLELHPACRYDALEVFAGSGTSGQRLGRFCGTFRPAPLVAPGNQVTLRMTTDEGTGGRGFLLWYSGRATSGSEHQFCGGRLEKAQGTLTTPNWPESDYPPGISCSWHIIAPPDQVIALTFEKFDLEPDTYCRYDSVSVFNGAVSDDSRRLGKFCGDAVPGSISSEGNELLVQFVSDLSVTADGFSASYKTLPRGTAKEGQGPGPKRGTEPKVKLPPKSQPPEKTEESPSAPDAPTCPKQCRRTGTLQSNFCASSLVVTATVKSMVREPGEGLAVTVSLIGAYKTGGLDLPTPPTGASLKFYVPCKQCPPMKKGVSYLLMGQVEENRGPVLPPESFVVLHRPNQDQILTNLSKRKCPSQPVRAAASQD

SEQ ID NO: 1067 - DNA, 2335 bp, Rattus norvegicus
  ref <308>: DATABASE ACCESSION NUMBER: Refseq / NM_030835
  ref <309>: DATABASE ENTRY DATE: 2003-01-13
cggcacgaggccggcaccagctgtcggcacgaggttggactctttcctcccggtcctgcggccctctttctccggcgcgccgcccctcggttgctcagaccgctgtgatcggaggttgccggtgctccagcgcttggcgtcccggcccagtggccgtaggcggcgtaggcaccgcgagccgagcctcccggtggccggggaacggcaagcgagcgagtccgagaggttcttggggcaggtggcgccgcgaagatggtcgccaagcagaggatccgtatggccaacgagaagcacagcaagaacataactcagcgcggcaacgtcgctaagacctcgagaaatgcccccgaagaaaaggcgtcggtaggaccctggttattggccctcttcatttttgtcgtttgtggatctgcaattttccagattattcaaagtatcaggatgggcatgtgaagtgactgaccttgagatgtttccattctcctgtgaattttaacttgaactcattcctgatgttcgatgccctggttaaaaacaattcagtaaatcaccctgcctcagaatgactttttcatatcaaccttcatgtgtcattccaaggtttcttcaagagtcattccaggtttgctagtccatgccacagtgccttgcaaaagcaccacatgaataaagcaataaaatttgattattaagttccagtagtagaccatacttattcagtacagaatgagttttatgtggttattaaaacttatgactaattagattaaatctgtgtagacagggtatagattttgttaaccctaatgtgtaaatgcaattagctaatttaaattttggaaacttaaggttttatatagctaggcactttactactcttggattgaaaaagcacactccattatagggacatgtaactatcctataatcaggtgcttataaatggacaactacacggcctagttttaccacaatcattgtcacctaaatttttttaaaaactcctagggcatatgtaagtggagatgctcactgctgcatctgtttctaatgataatgtttctgttacacagccttgagtttcgcatgagtaagtatagtcacctagggatcccatttgagactgggttgagcattttggtaacttgaatccaaagtgactgcagtttcactaaaaagctatcatggtgagatgaaattaggggatggattgctgaaggtcatacagatcagaattaacatatcaaggggtttaccggtggaggaaaaaagttaagggggaaaagtctaccaagagggaaatgccttgaaaaaataggggggaaacctgtgtgccatatgatatcttagcatgtgaattgcacttttaataccaaaaaggcacatcaactaaaaagttatgattgaaatgcccttagggttctaggtatgtcaacctaaactagcatttggagttaaatgaatttactgataaggatcagtctagtcttcctctgtatgacttagtaggttgtgattggtcagatttccttttttaactaacggtaagggtgagagtgatgaggcagggtttgaggttttctggtactattgaaaactgcaagtcctgactatgcacttagccagaacttggtgtagaccaccaagcaatatctgtgtatggaattggaagaaacctgcttatgtttgctttgttatttgcctcaggagatctctttttgaaataagctgttttccaaaggaacagaagggaaacttgctacctgttctgagagcagtgtaaacctcacaggactttggaccccctcagatgtagaggagaatgaaggaaaggaatagttagggatgcacaggaatttatctgtctctgatcaggaaagaaagctggctatgggtctgcaggggcatgactgatggttgtctgcctcttttcaccctgtaagtgaatccctgaactggattcactgaagcaagtcttggttaactaattctattttactataactttaaaagtgaaaaatattctctaaatttatagcaggtgccttatttcctttgaatcaaatcattccataccagaatttcccttggtttactattagataattggctttaagatacttttgttttgaaacatacagtgttttaattgatttgttaaattgctgtagccatcaatcatttcacatttgtaaaatacattccctttgtatcatgtaatttgcctattcagtgcattttatattcaggttgggttatgcatatttgggtcaatgaaagttgtgtctgtttgatttatgctttaaaaataaagttccctggatatttaaaaaaa

SEQ ID NO: 1068 - protein, 66 aa, Rattus norvegicus
  ref <308>: DATABASE ACCESSION NUMBER: Refseq / NP_110462
  ref <309>: DATABASE ENTRY DATE: 2003-01-13
MVAKQRIRMANEKHSKNITQRGNVAKTSRNAPEEKASVGPWLLALFIFVVCGSAIFQIIQSIRMGM

SEQ ID NO: 1069 - DNA, 2488 bp, Homo sapiens
  ref <308>: DATABASE ACCESSION NUMBER: Refseq / NM_014445
  ref <309>: DATABASE ENTRY DATE: 2003-03-08
cttcctctttcactccgcgctcacggcggcggccaaagcggcggcgacggcggcgcgagaacgacccggcggccagttctcttcctcctgcgcacctgccccgctcggtcagtcagtcggcggccggcgcccggcttgtgctcagacctcgcgcttgcggcgcccaggcccagcggccgtagctagcgtctggcctgagaacctcggcgctccggcggcgcgggcaccacgagccgagcctcgcagcggctccagaggaggcaggcgagtgagcgagtccgaggggtggccggggcaggtggtggcgccgcgaagatggtcgccaagcaaaggatccgtatggccaacgagaagcacagcaagaacatcacccagcgcggcaacgtcgccaagacctcgagaaatgcccccgaagagaaggcgtctgtaggaccctggttattggctctcttcatttttgttgtctgtggttctgcaattttccagattattcaaagtatcaggatgggcatgtgaagtgactgaccttaagatgtttccattctcctgtgaattttaacttgaactcattcctgatgtttgataccctggttgaaaacaattcagtaaagcatcctgcctcagaatgactttcctatcatgcttcatgtgtcattccaaggtttcttcatgagtcattccaagttttctagtccataccacagtgccttgcaaaaaacaccacatgaataaagcaataaaatttgattgttaagatacagtagtggaccctacttattcagtcaattaagagtaagtttttttatgtggttattaaaacagtatgaacaattagtctaactctgcatagacagggtctagattttgttaacccaaatgtataactgcagttagcttaaattacaatttgaagtcttgtggtttttatatagctaggcactttattactcttttgaactgaaagcacactcccttataggttcatgtaactgtcctgtaataaggtgcttataaatggaacaactacacagcctagttttgccacaacctttagcatctaaaaagttttaaaagcttctaaatgtctaatataaagggagatgcttatagccacaacatctattttaccaatattgtttccattacactaccttggattttgcatgagtgagtatagtaacccaagatgccataaaaaaaaacttgatcgttttctgacttaattagttactgtggtttcactaaaagctaccgtggtggagtgaagtcagtcagggaaggtttgtttatgttacatttatttcaccagaactattttaatatatcaaaggggtttactatgccaaacaaaattctagggaaaaatactgctaaaaatggatgcctcatcagaacatgctgttgagtccaatgtgccataagacattttagcatgttaaatagcacttttaatagcaaaaaaaggcacatcaactgcgaagttatccttagtttgcaaatgctttttctagattaatgatttttcaatcattagggtactagacacatcagcctaaagtggcatctggaattgaatggatttactgataatgatcagtctttagtcttccctttgttatatgactttataggttatgattgatcaaatttacgttttactaatggtaagggtgagggtcatagggcaggttttgggttttctagtactgttgaaaactgcaagtattggctatttgtatacttagccataacttggtgaaaaaaaacctgagcagtgtctatgtattaatgcgttggaaagaaagctgcttgtgtttgctttgttaattgcctcaggatatttcttttaaaataagctgttttaagaggaacagaagggaaatctgctacctagtctatacacagcgtgaacctcacagggggcttctgataccctcaaacatggagaacagtaagggagcagagtggttaaggactttcaggaacttaactattctggaataaggaatgaatcaactgaccttgggccagcaggtttttaactaaattgttacttgcctttctcacccagttaatcagtctctgtacttgtttccctttttgaaacaagtgtcttggttaactaattctgttttatggttgtgctaaattcatagcaggtgccttattctttgcttttagtcaaaccattccatatcagaattttccttggtttactatagatatttggctttaagttgttgtttgtgttttttaatgtacaatgttctgataaatttgactgttaaattgctatagctagcaatcattttacatatgtaaaaaattgcattccctttgtatttcatgtgtaattcaccaattaagtgcagtttatattcaggttggattatgcatgtttaggtaaacgaaagctgtgtcttacttgatttattctttaaaaataaagttccctgaatatttgaaaaaaaaaaaaaaaaaaaaaaaa

SEQ ID NO: 1070 - protein, 66 aa, Homo sapiens; identical to SEQ ID NO: 1068
  ref <308>: DATABASE ACCESSION NUMBER: Refseq / NP_055260
  ref <309>: DATABASE ENTRY DATE: 2003-03-08

SEQ ID NO: 1071 - DNA, 1344 bp, Rattus norvegicus
  ref <308>: DATABASE ACCESSION NUMBER: Refseq / NM_057116
  ref <309>: DATABASE ENTRY DATE: 2003-01-13
atgggcgaggacacggacacgcggaaaattaaccacagcttcctgcgggaccacagctatgtgacagaagctgacgtcatctccactgtcgagttcaaccacactggggaactgctggccacaggtgacaagggtggccgggtggttatcttccagcgggaaccagagagtaagaatgcacctcacagccagggtgagtacgatgtgtacagcaccttccagagccacgagcctgagtttgactacctgaaaagcctggagatagaggagaaaatcaacaagatcaaatggctcccgcagcagaacgccgcccactcgctgctgtccaccaatgataaaactattaaattatggaagattaccgagcgagacaagaggcccgagggctacaacctgaaggatgaggaggggaagctgaaagacctgtccacagtgacgtcactgcaggtgcctgtgctgaagcccatggacttaatggtggaagtgagcccgagaaggatctttgccaatggccacacctaccacatcaactccatctccgtcaacagcgactgcgagacgtacatgtcagcggacgacctgcgcattaacctctggcatctggccatcactgatcggagcttcaacatcgtagacatcaagccagccaacatggaggacctcacggaggtgatcacagcatctgagttccatccgcaccactgcaacctcttcgtctacagcagcagcaagggctccctgcggctctgtgacatgcgggcagctgccctgtgcgacaagcactccaagctctttgaagagcccgaggaccccagcaaccgctccttcttctcagagatcatctcctcggtgtccgacgtgaagttcagccacagtgggcgctacatgctcacgagggattacctcactgtcaaggtctgggacctgaacatggaggcgaggcccatagagacctaccaggtccatgactacctgcggagtaagctctgctccctgtatgagagtgactgcatcttcgacaagtttgagtgtgcctggaatgggagtgacagtgtcatcatgacaggggcctacaacaacttcttccgaatgtttgaccgcaacaccaagcgggatgtgacgctggaggcctcgagggagagcagcaaacccagagcggtgctcaagccaaggcgcgtgtgtgtgggtggcaagcggcggcgtgatgacatcagtgtggacagcttggacttcaccaagaagatcctgcacacggcctggcacccagcggagaacatcattgccattgcagccaccaacaacctgtacatcttccaggataaggtcaattctgacatgcactag

SEQ ID NO: 1072 - protein, 447 aa, Rattus norvegicus
  ref <308>: DATABASE ACCESSION NUMBER: Refseq / NP_476457
  ref <309>: DATABASE ENTRY DATE: 2003-01-13
MGEDTDTRKINHSFLRDHSYVTEADVISTVEFNHTGELLATGDKGGRVVIFQREPESKNAPHSQGEYDVYSTFQSHEPEFDYLKSLEIEEKINKIKWLPQQNAAHSLLSTNDKTIKLWKITERDKRPEGYNLKDEEGKLKDLSTVTSLQVPVLKPMDLMVEVSPRRIFANGHTYHINSISVNSDCETYMSADDLRINLWHLAITDRSFNIVDIKPANMEDLTEVITASEFHPHHCNLFVYSSSKGSLRLCDMRAAALCDKHSKLFEEPEDPSNRSFFSEIISSVSDVKFSHSGRYMLTRDYLTVKVWDLNMEARPIETYQVHDYLRSKLCSLYESDCIFDKFECAWNGSDSVIMTGAYNNFFRMFDRNTKRDVTLEASRESSKPRAVLKPRRVCVGGKRRRDDISVDSLDFTKKILHTAWHPAENIIAIAATNNLYIFQDKVNSDMH

SEQ ID NO: 1073 - DNA, 1601 bp, Homo sapiens
  ref <308>: DATABASE ACCESSION NUMBER: Refseq / XM_029744
  ref <309>: DATABASE ENTRY DATE: 2003-01-04
tggagatggggctgtcttttttctccaaacacttgcccatccaggaaggccagccctgggcattgaagactccagagctgacatcatctctaccgttgagttcaaccacacgggagagctgctggccacaggtgacaagggcggccgggtcgtcatcttccagcgggaaccagagagtaaaaatgcgccccacagccagggcgaatacgacgtgtacagcactttccagagccacgagccggagtttgactatctcaagagcctggagatagaggagaagatcaacaagatcaagtggctcccacagcagaacgccgcccactcactcctgtccaccaacgataaaactatcaaattatggaagattaccgaacgagataaaaggcccgaaggatacaacctgaaggatgaagaggggaaacttaaggacctgtccacggtgacgtcactgcaggtgccagtgctgaagcccatggatctgatggtggaggtgagccctcggaggatctttgccaatggccacacctaccacatcaactccatctccgtcaacagtgactgcgagacctacatgtcggcggatgacctgcgcatcaacctctggcacctggccatcaccgacaggagcttcaacatcgtggacatcaagccggccaacatggaggaccttacggaggtgatcacagcatctgagttccatccgcaccactgcaacctcttcgtctacagcagcagcaagggctccctgcggctctgcgacatgcgggcagctgccctgtgtgacaagcattccaagctctttgaagagcctgaggaccccagtaaccgctcattcttctcggaaatcatctcctccgtgtccgacgtgaagttcagccacagcggccgctacatgctcacccgggactaccttacagtcaaggtctgggacctgaacatggaggcaagacccatagagacctaccaggtccatgactaccttcggagcaagctctgttccctgtacgagaacgactgcattttcgacaagtttgaatgtgcctggaacgggagcgacagcgtcatcatgaccggggcctacaacaacttcttccgcatgttcgatcggaacaccaagcgggacgtgaccctggaggcctcgagggaaagcagcaagccccgggctgtgctcaagccacggcgcgtgtgcgtggggggcaagcgccggcgtgatgacatcagtgtggacagcttggacttcaccaagaagatcctgcacacggcctggcacccggctgagaacatcattgccatcgccgccaccaacaacctgtacatcttccaggacaaggtaaactctgacatgcactaggtatgtgcagttcccggcccctgccacccagcctcatgcaagtcatccccgacatgaccttcacgaccgcaatgcaaggaggggaagaaagtcacagcactgatgaggacagctgcagaggtggcagtgtgtggacacaggaagtttgggccccctccctgccccagctttcctaggccagaattgtgtttggcagtaattgtctgtttaaaaaaataaaaaggaaaggaagcgttcaccgccacaaatc

SEQ ID NO: 1074 - protein, 292 aa, Homo sapiens
  ref <308>: DATABASE ACCESSION NUMBER: Refseq / XP_029744
  ref <309>: DATABASE ENTRY DATE: 2003-01-04
MDLMVEVSPRRIFANGHTYHINSISVNSDCETYMSADDLRINLWHLAITDRSFNIVDIKPANMEDLTEVITASEFHPHHCNLFVYSSSKGSLRLCDMRAAALCDKHSKLFEEPEDPSNRSFFSEIISSVSDVKFSHSGRYMLTRDYLTVKVWDLNMEARPIETYQVHDYLRSKLCSLYENDCIFDKFECAWNGSDSVIMTGAYNNFFRMFDRNTKRDVTLEASRESSKPRAVLKPRRVCVGGKRRRDDISVDSLDFTKKILHTAWHPAENIIAIAATNNLYIFQDKVNSDMH

SEQ ID NO: 1075 - DNA, 516 bp, Rattus norvegicus
  ref <308>: DATABASE ACCESSION NUMBER: EMBL / AI058601
  ref <309>: DATABASE ENTRY DATE: 2000-03-03
aagagcaatttaccgatgaagaaggcaacctcatcactagaaaaatcactcggaaggtaattagacggattggtccacaagagaggaagcaggatgatgtgcagggagaaggctataaggtgaaaacaaagaaggaaatccggaatgtggagaagaaagcccactagtgacggtgacgtcagtccaggaccacgcgttcgtactgccagtattgagaaactcaccagagatcagcagtgaggagaatctctagcaagagcggagtgtggatctgccaccccacacatcagtgacatgtttggggttttgggtttttttggtttttttttttaatgcagaaggataaagaaaatcacctttttttttatttagcatgagccaatttacagagcatggagactcactttcattcccggcgctgacacgcgtgcactaagcaagtgcaatgtaagatacaagaagccatgttgttcagactcagcctcaagtaatttggctcatgctaaaaaaaaaaaa

SEQ ID NO: 1076 - DNA, 14770 bp, Homo sapiens
  ref <308>: DATABASE ACCESSION NUMBER: Refseq / NM_020987
  ref <309>: DATABASE ENTRY DATE: 2001-02-03
gggacaccatcatttgggtttttaaaagcttcagcttctccagcatctttgcattgtgaatatcttcctgcttctagtcaaagctttctctctagtgattggaatgctgctgtaagcctattagaggtgcctgaggatatcaccttttacaaggaagccgtgtgtgcttgagaggatctttttaaatgcattatggctcatgcagcctcacaattaaagaaaaacagggatttagaaatcaatgctgaagaagagcctgagaaaaaaaggaaacaccgcaaacggtcccgggatcggaagaaaaagtctgatgccaatgcaagttacttaagagcagctcgagctggacaccttgaaaaggccctcgactacataaaaaatggagttgacatcaacatttgcaatcagaatgggttgaacgctctccaccttgcttccaaagaaggccatgtagaggttgtttctgagctgctgcagagagaagccaatgtggatgcagctacaaagaaaggaaacacagcattgcacatcgcatctttggctgggcaagcagaggtggtaaaagtcttggttacaaatggagccaatgtcaatgcacaatctcagaatggtttcacgccattgtatatggcagcccaggaaaatcacctggaagttgtcaagtttcttcttgacaatggtgcaagccagagcctagccacagaggatggcttcacaccattggcagtggctttgcaacaaggtcacgaccaagtcgtttcgctcctgctagagaatgacaccaaaggaaaagtgcgtctcccagctcttcatatcgcggcccgcaaagacgacacaaaagccgccgccctgctgctgcagaatgacaacaatgcagatgtggaatcaaagagtggcttcactccgctccacatagctgctcactatggaaatatcaatgtagccacgttgctgttaaaccgagcggctgctgtggatttcaccgcaaggaatgacatcactcctttacatgttgcatcaaaaagaggaaatgcaaatatggtaaaactattgctcgatcgaggagctaaaatcgatgccaaaaccagggatggtctgacaccactgcactgtggagcaaggagtggccacgagcaggtggtagaaatgttgcttgatcgagctgcccccattctttcaaaaaccaagaatggattatctccattgcacatggccacacaaggggatcatttaaactgcgtccagcttctcctccagcataatgtacccgtggatgatgtcaccaatgactacctgactgccctacacgtggctgcccactgtggccattacaaagttgccaaggttctcttggataagaaagctaaccccaatgccaaagccctgaatggctttacccctcttcatatcgcctgcaagaagaatcgaattaaagtaatggaactccttctgaaacacggtgcatccatccaagctgtaaccgagtcgggccttaccccaatccatgttgctgccttcatggggcatgtaaatattgtatcacaactaatgcatcatggagcctcaccaaacaccaccaatgtgagaggagaaacagcactgcacatggcagctcgctccggccaagctgaagttgtgcggtatctggtacaagacggagctcaggtagaagctaaagctaaggatgaccaaacaccactccacatttcagcccgactggggaaagcagacatagtacaacagctgttgcagcaaggggcatctccaaatgcagccacaacttctgggtacaccccacttcacctttccgcccgagaggggcatgaggatgtggccgcgttccttttggatcatggagcgtctttatctataacaacaaagaaaggatttactcctcttcatgtggcagcaaaatatggaaagcttgaagtcgccaatctcctgctacagaaaagtgcatctccagatgctgctgggaagagcgggctaacaccactgcatgtagctgcacattacgataatcagaaagtggcccttctgcttttggaccaaggagcctcacctcacgcagccgcaaagaatggttatacgccactgcacatcgctgccaaaaagaaccagatggacatagcgacaactctgctggaatatggtgctgatgccaacgcagttacccggcaaggaattgcttccgtccatctcgcagctcaggaagggcacgtggacatggtgtcgctgctcctcggtagaaatgcgaatgtgaacctgagcaataagagcggcctgaccccactccatttggctgctcaagaagatcgagtgaatgtggcagaagtcctcgtaaaccaaggggctcatgtggacgcccagacaaagatgggatacacaccactgcatgtgggctgccactatggaaatatcaagattgttaatttcctgctccagcattctgcaaaagttaatgccaaaacaaagaatgggtatacgccattacatcaagcagcacagcaggggcatacgcatataataaatgtcttacttcagaacaacgcctcccccaatgaactcactgtgaatgggaatactgcccttggcattgcccggcgcctcggctacatctcagtagtggacaccctgaagatagtgaccgaagaaaccatgaccacaactactgtcacagagaagcacaaaatgaatgttccagaaacgatgaatgaagttcttgatatgtctgatgatgaagttcgtaaagccaatgcccctgaaatgctcagtgatggcgaatatatctcagatgttgaagaaggtgaagatgcaatgaccggggacacagacaaatatcttgggccacaggaccttaaggaattgggtgatgattccctgcctgcagagggttacatgggctttagtctcggagcgcgttctgccagcctccgctccttcagttcggataggtcttacaccttgaacagaagctcctatgcacgggacagcatgatgattgaagaactccttgtgccatccaaagagcagcatctaacattcacaagggaatttgattcagattctcttagacattacagctgggctgcagacaccttagacaatgtcaatcttgtttcaagccccattcattctgggtttctggttagctttatggtggacgcgagagggggctccatgagaggaagccgtcatcacgggatgagaatcatcattcctccacgcaagtgtacggcccccactcgaatcacctgccgtttggtaaagagacataaactggccaacccacccccacatggtgaaaggagagggattagcagtaggctggtagaaatgggtcctgcaggggcacaatttttaggccctgtcatagtggaaatccctcactttgggtccatgagaggaaaagagagagaactcattgttcttcgaagtgaaaatggtgaaacttggaaggagcatcagtttgacagcaaaaatgaagatttaaccgagttacttaatggcatggatgaagaacttgatagcccagaagagttagggaaaaagcgtatctgcaggattatcacgaaagatttcccccagtattttgcagtggtttcccggattaagcaggaaagcaaccagattggtcctgaaggtggaattctgagcagcaccacagtgccccttgttcaagcatctttcccagagggtgccctaactaaaagaattcgagtgggcctccaggcccagcctgttccagatgaaattgtgaaaaagatccttggaaacaaagcaacttttagcccaattgtcactgtggaaccaagaagacggaaattccataaaccaatcacaatgaccattccggtgcccccgccctcaggagaaggtgtatccaatggatacaaaggggacactacacccaatctgcgtcttctctgtagcattacagggggcacttcgcctgctcagtgggaagacatcacaggaacaactcctttgacgtttataaaagattgtgtctcctttacaaccaatgtttcagccagattttggcttgcagactgccatcaagttttagaaactgtggggttagccacgcaactgtacagagaattgatatgtgttccatatatggccaagtttgttgtttttgccaaaatgaatgatcccgtagaatcttccttgcgatgtttctgcatgacagatgacaaagtggacaaaactttagagcaacaagagaattttgaggaagtcgcaagaagcaaagatattgaggttctggaaggaaaacctatttatgttgattgttatggaaatttggccccacttaccaaaggaggacagcaacttgtttttaacttttattctttcaaagaaaatagactgccattttccatcaagattagagacaccagccaagagccctgtggtcgtctgtcttttctgaaagaaccaaagacaacaaaaggactgcctcaaacagcggtttgcaacttaaatatcactctgccagcacataaaaaggagacagagtcagatcaagatgatgagattgagaaaacagatagacgacagagcttcgcatccttagctttacgtaagcgctacagctacttgactgagcctggaatgattgaacggagtacaggagcaacaagatccctccccaccacttactcatacaagccattcttttctacaagaccataccagtcctggacaacagctccgattacagtgcctgggccagccaagtcaggcttcacttccttatcaagttcttcctctaatacgccatcagcttctccgttaaaatcaatatggtctgtttcgacaccttctccaatcaaatccacattaggcgcgtcaactacatcttcagttaaatccattagtgacgtggcatctccaattagatccttacggacaatgtcttcgccgataaaaactgtggtgtcacaatctccatacaatatccaggtttcctctggtaccctggctagagctccagcagtcacggaagctacgcccttaaaagggctggcatccaattctacgttttcctctcgaacctctccagtgactacagcagggtctcttttggagaggtcatcaattactatgacaccccctgcctcccccaaatcaaacattaatatgtattcctcaagtttgccatttaagtcaattattacatcagcagcaccgctaatatcttcacctttaaagtcagtggtgtctccagttaaatcacgagttgatgtcatttcatcagccaaaattacaatggcatcttctctctcatcacctgtgaagcagatgcctggacatgcagaggtagcattagtcaatggatctatttcccctctaaaatatgcatcatcctcaactttaattaatggatgcaaagccactgccacgttacaggaaaaaatttcttctgctacaaactctgtgagctctgtggtcagtgcagccactgacacagttgagaaagtgttttctaccacgactgcaatgccattttccccactcaggtcatatgtttctgcagcaccatcagcttttcagtctctaagaactccttccgcaagtgcactctatacatcccttgggtcgtcaatatctgcaactacctcatctgtaacttcatcaattataacagtgccagtatactctgtagtcaatgttttgccagaaccagcattaaagaaacttccagactctaattcatttacaaaatcagcagcagccttgctgtcacccattaaaacattgactacggagacacatcctcagcctcacttcagtcgaacttcatctccagttaagtcatctttgttccttgcaccctctgcccttaagttgtctacaccatcttctttatcttccagtcaggagatactaaaagatgtagctgaaatgaaagaggacctaatgcggatgaccgcaatactacagacagatgtgcctgaggagaagccattccaacctgaactcccaaaggaagggagaatagatgatgaagaacctttcaaaattgtagagaaagtaaaggaagacttagtgaaagttagtgaaatccttaaaaaggatgtatgtgtagataataaaggatcacccaaatcaccaaagagtgacaaaggacactctcctgaagatgactggatagaatttagttcggaagaaatccgggaagccagacaacaagctgctgcgagccagtctccatctctgccagagagagtgcaagtaaaagcaaaagccgcctccgaaaaggattataacttgaccaaagttattgattacctaacaaatgatattgggagtagttcactgacaaacttaaaatacaagtttgaggatgcaaagaaggatggtgagggaggacagaaaagagttttaaaaccagcaattgctttgcaggaacacaaactcaaaatgcctccagcctccatgaggacttccacctctgagaaagaattgtgtaaaatggctgattccttttttggaacagatactattttagagtctcctgatgacttttctcaacacgaccaagataaaagtcccttgtctgacagtggctttgaaacaagaagtgaaaagacaccttcagccccacaaagcgctgaaacgactggtcctaaaccactttttcatgaagttcccatccctcctgttattacagaaacaagaactgaagtggttcatgttatcaggagctatgatccctcagctggggatgttccccagacccaaccagaggagcctgtgtcacctaaaccttcacctacttttatggaattggaaccaaagcccaccacctctagtattaaagaaaaggttaaagcatttcaaatgaaagccagtagtgaagaagatgaccacaatcgggttttaagcaaaggcatgcgtgttaaagaagagactcacataaccacaaccaccagaatggtttatcattctccaccaggcggtgaaggtgcatctgaaagaattgaagaaaccatgtcagtccatgacatcatgaaggcctttcagtccgggcgggatccttccaaagaactggcaggtctgtttgaacataagtcggcagtgtctccagatgttcacaagtctgctgctgaaacctcagcccagcatgcagagaaggacaaccaaatgaaacccaaactggagcgtataatagaagtccacatcgaaaaaggtaaccaagctgagcccactgaagtcattattagagaaaccaaaaagcatccagaaaaagaaatgtatgtatatcagaaagacttatcccggggagatattaacctaaaagattttctgccagaaaaacacgatgcttttccttgttcagaggaacagggtcagcaagaagaagaagaacttactgctgaagagtcattgccttcttatctggagtcttccagagtaaacactcctgtgtcccaagaagaagatagccgccctagttctgctcaactcatatctgatgactcttataaaacattgaagcttttgagtcaacactcaatagaataccatgacgatgagttgtcagaactaagaggggagtcttacaggtttgctgagaaaatgcttctgtcagaaaagctagatgtgtctcattctgatactgaggaatcggttacagaccatgcaggaccccctagctcagagttacaggggtctgataagcggtccagagaaaaaatagccactgcccccaaaaaagaaattctctccaaaatctataaagatgtttctgaaaatggtgtaggtaaagtgtctaaagatgagcattttgataaagtgacagtgttgcactattctggcaatgttagtagtccaaaacatgccatgtggatgcgctttactgaggacagattagacagaggtagagagaagttgatatatgaagatagggtggacaggactgtgaaggaggctgaagaaaaactgactgaagtgtcacagttttttcgtgacaaaactgaaaagctaaatgatgaactgcagtccccagagaaaaaggcacgccctaaaaatggcaaagaatattcttctcaaagccctaccagtagcagccctgagaaagtgctactgacagaactgctggcatccaatgatgagtgggttaaggcaagacagcatggccctgatggacaaggcttccccaaggccgaggagaaggcacccagtctgcccagcagcccagagaagatggttctctcccaacagactgaggacagcaagtccacagtggaagccaaaggaagtatttcacagagcaaagcaccagatgggccccagtctggattccagctcaaacaatctaaactcagttccattagattaaaatttgaacaaggcacacacgcaaaaagtaaggacatgtctcaagaagacagaaagtcagatggccagtccagaatcccagttaaaaaaatacaggagagcaagctacccgtctaccaagtttttgctagagaaaaacagcagaaggccatagacctcccagatgaaagtgtatctgtgcaaaaagattttatggtattaaaaaccaaagatgagcatgcccaaagcaacgaaattgttgtaaatgattctggctctgataatgtgaaaaaacagagaactgaaatgtcaagtaaagcaatgcctgactctttttctgagcagcaggctaaagacttggcatgtcatataacctcagatttagcaactaggggaccatgggacaaaaaggtctttagaacatgggagagttcgggagccactaacaataagtctcagaaagaaaaactttcgcatgtacttgttcatgatgtaagagagaatcacattggtcaccctgagagtaaaagtgttgatcaaaagaatgaatttatgtctgtgactgagagagaacgcaaattgttaacaaacggctctctctcagaaattaaagaaatgactgtaaaatctccctccaaaaaagtcttatatagggaatatgttgtgaaagaaggggaccatccaggcggattgcttgatcagccttccaggaggagcgagagctcagcagtgtcacacattcccgtcagagttgctgatgagaggagaatgctgtcttctaatattcccgatggtttttgtgaacagtcggcatttccaaaacatgaactatcacaaaaattgtcccagtcaagcatgagtaaagagacagttgagacacagcactttaattctatagaagatgaaaaagttacctattcagaaatcagcaaagtttccaaacaccagagttatgtaggtttatgcccacctctcgaggaaaccgaaacctcccccaccaaatctcctgattctttagagtttagcccaggaaaggaatctccctctagtgatgtattcgaccacagtcccattgatggattggaaaaactcgcaccactagcccagacagagggagggaaagagataaaaactttacccgtttatgtcagttttgtacaagtggggaagcaatatgaaaaggagatacaacaaggaggtgtaaaaaaaatcataagtcaggaatgtaagacagtacaagaaaccagggggaccttttatacaactagacagcaaaagcaacctccttctccccaaggtagtccagaagatgatactctagagcaagtatcctttctagacagctctgggaaaagccctttaaccccagaaacacccagttcagaggaagtgagttatgaatttacatctaagacacctgactcgctcatagcttatataccaggcaaacccagcccaattcccgaggtttctgaggagtcagaggaggaggaacaggccaagtcaacctcccttaagcagactacagtggaggaaacagcagttgagcgtgaaatgcctaatgacgtgagcaaagactctaaccaaagacccaaaaataacagagttgcctatattgaatttccccctcctccaccactggatgcggaccagattgagtcagataagaagcatcattatctcccagaaaaagaggttgacatgattgaagtcaatctgcaagatgagcatgacaagtaccagctggctgaacctgtcattagagtgcagccaccttcaccagttcctcccggggcagacgtcagtgattcaagcgatgacgaatctatttatcagccagtcccagttaaaaaatataccttcaaattaaaggaagtggacgatgaacaaaaagaaaaacccaaagcttctgctgaaaaggcttccaaccagaaagaactggaaagtaatggatctggaaaagataatgaatttggccttggccttgattcacctcagaatgaaattgcccagaatgggaacaacgaccagtccatcacagagtgttccattgccaccacagcagagttttctcatgacacggatgccacagagatcgactctctggatggctatgacctgcaagatgaagatgatggcttgacagagagtgattctaaactcccaattcaagccatggaaattaagaaagatatctggaacacagagggcattctgaagccagctgaccgctcttttagccaaagtaaacttgaagttatcgaggaggagggaaaggtgggaccagatgaggacaagccaccttctaaaagttcttcatctgaaaagactcctgataagactgatcagaagtcaggggcccagttcttcacactggaaggcagacatcctgacagatcagtgtttcctgatacttacttcagttacaaagtagatgaagaatttgccactccttttaaaacagtagctaccaaaggtctagattttgacccttggtctaataaccgaggggatgatgaagtttttgacagtaaatcacgggaagatgaaactaagccatttgggctggcggtagaagaccgctctccagcaacaacccctgatacaacgccagccagaacgccaactgatgaaagtaccccaactagtgagcctaaccccttcccatttcatgaaggaaaaatgtttgagatgactcgcagtggtgcaattgacatgagcaagagggattttgttgaagagaggctccaatttttccagattggtgagcatacttctgaagggaagtcaggggaccagggggaaggggataaaagtatggtcactgccacaccacagccacagtcaggggacaccactgtagaaaccaatctagagagaaatgtagagacacctacagtggaacctaaccccagcatcccgaccagcggagagtgtcaggaaggcacatccagtagtggctccctggagaaatcagcagcagccactaacacctctaaagttgaccccaagttgcgcacgcctataaaaatgggaatttctgcatccaccatgaccatgaagaaagaaggccctggagaaataacagataagatagaagcggtgatgaccagttgtcagggattagaaaatgaaactataacaatgatttcaaatacagccaatagccagatgggcgttaggccccatgaaaaacatgattttcaaaaagataactttaataacaacaacaatttggattcttccactatacagacagataacattatgagtaatatagttctgacagaacattctgcacccacttgtaccacagagaaagataacccagtgaaagtctcatcaggaaaaaagacaggggtactacaaggacactgtgtaagagataagcagaaagttcttggagaacagcaaaaaacaaaggaattgatagggattaggcaaaaatccaaacttcccataaaggccacttcaccaaaagataccttcccaccgaaccatatgtcaaacactaaagcaagtaaaatgaagcaggttagtcaatccgagaaaaccaaagcccttactacttcttcatgtgtagatgtaaagtccagaattccagtgaaaaacacacccagggataacataattgcagttagaaaagcatgtgccacacaaaagcaagggcagccagagaaaggcaaggccaaacagcttccatccaagttgccagtaaaggtaagatccacctgtgtcactaccaccaccaccactgccaccaccaccaccactaccaccactaccaccaccaccagctgcacagttaaagttaggaaaagtcagctcaaggaagtatgtaaacattccattgaatattttaagggaattagtggtgagaccttaaagcttgtggaccgcctctctgaagaagaaaaaaagatgcagtccgagttgtccgatgaggaagaaagtacctcaagaaacacgtcgttgtccgagacttcccggggtggccagccttcggttacaacgaagtctgctagagataagaaaacagaggcagcacctttaaaatcaaagagtgaaaaggccggcagtgagaaaaggagcagtagaaggactggtccacagagtccatgtgaacggacagatatcaggatggcaatagtagccgatcacctgggacttagttggacagaactggcaagggaactgaatttttcagtggatgaaatcaatcaaatacgtgtggaaaatccaaattctttaatttctcagagcttcatgttattaaaaaaatgggttaccagagacggaaaaaatgccacaactgatgccttaacttcggtcttgacaaaaattaatcgaatagatatagtgacactgctagaaggaccaatatttgattatggaaatatttcaggcaccagaagttttgcagatgagaacaatgttttccatgaccctgttgatggttggcagaatgagacatcaagtggaaacctagagtcctgcgctcaagctcgaagagtaactggtgggttactagatcgactggatgacagccctgaccagtgtagagattccattacctcatatctcaaaggagaagctggcaaatttgaagcaaatggaagccatacagaaatcactccagaagcaaagacaaaatcttactttccagaatcccaaaatgatgtaggaaaacagagtaccaaggaaactctgaaaccaaaaatacatggatctggtcatgttgaagaaccagcatcaccactagcagcatatcagaaatctctagaagaaaccagcaagcttataatagaagagactaaaccctgtgtgcctgtcagtatgaaaaagatgagtaggacttctccagcagatggcaagccaaggcttagcctccatgaagaagaggggtccagtgggtctgagcaaaagcagggagaaggttttaaggtgaaaacgaagaaagaaatccggcatgtggaaaagaagagccactcgtaacagcgaacggtcagtcaaggatcataagtttttactgccagtattgagaaattcgtggaagaaatgtcagcaggaagtaaaaattcaccgagaagtgtgtgtgtgttcgctgcttccacacattaatggcatgattttttttatgcaaaaagaaaagaaaagaaaaccacccacattttaatttagcatgagccaatttacagagcatggaaatcactttcatttccggattggcgcgtgtgcaattagcaatgcagtgtatatacaagaagccatgctgttaacagtttatctcaagtaatttggtgtcatttacaaaaggaagaaattcttgccatcagaagggacagaaggagatggaatgatcaaatcacagagaaacactaaaattactaaatctacaacagctcgccttatttttcttggacccaaactgtcagggtataaacactatttgtttcttttttaaaacatcgatagttttgctgtaaataataacactgtataaattctaacagaaaaatagaataaaatgttgataaggcactgcctcttagaacacaaacagaatattgcaaatgcatttaacaaataggggtctcaagtgacttcaccctagaagaggagggagggattctgggtgggggtgactcttcactgattcttgtatattagcaattataatgtttgtatatgcaaaactgctagcttgattttaaaaaaaaacaaatctttaaaatctgctgcaaatttaaataattcccaaaatgaggaattctgtagttctgtgaaaaatttttttcttcagaatactaatattttgatgcatgtgtatcaccttattttgattaaatcttttccaattttgcaaacactacagtatactgcaacacaaaagattttatctgtaaacacaaagcccttcatctaatatttgttgctattgccaatttttcaatgaaatgacctaaaaacaacaaaaaaaaataacctatacggtagttgctttagggggtggggggatgctatctgttagtgcttaaaagggggtaaatgcttgccgctttagaggtggatggtgctcataaaaggccccagtcgggggtatttaaaaaggactgaacagaaatccttagctagtagaatggcagcacgctgtaaaattattactgtattgtgtactggctataagatgtagacacctttcagtaagccaatcatttgtaaccattctagcagtgtcatattaggttaataaggctgctgtgttttaaagggcatttttatttgggttttggtgaaattctttaatttgttgattatattcacataaaatcagcattcattgacacatagctctaatgacatatgtatgaaaaaccatacactggatgacctagtcgattatttaagcataaaataaattgtgttaaactcttcacct

SEQ ID NO: 1077 - protein, 4377 aa, Homo sapiens
  ref <308>: DATABASE ACCESSION NUMBER: Refseq / NP_066267
  ref <309>: DATABASE ENTRY DATE: 2001-02-03
MAHAASQLKKNRDLEINAEEEPEKKRKHRKRSRDRKKKSDANASYLRAARAGHLEKALDYIKNGVDINICNQNGLNALHLASKEGHVEVVSELLQREANVDAATKKGNTALHIASLAGQAEVVKVLVTNGANVNAQSQNGFTPLYMAAQENHLEVVKFLLDNGASQSLATEDGFTPLAVALQQGHDQVVSLLLENDTKGKVRLPALHIAARKDDTKAAALLLQNDNNADVESKSGFTPLHIAAHYGNINVATLLLNRAAAVDFTARNDITPLHVASKRGNANMVKLLLDRGAKIDAKTRDGLTPLHCGARSGHEQVVEMLLDRAAPILSKTKNGLSPLHMATQGDHLNCVQLLLQHNVPVDDVTNDYLTALHVAAHCGHYKVAKVLLDKKANPNAKALNGFTPLHIACKKNRIKVMELLLKHGASIQAVTESGLTPIHVAAFMGHVNIVSQLMHHGASPNTTNVRGETALHMAARSGQAEVVRYLVQDGAQVEAKAKDDQTPLHISARLGKADIVQQLLQQGASPNAATTSGYTPLHLSAREGHEDVAAFLLDHGASLSITTKKGFTPLHVAAKYGKLEVANLLLQKSASPDAAGKSGLTPLHVAAHYDNQKVALLLLDQGASPHAAAKNGYTPLHIAAKKNQMDIATTLLEYGADANAVTRQGIASVHLAAQEGHVDMVSLLLGRNANVNLSNKSGLTPLHLAAQEDRVNVAEVLVNQGAHVDAQTKMGYTPLHVGCHYGNIKIVNFLLQHSAKVNAKTKNGYTPLHQAAQQGHTHIINVLLQNNASPNELTVNGNTALGIARRLGYISVVDTLKIVTEETMTTTTVTEKHKMNVPETMNEVLDMSDDEVRKANAPEMLSDGEYISDVEEGEDAMTGDTDKYLGPQDLKELGDDSLPAEGYMGFSLGARSASLRSFSSDRSYTLNRSSYARDSMMIEELLVPSKEQHLTFTREFDSDSLRHYSWAADTLDNVNLVSSPIHSGFLVSFMVDARGGSMRGSRHHGMRIIIPPRKCTAPTRITCRLVKRHKLANPPPHGERRGISSRLVEMGPAGAQFLGPVIVEIPHFGSMRGKERELIVLRSENGETWKEHQFDSKNEDLTELLNGMDEELDSPEELGKKRICRIITKDFPQYFAVVSRIKQESNQIGPEGGILSSTTVPLVQASFPEGALTKRIRVGLQAQPVPDEIVKKILGNKATFSPIVTVEPRRRKFHKPITMTIPVPPPSGEGVSNGYKGDTTPNLRLLCSITGGTSPAQWEDITGTTPLTFIKDCVSFTTNVSARFWLADCHQVLETVGLATQLYRELICVPYMAKFVVFAKMNDPVESSLRCFCMTDDKVDKTLEQQENFEEVARSKDIEVLEGKPIYVDCYGNLAPLTKGGQQLVFNFYSFKENRLPFSIKIRDTSQEPCGRLSFLKEPKTTKGLPQTAVCNLNITLPAHKKETESDQDDEIEKTDRRQSFASLALRKRYSYLTEPGMIERSTGATRSLPTTYSYKPFFSTRPYQSWTTAPITVPGPAKSGFTSLSSSSSNTPSASPLKSIWSVSTPSPIKSTLGASTTSSVKSISDVASPIRSLRTMSSPIKTVVSQSPYNIQVSSGTLARAPAVTEATPLKGLASNSTFSSRTSPVTTAGSLLERSSITMTPPASPKSNINMYSSSLPFKSIITSAAPLISSPLKSVVSPVKSRVDVISSAKITMASSLSSPVKQMPGHAEVALVNGSISPLKYASSSTLINGCKATATLQEKISSATNSVSSVVSAATDTVEKVFSTTTAMPFSPLRSYVSAAPSAFQSLRTPSASALYTSLGSSISATTSSVTSSIITVPVYSVVNVLPEPALKKLPDSNSFTKSAAALLSPIKTLTTETHPQPHFSRTSSPVKSSLFLAPSALKLSTPSSLSSSQEILKDVAEMKEDLMRMTAILQTDVPEEKPFQPELPKEGRIDDEEPFKIVEKVKEDLVKVSEILKKDVCVDNKGSPKSPKSDKGHSPEDDWIEFSSEEIREARQQAAASQSPSLPERVQVKAKAASEKDYNLTKVIDYLTNDIGSSSLTNLKYKFEDAKKDGEGGQKRVLKPAIALQEHKLKMPPASMRTSTSEKELCKMADSFFGTDTILESPDDFSQHDQDKSPLSDSGFETRSEKTPSAPQSAETTGPKPLFHEVPIPPVITETRTEVVHVIRSYDPSAGDVPQTQPEEPVSPKPSPTFMELEPKPTTSSIKEKVKAFQMKASSEEDDHNRVLSKGMRVKEETHITTTTRMVYHSPPGGEGASERIEETMSVHDIMKAFQSGRDPSKELAGLFEHKSAVSPDVHKSAAETSAQHAEKDNQMKPKLERIIEVHIEKGNQAEPTEVIIRETKKHPEKEMYVYQKDLSRGDINLKDFLPEKHDAFPCSEEQGQQEEEELTAEESLPSYLESSRVNTPVSQEEDSRPSSAQLISDDSYKTLKLLSQHSIEYHDDELSELRGESYRFAEKMLLSEKLDVSHSDTEESVTDHAGPPSSELQGSDKRSREKIATAPKKEILSKIYKDVSENGVGKVSKDEHFDKVTVLHYSGNVSSPKHAMWMRFTEDRLDRGREKLIYEDRVDRTVKEAEEKLTEVSQFFRDKTEKLNDELQSPEKKARPKNGKEYSSQSPTSSSPEKVLLTELLASNDEWVKARQHGPDGQGFPKAEEKAPSLPSSPEKMVLSQQTEDSKSTVEAKGSISQSKAPDGPQSGFQLKQSKLSSIRLKFEQGTHAKSKDMSQEDRKSDGQSRIPVKKIQESKLPVYQVFAREKQQKAIDLPDESVSVQKDFMVLKTKDEHAQSNEIVVNDSGSDNVKKQRTEMSSKAMPDSFSEQQAKDLACHITSDLATRGPWDKKVFRTWESSGATNNKSQKEKLSHVLVHDVRENHIGHPESKSVDQKNEFMSVTERERKLLTNGSLSEIKEMTVKSPSKKVLYREYVVKEGDHPGGLLDQPSRRSESSAVSHIPVRVADERRMLSSNIPDGFCEQSAFPKHELSQKLSQSSMSKETVETQHFNSIEDEKVTYSEISKVSKHQSYVGLCPPLEETETSPTKSPDSLEFSPGKESPSSDVFDHSPIDGLEKLAPLAQTEGGKEIKTLPVYVSFVQVGKQYEKEIQQGGVKKIISQECKTVQETRGTFYTTRQQKQPPSPQGSPEDDTLEQVSFLDSSGKSPLTPETPSSEEVSYEFTSKTPDSLIAYIPGKPSPIPEVSEESEEEEQAKSTSLKQTTVEETAVEREMPNDVSKDSNQRPKNNRVAYIEFPPPPPLDADQIESDKKHHYLPEKEVDMIEVNLQDEHDKYQLAEPVIRVQPPSPVPPGADVSDSSDDESIYQPVPVKKYTFKLKEVDDEQKEKPKASAEKASNQKELESNGSGKDNEFGLGLDSPQNEIAQNGNNDQSITECSIATTAEFSHDTDATEIDSLDGYDLQDEDDGLTESDSKLPIQAMEIKKDIWNTEGILKPADRSFSQSKLEVIEEEGKVGPDEDKPPSKSSSSEKTPDKTDQKSGAQFFTLEGRHPDRSVFPDTYFSYKVDEEFATPFKTVATKGLDFDPWSNNRGDDEVFDSKSREDETKPFGLAVEDRSPATTPDTTPARTPTDESTPTSEPNPFPFHEGKMFEMTRSGAIDMSKRDFVEERLQFFQIGEHTSEGKSGDQGEGDKSMVTATPQPQSGDTTVETNLERNVETPTVEPNPSIPTSGECQEGTSSSGSLEKSAAATNTSKVDPKLRTPIKMGISASTMTMKKEGPGEITDKIEAVMTSCQGLENETITMISNTANSQMGVRPHEKHDFQKDNFNNNNNLDSSTIQTDNIMSNIVLTEHSAPTCTTEKDNPVKVSSGKKTGVLQGHCVRDKQKVLGEQQKTKELIGIRQKSKLPIKATSPKDTFPPNHMSNTKASKMKQVSQSEKTKALTTSSCVDVKSRIPVKNTPRDNIIAVRKACATQKQGQPEKGKAKQLPSKLPVKVRSTCVTTTTTTATTTTTTTTTTTTSCTVKVRKSQLKEVCKHSIEYFKGISGETLKLVDRLSEEEKKMQSELSDEEESTSRNTSLSETSRGGQPSVTTKSARDKKTEAAPLKSKSEKAGSEKRSSRRTGPQSPCERTDIRMAIVADHLGLSWTELARELNFSVDEINQIRVENPNSLISQSFMLLKKWVTRDGKNATTDALTSVLTKINRIDIVTLLEGPIFDYGNISGTRSFADENNVFHDPVDGWQNETSSGNLESCAQARRVTGGLLDRLDDSPDQCRDSITSYLKGEAGKFEANGSHTEITPEAKTKSYFPESQNDVGKQSTKETLKPKIHGSGHVEEPASPLAAYQKSLEETSKLIIEETKPCVPVSMKKMSRTSPADGKPRLSLHEEEGSSGSEQKQGEGFKVKTKKEIRHVEKKSHS

SEQ ID NO: 1078 - DNA, 9748 bp, Rattus norvegicus
  misc_feature (1)..(9748): n=a, c, g or t
  ref <308>: DATABASE ACCESSION NUMBER: Refseq / NM_012773
  ref <309>: DATABASE ENTRY DATE: 2000-11-01
cttctatttaattttttgagaaatacagcactggaaggaaacccagccataataagaaaagctcaacaaatttaacagatcaaaagctgttggcatttatagtatgattggactatttttgtgccactatgaagctatgcataagagacaaaacagagactcagtttttttccacaaggaaagattggggacagaacatgtgtcttgactctcacccacatacagtgtgccacgaataccctcttaactactggtaatatcttaaaaacaaacaaaccctacctgccataaaaattctatcagggctaagtggtggtggcacaggcctttaatcccagcactagggagtcagaggcagcagatctctgtgagttggtgcctagcctgttctacatctagttccaggatagccagtgctgttccacagaggaaaccaaacaaaccaaaaacctccattagagcagaagtaaaacgacaaaagagaagcctgagagcaagtacaggctcagcaacccacacccaagcactccagggacacggtacctgtcacccgcctccgtgtgctaaggacagtcctttctaacagaaggatggaaatttcttctgagggggggaaacanccaaacagagcttgggacgagactggggggagcactgtcttggtaagagggggcttccaacaacactgaggttcattctcggcagaatcccaccttgggggggggtttgggaggaattcaatcttcctttctcttaaagaaattactagcagtatataaaggtgtggtctagattctgtgcacttactggtggcctgaagggaacggaggcatccaacacggaagaacgggggagggggagggtgggggggtggcattgaaccttagacctggtattgaatatttcaaggaagttatattttgggaaattcctccttcactgaaagagtattcaaaaccaaaataagagaagtaagaactggaaagatggctcagtggttaaaaacatgtataatcacatgtatgaccccacacagacatgcacacattcatattaaaaacagagcaaatctcaactcaactttctcacttcttttctaagtaaacatttagaaaggaagatcagagacagtgttttttaccaagctaatccaccccaggattatctctcccattatcactgtctgggtaccctgtcactgggtccacaggacggctcagcagataaaaggttcttgtctctaagtctgatagcctgagttcacttcccaggacccacaaagaagagaacccattcccatcagttgtcttttaacttccattatgtacacagtacccacccaaaataattaaaggtaaaatgagaaaagaaaaagttttagcggtcctgtacttatatatgctaaagtacattgtaaaaactaccaaaaagacaagatatatattaaaagatttgatcattcaagaaactctaatacaacataacctttaatcagaaaattattgtagcaactctttggttgtttaaattttctaaaacgttaaatcatttagttgtgtgtacatgtgtgagtggagcgtgtgctgcggtgctcacgtggaacccagagacgacctttgggaattgtttctctccactaccaagagacttcaggggaactgcgctctggcagggctggcaatagatgcctttacccacgacaccgccttgcaccccttgttttcattttacgttttagttattatcttttgttttcttccaaacagtgtctctatggagcccagggctggtcccaaacagcgactcaggtgctgagagttggacaagtgaacccctcttgctcatttctcaagaaaatccctaaggaaggactggccttcttaacttttagaaattattatctaggggtgaaaagatggagccgagtctgggtccccaggacccacaggacaacaagacaaggtagaagacgttcataaccccagcactggggagatggacacgcggtccctggggctctggcctgccagtctagcttgagtcagcaagttccaagttcactgacacactctgtcccagaaagtaaggtagagtgactaaggaagctgctcatgcactagtaccacatataacatgtatacacactcatatatgtacacatccacgtgaattatctaaataccatactctctgagaaaaaatacagctgcttcatgttctagacataacctagcctataataccattctttgtgtctaccacttacaactgaagagccatgcaaagtgtccacacgttaatactgtgctacactctaggatacacaaggtgtggtggctggcgcatgcctgtgacagctggaggcaccaggatctgtggaagttagaacagcttacaagaacaggctctttccttctgctgtgtggggtgcacgcgcgcacacgcgcacacacgcgcacacacgcacacacacacacacacacacacagcctgtaaacggaaagcatcctagtcctagccggtcagccacggactgcggggagcctcacgcttactccactgcacatctcctccttacagactcaggcttggaagccaccgttcccaggatggctgccactacgtaacataacgggagaggtcccagaactcattagctcctacagggataccttcctcaacttttaccacatttacctttcctggtcctaatcccgccccggtgcctcgtgccgaattcggacgagggattccatctgatacgcagacctgcaggctgtcctttctcattttggttcttcttttattaaatagatcaaaagcatttgagagggaagagagagtacaagaagagttgagaccattgtcagaggtctcctgtgcaacttgagggcttttcacaagtcccccgccctataggaagacctagggtcagagacaaaagcttcgtccttgctttcacactgggtgatgtttttaattcccccctcccctcctttttttttcttttttgatggcagtagaagggagatcattagacctgagacacttgtattcctgtctacatcattggttttcaatcaacagaaccatttcctggataccaggctggggcagattatgctttgcgtcccagatgtagttaattgtggcatttcctaagagtcattcatttaatagcattgtagatgtataaacatagattgcagtgactaatatgtatcaattctttattctccctgcctcccccgccccttctgtatttaggctccataaaaactcttagcagtcctagttgtatccatttcattgttgtcgtagatgcaagaagactgtcctagtgacagggagagccggagggactccgttctcatcgattcgctcttcatcatggaccagtttaaagctgcagagagaatgagcattggaaaatccaacacccaaggacatcacagaagttactgctgtggctgaagccatcctccctaagggcagtgcccgagtcacaactgcggtgaagtttagtgctccatctttgttgtatggtgctctccgagactatcagaagataggccttgactggttggccaaactataccggaagaatctcaatggcatattagctgatgaagcagggcttgggaaaactgtgcagatcattgctttttttgcccaccttgccctgtaatgaaggtaattggggccctcatcttgttgtcatgaggagttgtaacaatactcaagtgggaactcgagttgaaacgctggtgtcctgccctccaaaactctttcttatgttggcacccacagagaactcaaaccaaagagacaggtagtgccaccccactgccactgccctctctctttctttgttttgcattgctggagatgtatccaggttccacatttcctagacgaggcgtgtgccggggaattatgcctttagtcaagtatcttttttatcttttgtcaagtatcttgtaagcatgttgtacaggtgctggagagatggcccagcagattaaaaagcacttgctacataaacctgacaattttgatccctggaagccatgggaaggtacaaaggagagaaccaactccacaaagttgtcttctgatccctataggcatgctgtggtacatacacatctacatagacatatcttacacgtcccttgataatatttgtgtgaaataaagctaaacaccttaatttttcttaacataaaatcttatgtatcccaggtttcaaacatttgatcttcctgcttcggctacattgagacagttacatgctgcttaatgtgtcccattgacacactgacctatactcagtttctagagtttgatcccccatgaaccagagaggacacaagatggactcctagttctctgggaaaaagctgcttcttatgcttgaggccctgtttcccttctgtgctacagatgtaatagagtcctttcttgacatgtatgggccctgagttcagttcccaatactgtaaggaaaatagttcagaatggagtatttgtctggagaaagaatcaatacttcctacctcaagactgtgctaatggagtgtatgagacctccctgtgtgttgtatttcctctggaataaacaggaatatttgtgacaagataccagtttcctttagtccccagtacttaatagttccagtcccaggtggctatgtaaagatcatttctatcatttgaagttttgcctcactgttagacactatgtcaagccaaatttactaagagatcctttaccatctatcgtaatcttttttccctgctgtaaaaaaataaacaacctcgtgccgaattcggcacgagatgtaaaaaatcttcagtgattaccgatagcgttcagaagtttgcagcagatcttgtgggaaaaagttttggcagtgcatttaaagacttacagaaaggagtttcttcatgtaccaatgcactgtgccacctggctgtcaaattgacatcatccatatttcagatggcatttaatgaactaagaaggcagtgtgcattttcattaaaggagcgagccattggtagcctggccagtcttttggtgagcgaagccttatcaaatgccttgaaagacttacagtatgtgaaaagcagatgtttacaaacacagttgctaggtttgctgcagacctggctgaagagcttgtttttgaaggtatcatggaagtgtgtcattttcatgtcctcagacacctgcatcttcacagtgtcagtcatttgactttgaagacaaagtcgtgaagtcatatgcccaaagagttgtctgaatctgtaatacaagaagcattcatagagctgtcacagacggacgtgaccttcacagcaaagacagcagttaatgtttctatgggtagtgtcaagtccgtgaatgcagaaaatgcagtgccacctgcgcagacccttacattcctcctcatcctttagcagtcaagcagttatgatgaccaaaccaatgcaggagcataagaaggaatacacggcacagcaggctttgtttcgtccctcaggaattgtcacttccataccagtgcccttggcaggtagtgcccttctcccatatcacgtgtcatctactttgtaccagtccaagtctctgtcatcgtctgagcataataaagcaaatggcggttctccccaagagcacattgccatggaaagcagtgcagaggaagtggattgttttaaaaacacctgtctaccttcagaactcagtccttgcagccagaatgacttcaaaccaactaatggtgatatcgacatgcagagtccttcaaaattaatgagtggctctatgattattagcaacttttccacagcaatggtacatacaatagtaaatgaaaccttagagtccatgacatccttcaaagccacaaaacctgttgatacaaatgcagattatttaactaaaacaataaagggaaagcctgttctttccctttgcgaccaagcagcaccacaacagaacaaagctagcagtaaggacatgtttgctgagcatttatcaaagtctattattaaacattccctggataaaagcaagtcagtccttccaaatatagataaaaaaccagttagtaaggaacacatgcttgttcttggagaagaatcacagttgaccttgggggaaactcccaaattccttgacttttcagataattcacctcagtattgtgttccagaatgtaaagattctgtgggttttggtttttctttagaggcactgccaccttgttcaatgatgacaagtcagaaatctgacttgaagggagttatgaaggataaagtggtaacaagacacaatctgactaatactgcgtttgagcccttgtcttttggacaggaaagctctttccgtccctcacagactttatcatctgcagtgcttacctgtgtagatagtttgcatgtggaagataagcagaaaatcagagacagaaatgtgatacctgatactcccccatcaacacctttagtaccatcccagactagttctgaatgggacatcaaaaagttaaccaaacaactcaaaggggagttagccaaagaatttgctcccgcaacaccaccttcgacacctcacaactcatccgttggtagtttatctgagaatgaacaaactactatagaaaaggaagagttcatgctgaaactcatgcgctctctttctgaagaagttgagagcagtgaaggtgaggagcacccagaaatggatgtaaagtcagagcattcagggaaaaaaggtcagtttgcagacgcattagctacacacatcatttctcttgcaactgaagtggcagcctcccacttagatcatgaaatcactcaagaattcaaggttcaaaactctcacttaactgtgccaagtcaaagaagcatgctgcctgctctaagtcactcagatgaaagcatacagacgtgcagttttgcaagtgatatggcagctggtgttattgcagaagccgagaaagttgcaaacactagaagttgtatgcttttcgggcatgagaggaccatttgtcatgttgaaggtgatcgaggtaaagcagaagagaagctggatgtggaggatattgcacatccaagagaagtagaaacgtgtgttctttcattaccaagttgcatgccaggtctgacatacaagtatcccagctgtgaaagtgtgactgatgaatatgctgggcacattattcaagtgctgaaacaggaaggtggcaacagtgagctaatcatggatcagtatgccagtagattggcctaccgttctgtcaagtcaggagtacgagaagcagctaagacagtaaaagtgaagtgcagtttgaaactcttccctatgcacacctctcatgtgaaaacaaacaaggaactgttgttctcaagtaaagagcatcaccaagaagtagataaaaaaagacaaagaaaaaaatatggcagccatccttgcaaataccagacatgtgacaggacacaggatccatgtagaaacgaactttctgaactgtacaggttttcagcctctcttgctagcagcataacaagagatgtaaagaaacagctgacagcacctaaagttgacttgccaaaatcctcaacagactgttgtctttttgaaaaatctgaatgtgttgacaacagagagaatgttactggaccagaattttcaaagtcgtgtcaacctttacaaaaccatggactttgccagaacacaagcagtttaagtgggtatagctgtggagagagtgctcacactgtagaacagtatgctaggaaagtagtgggtgacactttagagctaagcttaggacctgcagttttccttaattcagagaccacaacatcaccagataggattacttatgcagaaaaattgtcaccacttataaatgaagcttgcagatactgtgaccttaaggaatcccatggttgtatcagaaattctgctcagctcttttcaaagcagggtccttgtgctagtgctaagccaagttcacattcaaaacttagtagcatccgccagaaatcaagaatttttcatcttgatgttcctcaaattcatcttaatcttgataagagggcggtgcttgcagagaagatagtcgctgaagctattgaaaaagcagagagagagttgagcaatacgagtttggcagctgatagtggaattggacaagatggcattagctttgctgagagccttaccacagaaatcatgaccacagctatgacaaatgccgggcatgctgttagcagttcaaaagaagtagaagattttcagtccactgagtcacttggcagccaacagatgaatcttagtgttggtgaggacagcacgggtagctggtccaacttaagttttgaggatgaccatcaagatgaaagcagcagtttccatcatctcagtgaaagcagtaatggtaacagcagtagctggagcagtcttggtttagaaggagatttgtatgagaacaatttatcctttccaacatcagacagtgatggaccggatgatagagagagcgaacaggaggatggtgctgagggtttgcagccgagtggaaagactctgctgatcgtgaacattgacgtggagcctggggcggtggaccctcagctcagggtcattcttcagtggctcattcctcggaggcggaagttagagaactttattttcagtactctgcaaagaaggagtttgtcttactttcaaagcagttacaggagagaggatggaaagtgggcgatgtcctgcaggctgtgatgaaatactacgaagtggtggccaaggcctcaagcgaggacacgtgcacgtcgctgtttgattggcttttagaaaatgcctagcacaccgcagggcagtgtactttagtgcttgttttaggaagtaaagaagttgatgatttacatgtaggataaaattcaaatacagaatattaacattttaattgaattgagaggaaagtaagcgtttaagtgctttctgtcattacactgtatatagttcatacttttttgtaatcttgtcaagatatctctttacttattcttctgtatatgtgtatgtgttatgacatgagatatattctgtgaagacctatcctcacccgatgggcattcattgtctgacagcatttgtttggattcacatagtgctgctgctgctgctgctgctgctgctgctgctgctgctgctgctgctgctgctgctgctgctgccaaacagggctgaggcggctggcctggcccacgtgatcacttggttcctttgaaaacaagtggtgtctaatgataagtcatctgacatggaagaaagaaaactgaggctgatattttgttgtttatttatttctgataagtttgtattctttatgtactgttctttaaaatcagttttacttcccagttcagctattggtacttgtagattccccaatctttaagctcgtacatactgcattagtgacttaggtttctgtgaacaccgttatgtgttcccctggctttccatcaagtgatgttatttgctaatactgccaattgttatgagatgagaaggagaagggcgtgtgtgcgtgtgcaagaataaacgctaaccttcccactagttcattcgtttactttagagttttcttaaatagaaacccattattaacactaaataaatgtctaaatattgtgcagtaagaaaaagggggaaaaaaaaaaaaaa

SEQ ID NO: 1079 - protein, 1129 aa, Rattus norvegicus
  ref <308>: DATABASE ACCESSION NUMBER: Refseq / NP_036905
  ref <309>: DATABASE ENTRY DATE: 2000-11-01
MQKMQCHLRRPLHSSSSFSSQAVMMTKPMQEHKKEYTAQQALFRPSGIVTSIPVPLAGSALLPYHVSSTLYQSKSLSSSEHNKANGGSPQEHIAMESSAEEVDCFKNTCLPSELSPCSQNDFKPTNGDIDMQSPSKLMSGSMIISNFSTAMVHTIVNETLESMTSFKATKPVDTNADYLTKTIKGKPVLSLCDQAAPQQNKASSKDMFAEHLSKSIIKHSLDKSKSVLPNIDKKPVSKEHMLVLGEESQLTLGETPKFLDFSDNSPQYCVPECKDSVGFGFSLEALPPCSMMTSQKSDLKGVMKDKVVTRHNLTNTAFEPLSFGQESSFRPSQTLSSAVLTCVDSLHVEDKQKIRDRNVIPDTPPSTPLVPSQTSSEWDIKKLTKQLKGELAKEFAPATPPSTPHNSSVGSLSENEQTTIEKEEFMLKLMRSLSEEVESSEGEEHPEMDVKSEHSGKKGQFADALATHIISLATEVAASHLDHEITQEFKVQNSHLTVPSQRSMLPALSHSDESIQTCSFASDMAAGVIAEAEKVANTRSCMLFGHERTICHVEGDRGKAEEKLDVEDIAHPREVETCVLSLPSCMPGLTYKYPSCESVTDEYAGHIIQVLKQEGGNSELIMDQYASRLAYRSVKSGVREAAKTVKVKCSLKLFPMHTSHVKTNKELLFSSKEHHQEVDKKRQRKKYGSHPCKYQTCDRTQDPCRNELSELYRFSASLASSITRDVKKQLTAPKVDLPKSSTDCCLFEKSECVDNRENVTGPEFSKSCQPLQNHGLCQNTSSLSGYSCGESAHTVEQYARKVVGDTLELSLGPAVFLNSETTTSPDRITYAEKLSPLINEACRYCDLKESHGCIRNSAQLFSKQGPCASAKPSSHSKLSSIRQKSRIFHLDVPQIHLNLDKRAVLAEKIVAEAIEKAERELSNTSLAADSGIGQDGISFAESLTTEIMTTAMTNAGHAVSSSKEVEDFQSTESLGSQQMNLSVGEDSTGSWSNLSFEDDHQDESSSFHHLSESSNGNSSSWSSLGLEGDLYENNLSFPTSDSDGPDDRESEQEDGAEGLQPSGKTLLIVNIDVEPGAVDPQLRVILQWLIPRRRKLENFIFSTLQRRSLSYFQSSYRREDGKWAMSCRL

SEQ ID NO: 1080 - DNA, 757 bp, Rattus norvegicus
  ref <308>: DATABASE ACCESSION NUMBER: Refseq / NM_017199
  ref <309>: DATABASE ENTRY DATE: 2003-01-14
ggaaacggacacgtcagtgccgccagcgacgtcaccatgcccgacccagcccgccgacgcacgattgggtgctgaggccgcttacgcgtcgcgcttcctcgtctgctccgcatgttcagggcggcttgctctcttttcccctcggcagagaagaggcgatggcggcgatggcatctttcggcgccctggcgctactcctgctgtccggcctatcttgctgctcagcagaggcctgcctggaaccccagatcaccccttcttactatacaacttcagatgccgtcatttctacagagactgtattcatcgtggagatctcactgacctgcaaaaacagggtccagaatatggctctttatgccgacgttagtggaaaacaatttcctgtaacccgcggccaggatgtgggtcgatatcaggtgtcctggagcctggagcacaagagcgcccatgcaggcacctatgaggtcagattcttcgatgaagagtcctacagcctcctaaggaaggctcaaagaaataatgaagacgtttccatcatcccaccactgttcacagtcagtgtggaccatcggggtacctggaatgggccttgggtctccacggaggtgctggctgcagcaattggcatagtgatctactacctagctttcagtgcaaagagccacatccaggcctgagggcagcaacctcagccctccattgcttctttcaataaacagtcactatttgaaaaaaaaaaaaaaaaaaaaaaaaa

SEQ ID NO: 1081 - protein, 173 aa, Rattus norvegicus
  ref <308>: DATABASE ACCESSION NUMBER: Refseq / NP_058895
  ref <309>: DATABASE ENTRY DATE: 2003-01-14
MAAMASFGALALLLLSGLSCCSAEACLEPQITPSYYTTSDAVISTETVFIVEISLTCKNRVQNMALYADVSGKQFPVTRGQDVGRYQVSWSLEHKSAHAGTYEVRFFDEESYSLLRKAQRNNEDVSIIPPLFTVSVDHRGTWNGPWVSTEVLAAAIGIVIYYLAFSAKSHIQA

SEQ ID NO: 1082 - DNA, 551 bp, Rattus norvegicus
  ref <308>: DATABASE ACCESSION NUMBER: EMBL / S75991
  ref <309>: DATABASE ENTRY DATE: 2000-03-03
tgctgctgcctttgtcaataggacaatactttgtgcctccttcactggtgcagctgcttcttctctctcgcatcatccatgtcctgcgtcctgggaaaggaccaaaggtgttccatgatctgatgcttcccttgatgctgtcactcccagcactgctcaacataggtcttctcatcttcctggtcatgttcatctacgccatctttggaatgtacaacttcgcctacgtgaagaaagaagccggaattaatgatgtgtccaagtttgagacctttggaagcagtatgctttgtctctttcaagttacaacattttctggttgggacgggatgctggatgcaattttcaacagtcagtggtctgactgcgatcctgataaaattaacccagggactcaggtcaggggagactgtgggagcccttctgttgggattttttattttgtcagttacatcctcatatcatggttgatcattgttaatatgtacgttgttttgatcatggagttcttaagtattccttctaagagaaaaaacaggaccttgagcgaa

SEQ ID NO: 1083 - DNA, 418 bp, Rattus norvegicus
  misc_feature (1)..(418): n=a, c, g or t
  ref <308>: DATABASE ACCESSION NUMBER: Refseq / NM_019360
  ref <309>: DATABASE ENTRY DATE: 2003-01-14
gccatggnccttcaccttagggttacccatgatagcagaggcagaggacattggctaccatcagttccggtgctctgttgccgaaaccacagatgcgtggtcttctggccaagcgtctgcgggttcatattgttggcgcattcgctgtggccctaggagttgctgctgcctataagtttggcgtggctgaaccaagaaagaaggcttatgcagatttctacaggaattatgactccatgaaagattttgaagagatgaggcaggctggtgtctttcagagtgcgaagtgatttcagaatgcaaagaattctttggattgtgctccatagaagttcactgctgacctgtgttcctgaactatgaaacgtgaatatgtgggctaaggagtagtttctctcaataaacattaattatatgg

SEQ ID NO: 1084 - protein, 65 aa, Rattus norvegicus
  ref <308>: DATABASE ACCESSION NUMBER: Refseq / NP_062233
  ref <309>: DATABASE ENTRY DATE: 2003-01-14
MRGLLAKRLRVHIVGAFAVALGVAAAYKFGVAEPRKKAYADFYRNYDSMKDFEEMRQAGVFQSAK

SEQ ID NO: 1085 - DNA, 444 bp, Homo sapiens
  ref <308>: DATABASE ACCESSION NUMBER: Refseq / NM_004374
  ref <309>: DATABASE ENTRY DATE: 2001-12-30
ctttagtcaggaaggacgttggtgttgaggttagcatacgtatcaaggacagtaactaccatggctcccgaagttttgccaaaacctcggatgcgtggccttctggccaggcgtctgcgaaatcatatggctgtagcattcgtgctatccctgggggttgcagctttgtataagtttcgtgtggctgatcaaagaaagaaggcatacgcagatttctacagaaactacgatgtcatgaaagattttgaggagatgaggaaggctggtatctttcagagtgtaaagtaatcttggaatataaagaatttcttcaggttgaattacctagaagtttgtcactgacttgtgttcctgaactatgacacatgaatatgtgggctaagaaatagttcctcttgataaataaacaattaacaaatactttgaaaaaaaaaaaaaaaaaaa

SEQ ID NO: 1086 - protein, 75 aa, Homo sapiens
  ref <308>: DATABASE ACCESSION NUMBER: Refseq / NP_004365
  ref <309>: DATABASE ENTRY DATE: 2001-12-30
MAPEVLPKPRMRGLLARRLRNHMAVAFVLSLGVAALYKFRVADQRKKAYADFYRNYDVMKDFEEMRKAGIFQSVK

SEQ ID NO: 1087 - DNA, 533 bp, Rattus norvegicus
  ref <308>: DATABASE ACCESSION NUMBER: EMBL / AA891933
  ref <309>: DATABASE ENTRY DATE: 2000-03-03
ccactctgtggggaaagcaggtgcatgacatccacccagtgacgtcccaactgcagaagctgaccggttctgccattgacagtcagaccagagcctttgcgagctgcgcctggccccttctctctgctcgcagcctctctgggcctggctctgcactgtccctcacacagcttctctcttgatcttttacctcactcccaaagcacttcaccaaccggggccaatggaggaggggccttttctgccacacccttaagttcaatagctgtttaactccagtttttactgttactcagatgttcaagtatgaattactgcttgctcctccacagggaagcttgtctggtttgtaacatttctttgtgtttataatgtcctttctccctgtgagcacagctcagctaaggcgttactcagtgtgaacagttcccctggtgctccccacagcaccttctccaacacgtgcttcttgttcgttccttttttgaatttctctgctgtatccaaaggaagagaagtttggtgtttgcatt

SEQ ID NO: 1088 - DNA, 7513 bp, Rattus norvegicus
  ref <308>: DATABASE ACCESSION NUMBER: Refseq / NM_022548
  ref <309>: DATABASE ENTRY DATE: 2003-02-21
gcttcctgcagctgtttccttgtggctccgctcccactgacttttgacaatcaatctccagcaacggagcggccgatcggcggcggtgagctcagaaagtggtcgtggagcgggcggcggcgcgcggagtggcggggcggctgcggcctgccggttccggtttgaagactccgtccatcccctgtcacccactggattatgctcgtggctttcctgcctgatgattcttttgcagcaggtctggcttcctttacctaaccggccttcaacctctcctcctatgtcagtggctgccaggtccactgggaccttgcagctcccgccacagaaggcttttgggcaggaagcatccttgcctctggcaggggaagaggatttagctaagagaggggagccagattctgccctggaggagctgtgtaagcccctcttctgcaaactctgcaatgtcaccttgaactccgctcagcaagcccaggcccactatcagggtaaaaaccatggcaagaaactccgaaattattatgcagctaacagctgccctcctccagccaggatgagcagcgtggcggagcctgtagccacacccctcgtccctgtccctccccaggtgggctcctgcaagccagggggcagggtgatcctggccacagagaatgactactgtaagctgtgcgatgcctccttcagctcccccgcggtggcacaggcgcactaccaggggaagaaccacgccaagagacttcgtctggccgaagctcagagccactcattctcggactctgcagaggcggggcaacggcggacccggaaagaagggagtgaatttaagatggtgaccaccaggaggaatatgtatacagtccagagcaattcaggtccttacttcaacgcccgttctcggcagaggatcccgcgagatctcgccatgtgcgttactccaagtggccagttttactgctcgatgtgtaacgtcggagctggcgaagaggtggagttccggcagcatctagagagcaagcagcacaaaagcaaggtgtccgagcagcggtacaggagcgagatggagaacctgggctacgttcagtgatggccgccctcacagagaagcctgtcctgcctgtttgccttctgtcgacctgccttgctttgtggtcctccatgcctacattcctcattcttctgcttagtgcgagtaacctgcagtggtgccatgagccgccaggtcggggtgggcgagggaagtgtttctcataagtcacgacgatgctcttttgggccagctgtgttaaacaactcacagttaaacaactcacagtggtgtgtgagcttcctgccccctcaggtgtaacttcttatcttggccaagttctggttaagcagtagtagcctgactatttagagccatgaatatttaaggatggcacccacttttgcagttttagttttacgcacattagacgaattgacttgagttcttctgattatagaggagacaggtaaacggagattcctgtttccggatgctcctgggaaccattactacagtgtggtgttggtaagatgtgctgtcatggtgtgtgcatgggtctctcagcagcccctggttctctgtggcataactctccctccataattgacacataggttttcttgaattcatacacgtccagaatactatgttcttgtggacatgtaatgtcatctccagctgtgaactgcacacatgtaatcctatctcctcctgtacttagatcagcttctccgctcaccccattctcttggcccagatgtgccggcagtttcggagacccagatttgactaatgagttgaagatggatattcttttagaaaatatattttcagatgattcaaggaaatgcaaggatgtgtttgagatttcaatttggaattctattttcactgatgattgtgtgaactcctgggacagtcattctatggctttttgacgattgcatcctgacactgccctgacatgggcgtgcctggaagatacccgtctgctgtttcttaagtggaaaatttcctctctctctcttcttttcttttctttccttttcttttctctctttccttctttctttctttctttctttctttctttctttctttctttctttctttctttctaagctgatcaagtttcggtgtcatttccaatagaaaaacatacaaacattgcattttcttctttgcctccttgaagagactgaaaaacacagatgactttggtgtctaatgattataatgggattcttattttttaaataaaaagccatagtgtatgtctagacggactgatggagtgttatgtgaacttgtgttcaccgcgtgtcctttgtcctccccttttccttcctgtgtgtgaggccagcacgcccgtgctcttagggaggtgtgcttctgcagaaggcttagagcaagcagtattttgcactatttaacaaatacatatttcactcttcgtgccacctgagagttctctgggcagaaggagagggaggaaacgctcagctccctcctttccttttcttgctttagaatagttgaggacccacaatgaaaggttaattttatgattagcttctggaacagtaccaggttactttctcctggtgaaattgctggtttctggaaaagtagaactgttcggttaagcacttgccccttacaaacagaagaaagtacagcattagtgtaagatttgatctccatttgtagttcctcataccaaggacccctcctgtggccgtctacagagctggtcagtttagggcaatttagggtgtgtcttgttagccgttcggttgctcattttgctgctcaatataattcttcggtagacttaaatatattgttggccacttgttctgtgatggtttaacagtctcatctgttttctcacagggtgtgtgtctaagtgttcctgtgtttgtgtccccagttttatatgatatcccagagacagtttcacctcatctttatctcagataaccttgaaagattctgggtatggatttacattttataaaagttgacactcatctgctttgagttttttcctctgggaatcaagtcaaaggatatccccttcccccatccccaaatgctctcctcctgtatatacagaaaacagtggacttaaggacttgatgtgttttcaagcctcatgaattcaggtttctagtctcccagtgcccttaatggatgttagggacgcataagtgtggtttcttttagagtaaatgttagatttctggtgttatttctatactcctttgaactagagagggtgatgtgtttgttttatgacactctggtaccaggttgcctatgataactccgtttgtttccgacctctggaagtttataagtaacggctatggtcattgttgtggatgtctcaaacacttagaagttccctgactgaggctgtgttgtccttacttgtattcagtgggtagggcagaggctgtcagaactgcaatggtgcagtttctcactctgtgaactctgtatggacagcgtcccttccttgtctggtcaagcttcggtggcatctgagtcagttaggcgagctctctgttagcttagttttgcagtaggaatcccccccaccccccgctcccgttccccaggaatcctatacattttggatgtcacagtcatggatggacagaagtgtaagggggaccttggtccaaaattaagtaattgcagtttcatcgattatctgtagcatcgaggtctgttcctgtgtggctctctgcttcattctgaggccaatcagaacacccagatctaaggcttcaggaagagtccggtttcagtcagatggtctggatcccatatgccttcagagggcattagctttggaagttcagatatagccctgtgtcctttgaccttgtagacatcacattgagcaggcattttgctggtctgggttgatctagtcctgctgcttgtaaatgcatgcctgttgttttacgcctgtctgcttgcctcttacaaactgaatcctgcattctcccacactgtttgtcttgacaaaagttcctcctcaacactttcccttttggtttgccactggcttcaagagttaggaggtttgaagccctggaaatggatgaagggccatggctgagagcttgtgatacgctgaggtgactttcccgcctcacccctacagagctgccctgtggagctttgtgtagcccttggtctacagccctacaatcccagcagggagaaaacattatacatacatatgtatacctgattaagtgtcctgtgtagctagggacttggaactatcccagcctgcgattccggggagaatgagcagtgccagtcagtccaagggcaggtgagtgacttcctcgtagtgctttctttgcggagaggccccaaagaatgttctgtaaatgtcaagaacttgggctggaagtatttacaagaaaaactggtgggctgtgtacccaagcgctggagcgtctttagaaatggggaaacattttgttggtgtatgcagaagtttatgtagatatttgggacaggtgtttaaaaaaaaattctaccttgccccctccccttaactctctgttaggcgttttatatgtgaattaaaaaaaaaaaaagctttgttgcttttgtgttgtgtttgggcgagtgtcccgtgagctgccatgtcagcgtagctgagtggacactagctgtgtaaataacctctcatgcgacatttgtgtggatagctgtgtggcatttccttccattatcaatagggactctgtgaacgccctttctctgtagctaccaaaaaaagccctggcttatggtcccgtgtgaccttgtgtccgtaaacccagaatatgagtgcctttagcaagcgttagcatttcacagagggtagagacgacagaatttactaccattaaccactgttcataaaatagctggaaatagcggcggtccgtgtgaatgctgttctatgtcgtgtgtcccccctgtttcttagtgcagtctcggtttgcttttgggtacagtgtgcactctggacaggagcctggctgctgaggctggcagtggtcacctcggcggccatcttcgatgctacagaggactcagagcttgagatgctgatgctggaaaaacttcctacactgaccgtgttccagctggttcttctgtagagtggagacaattatgtatctacaaacagtgtattgcgagactgtctgggacagtagctccagatcacgctggacttcatctctgcgtggatggagggagctttccaagcaagatcgaggtctttggaaacgacaacttccttcctttgactaactgaaaacgctaaaattcctgaggtctttatgatcttttggaacatacaattaaaccaattttcatgtagaaatagtaacatttggctcagaattttattacgaaagaattttgggacatttgtcaaagtggaaaacatttgggagtacactacctaactcttctatctcctactattgacatttccccactcgtgttcccttcctatctcccatgagccaattgctgtgttctctgtctgcccctcaggacggatggctcaatacatttcaagacagcgtccataccatgggcagcatacactaggattaatatttaaatgttaatgtcttaggaagaccgcatgtgtaggtcttaacctaagccagtaaacagtctctgttctttcctgtggatatcagtcttccttgtctctgttcttgagtgtgcttagagtttccaacaagtctgcaccaggttccctggcccacaaaccttatgttccggacaggacttgctgtgaactcctaggcgctataaccattcgcctcctatgcctgtacatagcaggattaaacttggagacaacagttctgtccactgaggggtgggcaagccttagagcagtctccagctttcccccagtcatgtcagggaaaactgccgtctgcctccatcctgtgcccaccctatgtggccagctctgcagaactgaaggggtttgctcaggttggatggatcggatgggtaggaccaaatcacaggccaaccctgagtgctcttaggttgtaaccttaggcttccagtgtaactgaacacttcctttgtgcccttagaaggactgtatttattttctaccaattacaattttagttttagacatttcacagttctcttcccgtggtcatttgttgttttgcgatgctccatgtagctcaggtgagtcaattctaccacgcagccaagggtgaccttgaactcccccgatcctcctgcctccacctcctggtgctgggattacaggcatgtaccaccatgccaagctatgaataaattgtagttttaattacgtccaaagcaattgctaaaatctcactgcactgttgaacaccgactcatgcagggtctgcctgattgtttttgcctttaaatggcttttacgatccctcgatcaacgtaagtgctcacgtgattccctcactattgcaaatggtgttcccatcactgactcgcccatgcactctctacctgatgctttttttttgtttaagaaatgactccatatgtcagggagagcgatattgattgtcttagggcaaagccctattgggaacaaaccctcctggaagtggctggtcggtcgttgttctgccttcttctggttatctgatcacccaccaaaggttctgtaagccagtgtgtcattttgtaagtctcatgttgactctgttcacctgtcttcccggccccaccgccccctccccccgcatgggttttgtgtgttgtctttgaaatgccttattgggtatgccaggctctgctgtcgagcatcccagctgtctgctgagacatacatatcctccctgggatgtgctcttgatctggaagcaacactgacctagctttcagtatcaagggtgcattttaacacagctattgtcttaagttagaaatgaagcaggaagccgagagagtgtggaacccttcatgtgatcagtgtgtgaccctgtaaaatgtgcttttgcttgtttccactggaagggacgcaacctaagaaacgccagtcccaaacccgaaaagtggggctgtgtcatatatccacgccctccacttgtcacttggccattgagaatctgagcaggccatcgggcagtgggccagtctctatgttctggggctacagagctgactgacgtcaccggattcaaaccaatcaactgtgaattgtgaaactgaagttgttctttcggtttttatctccctcagcctattaagtgtagaagtccgaatgtcatttaagcttagaccacttatgttggctcatcttggctgtgtactctcatgtatgtactgatttctgataaaggcttgatgatactgtaacggactttctgtgttcagttcaataaaacagtttctgagtctcgtctccaaaaaaaaaaaaaa

SEQ ID NO: 1089 - protein, 289 aa, Rattus norvegicus
  ref <308>: DATABASE ACCESSION NUMBER: Refseq / NP_071993
  ref <309>: DATABASE ENTRY DATE: 2003-02-21
MILLQQVWLPLPNRPSTSPPMSVAARSTGTLQLPPQKAFGQEASLPLAGEEDLAKRGEPDSALEELCKPLFCKLCNVTLNSAQQAQAHYQGKNHGKKLRNYYAANSCPPPARMSSVAEPVATPLVPVPPQVGSCKPGGRVILATENDYCKLCDASFSSPAVAQAHYQGKNHAKRLRLAEAQSHSFSDSAEAGQRRTRKEGSEFKMVTTRRNMYTVQSNSGPYFNARSRQRIPRDLAMCVTPSGQFYCSMCNVGAGEEVEFRQHLESKQHKSKVSEQRYRSEMENLGYVQ

SEQ ID NO: 1090 - DNA, 2253 bp, Homo sapiens
  ref <308>: DATABASE ACCESSION NUMBER: EMBL / AK056245
  ref <309>: DATABASE ENTRY DATE: 2002-08-06
gttttataagaagggttccccttgctctctccacttaacaatttcattatatacgtagaaaaagcagccgacttaagggcttgatgttttttcaggccttgtggattcaggtttccagtttcccagtgcccttaatggatgttatgaatgcataagcacattttcttttaaagaaagaagttagatttatagtgttatttcttacttgctatatttctttgcactaaaaaagagctatgtgtttgttttataggacactttagtaccgtattgcctacaataactcagtttgctccttaaattccaaactctgggaagttgataaataacttccatgatcacttgtaaaagttacatgcacatctgaaaaaaaatcacaaatctctatgacagtaggttatgttttgagcttgttaccttgcagtattcttctctgttccataggtgaaaacaaagggtgacagaggttatcaggcaggaaatgcctaaatacatacatctctgcatggtacaatttctcatattcatgtattccataaacagtgttttttctctgtttaagcagactgttgtttcttctgagtcagtgatatgtgatcttcgttggtttcattttgtgaagctcagtctgtctctgtaacatactttaggatttgcaccttgtgctccccaggaattatgttagtgtccttttctatgctgtcttcaaggatggacagaggcctaaaccacaacaacaacaaaaattagaaaaaaaaatacttagatttcggtaatcatccataggaactcatagcatcagtctcttttctctgtgaataatatctttgtgtaagttgtcataaaaaatcaacgttagaagatgacaattagaattcttcttaggtattgagggtaagaagttgtaaagaaagaaaattcgtgtttcaactaaaagattggattgcatatacctttgaagtggttttgtaaaaaaaagttcagttactaaactgagtgtgccctgtaatccttttgagtgcactgaagatgctttgaaaatactttgttggtcttcacattgtgcatcatgtcctgcaacttgtaaatatgtgcatgttgtttatgtttgtctgcctgtctcttattgcactaaattctgcaaggtgaataatttttttataccatttatttggaaaaagttcctcctccaactcttcttcactgaccttttaattagttggtaaacttagaaaaccaggtaggatttttgaagccctgagtttaaaagaagaatcgtggctatttgacatcatccttacattcccctgacttaaaaagctaacaagaagcacgagatcttccacctcattttagaaagcttttctacagaactatatgcttgcttatagctacctatctacagtttgaacagggagaaagggagatatgtatgtctggttacatcttccttcactcttgaattggctgggacagcaagcaacaacagtttgaggtccagtgacctacgtaaaatgagtgtcgtttgtgtcaggggacacatgtaactgtgcaacatggtattttctacagggagggctaggaagggtggttttggaacctaacctactttgtgtcttcattgtcagaactaaggttggaaatgccctttaaaggacttggtgaggcatatgctaggacaatagagctgctttagaaagaaattgagacatgttttgtcaggacagataaaagtttaatgcaggcttttgaacagatgttttaaaacaaatttgaccttaccaactatttttttcttctagccaaatcattgtacaggagtttcatatatgataaaaagtgttttgttattgtttttgctttcttggcaggggagaacccctaccattgtgagcagttactgtcactctggctgaatggacaaatagctgtgtaaatagcttctcataaaacgcttctactgatagctgtttgactttttcttcccgttatgaatgggaggaacatttgtaaacttcctttctgggtagctaccaaaaaacgtactggcttatggtcccatgtgaccttgtctccgttaagcccagaatctgagtgcctttagcaagtgttagcatttcacagagagaagagagacagaattattgctattaatcaccattcataaataggagcttggaataacaaaggtctgtgtgaattctgttctacgtcttttttttcccttttttaaataaatgtcaatttgatatc

SEQ ID NO: 1091 - DNA, 2723 bp, Rattus norvegicus; identical to SEQ ID NO: 776
  ref <308>: DATABASE ACCESSION NUMBER: Refseq / NM_022516
  ref <309>: DATABASE ENTRY DATE: 2003-01-13

SEQ ID NO: 1092 - protein, 530 aa, Rattus norvegicus; identical to SEQ ID NO: 777
  ref <308>: DATABASE ACCESSION NUMBER: Refseq / NP_071961
  ref <309>: DATABASE ENTRY DATE: 2003-01-13

SEQ ID NO: 1093 - DNA, 1492 bp, Rattus norvegicus
  ref <308>: DATABASE ACCESSION NUMBER: Refseq / NM_013161
  ref <309>: DATABASE ENTRY DATE: 2003-01-14
ggtccatagaacccgacggatccgccacgatgctgatgctgtggacatttgcagtgctgctgggagcagtagctggaaaagaagtttgctttgacaaactcggctgcttcagtgatgatgccccgtggtcaggaaccatagacagacccctgaaagcactgccctggagcccagcacagatcaacacccgctttctcctctacaccaacgagaaccaagacaactaccagaaaattacttcagatgcatcgagtatcagaaactccaatttcaaaacgaacagaaaaacccgcatcattatccacggcttcattgacaagggagaggagaactggctatctgacatgtgcaagaacatgttcaaagtggagagtgtgaactgcatctgtgtggactggaaaggtggctcccgggctacatacacccaggctacccagaacgtccgggtcgtgggtgcagaagtggcattattggttaacgttctgaagtctgacctcggtcatccacctgacaacgtccacctgattggccacagcctgggttcccacgttgctggggaggcaggaaagaggacattcggagctattgggaggatcacagggttggacgcggctgaaccttacttccagggcacacctgaagaagtccgtctggaccccaccgatgcccagtttgtggatgcaattcacacagatgctgcacccatcatccccaacttaggatttggaatgagccagactgtgggtcacctagatttctttcctaatggagggatggaaatgcctggatgtcagaagaatatcctttcccaaatcgttgacatcgacgggatctgggaaggaactcgcgactttgctgcctgtaaccacttgagaagctacaaatattacaccgacagtatcgtcaacccgactggcttctctggcttctcctgtagctcttacaatgttttttctgcaaataagtgcttcccatgtgggagtgaaggatgcccacagatgggtcactatgctgacaaataccctgggaagacaaaagaactctaccagaaattttacctgaacactggtgacaagagcaacttcgcacgttggcggtaccaggtgactgtcaccctctctggacagaaggtcactgggcacattctagtttctttgtttggaaatggaggaaactctaaacagtatgaagttttcaagggctctctgcatccaggtgacactcatgtcaaggaatttgactctgatatggatgttggagatttgcagaaagttaaatttatttggtacaacaatgtgatcaacccaactctacccaaagtgggagcatcaaggatttcagtggaacgaaatgacggcagagtgttcaacttctgtagtcaagatacagtgagggaggatgtcctgcttacactgtctgcatgttagaaggctgctgatgtgtgaccaccaagtcccactgtaataaagtctagtatcaaagccacccggaa

SEQ ID NO: 1094 - protein, 465 aa, Rattus norvegicus
  ref <308>: DATABASE ACCESSION NUMBER: Refseq / NP_037293
  ref <309>: DATABASE ENTRY DATE: 2003-01-14
MLMLWTFAVLLGAVAGKEVCFDKLGCFSDDAPWSGTIDRPLKALPWSPAQINTRFLLYTNENQDNYQKITSDASSIRNSNFKTNRKTRIIIHGFIDKGEENWLSDMCKNMFKVESVNCICVDWKGGSRATYTQATQNVRVVGAEVALLVNVLKSDLGHPPDNVHLIGHSLGSHVAGEAGKRTFGAIGRITGLDAAEPYFQGTPEEVRLDPTDAQFVDAIHTDAAPIIPNLGFGMSQTVGHLDFFPNGGMEMPGCQKNILSQIVDIDGIWEGTRDFAACNHLRSYKYYTDSIVNPTGFSGFSCSSYNVFSANKCFPCGSEGCPQMGHYADKYPGKTKELYQKFYLNTGDKSNFARWRYQVTVTLSGQKVTGHILVSLFGNGGNSKQYEVFKGSLHPGDTHVKEFDSDMDVGDLQKVKFIWYNNVINPTLPKVGASRISVERNDGRVFNFCSQDTVREDVLLTLSAC

SEQ ID NO: 1095 - DNA, 2489 bp, Rattus norvegicus
  ref <308>: DATABASE ACCESSION NUMBER: EMBL / U52103
  ref <309>: DATABASE ENTRY DATE: 2001-08-02
aattccccggataacgagtgaccgccttctcatcaaaggtgggaagattgtgaatgatgaccagtcctttcatgcggatctctacgtggaggacggtctgattaaacaaattggagaaaatcttatcgtccctgggggaatcaaaaccatcgatgctcatggtctgatggtactgcctgggggagttgacgtccacacccggctgcagatgcctgtgctgggcatgaccccagccgatgatttctgtcagggcaccaaggctgccctagcaggcgggaccacgatgatattggaccatgtgtttcctgatgctggcgtgagcctgctggcggcctatgagcagtggcgggagcgagcagacagtgcagcctgctgtgactactccttacacgtggacattccccgctggcatgagagcaccaaagaggagctggaggccctagtcagggacaaaggtgtgaactccttcctggtcttcatggcttacaaggacaggtgccagtgtactgatggccagatatatgaaatcttcagcctcatccgggacctgggagctgtggcccaggtgcatgcagaaaacggggacatcgtggaggaggaacagaagcgcctgctggagcagggcatcactggtcctgagggccatgtgctcagccacccagaagaggtagaggccgaagctgtgtacagagctgtgaccattgccaagcaggccaactgcccactgtatatcaccaaggtgatgagcaagggtgcggctgatatggttgcccaagccaagcgcaggggggtggtcgtctttggggaacctatcactgccagcctgggcactgatggctcacactactggagcaagaactgggccaaggctgcagccttcgtcacatcaccccctatcaacccggaccctactactgcagaccacctcacctctctgctgtccagtggggacctccaggtgacaggcagtgcacactgcaccttcactactgcccagaaggctgttggcaaagataacttcacgctgatccccgagggcatcaacggtatagaagaacgcatgtctgtggtctgggagaaatgtgtggcttcagggaaaatggacgagaatgagttcgttgccgtgaccagcacaaatgctgccaaaatcttcaatttctaccccaggaaggggcgtgtggctgtgggctctgatgctgacctggtcatctggaaccccagggccacaaaagtcatctctgccaagagccataacctgaatgtagagtacaacatcttcgaaggagtggagtgcagaggcatgcccacggtggtcataagtcagggcagagtggtgctggaggacggaaacctgcttgtcactccaggggctggccgcttcattccccggaagacattcccagactttgtctataagaggataaaggctcgtaacaggctagcagagatccacggtgtgccccgaggcctgtatgatgggcctgtccacgaagtgatgttacctgccaagccagggagcggcacacaagcccgtgcatcctgtccaggcaagatctcagtgccacccgtgcgcaacctgcaccagtcagggttcagcctatctggctctcaggctgacgatcacattgccagacgcacagctcagaagatcatggcaccccccggaggacgctccaacatcacttcactttcttagacttggggtctggcaatgcaggtgctgtccccactggcagggtgtggggactactctcttcagttagctccttcctttgtagatcattattgtgaaaggtgctcagccttgccctccccctccccataaactctcttttggaagttcccagcccccagtctgaggcaccccctccagagggctgaatccagggagggttcactgccagagtgagaggattaggcagggcagtgagctggtgcctcttgccccacccctgaccttaccatgaaggccgtccacgagagctctcagcctccagcctgtgaactttccagggcctggtggtaggcagggtgggtgtttgctgctgccaccccctcagaaatcactgccctgtggaagcccccaagcttccaccagttccatgttgctaaaggtgcagcgaccccttgggggcctgtcccctctggctgccctggtgtagggaggagagcaggtgagcggagcctccgcttggcagagctgctgtgacttcagggatccaccagttactcagtgcagggtcgctccctcccacatagtcccttgcaaggaccaaacctgagctcctatagcagccgccctctagggagtttgatgatcccttagctaagacactttccttttcctacaaagtgtgttttcataggtttattagagtagctgttttggactgtgaggaaaccatagccagggatctgcatgctgctgtaccagacaccggccaccggccaagctgatttgagtcaggtcaataaaaagtctgggttcg

SEQ ID NO: 1096 - DNA, 375 bp, Rattus norvegicus
  ref <308>: DATABASE ACCESSION NUMBER: EMBL / AA900769
  ref <309>: DATABASE ENTRY DATE: 2000-03-03
ggatgcagaaggagatcacagccctcgctcccagcaccatgaagatcaagattattgctcctccagaacgcaaatattctgtctggatcggcggctccatcctggcttctctatctaccttccagcagatgtggatcagcaaacaggagtatgacgaagctggcccctccattgtccaccgcaaatgcttctaagtcacgcccccaccctccgccccgcccccacccccgccccgcccccgctctgtctctagcacacaactgtgaatgttttgtggatcagcgccttcagttcttttccaaatcattcctacctaaagctttgatttgttactcgtgtgttttttttaataaatcagacatgtgctacccttct

SEQ ID NO: 1097 - DNA, 569 bp, Rattus norvegicus
  ref <308>: DATABASE ACCESSION NUMBER: EMBL / AA799594
  ref <309>: DATABASE ENTRY DATE: 2000-03-03
cagtacataaaatgatataggacattaaaacatttatgtatatcgtacattaaattattttccccaagcatataagcatgtaatatatatctaatgatttaggacatacatttaaactcaactataaattcataacaacatgtctattctcaaatacattaagataatgcttgttagacatatctgtgttattagacatgcaccattaagtcataaacctttctcttccatatgactatccctgtccccaattggtctctatttctaccatcctccgtgaaatcaacaacccgcccactcgtccccctcttctcgctccgggcccattcgtcctgggggtgactatactgaaactttaccaagcatcgggttcttactttagggccatcaattggttcatcgtccatacgttccccttaaataagacatctcgatgggtaacgggtcaaatcagcccatgatcaacataactgtggtgatatacatttgggagtttttaattttcggatgccttctcaacatagccgtcaaggcatgaggttagcacaaagtccgtggaaccttttagt

SEQ ID NO: 1098 - DNA, 3128 bp, Rattus norvegicus
  ref <308>: DATABASE ACCESSION NUMBER: Refseq / NM_013063
  ref <309>: DATABASE ENTRY DATE: 2003-01-14
tctgcccatatgtgcagatctagagggaggatggcggaggccacggagaggctttaccgagtggagtacgctaagagcgggcgcgcctcttgcaagaaatgcagcgagagtatccccaaggactcgctccgcatggccatcatggtgcagtcacccatgttcgatggaaaagtcccacactggtatcacttctcctgcttctggaaggtgggccactccatccggcagcctgacacagaggtggacgggttctctgagctgcggtgggatgaccagcagaaggtcaagaagaccgcagaggctggaggcgtggcaggcaaaggccagcatggaggtggcggcaaggcggagaagacgctgggcgactttgcggcagagtatgccaagtccaacaggagcacatgcaagggctgcatggagaagatagagaagggtcagatgcgcctgtccaagaagatgctggatccagagaagccgcaactgggtatgattgaccgctggtaccatccaacttgctttgtcaagaaccgggacgagctgggcttccggcctgagtacagtgccagccagctcaagggctttagcctcctctctgcagaagacaaagaagctctgaagaagcagctcccggcagtcaagagtgaaggaaagagaaaatgtgacgaggtggatggaatagatgaagtagccaaaaagaaatctaaaaaaggaaaggacaaggagagtagtaaactggaaaaggcgctcaaggctcagaacgagctggtctggaatatcaaagatgagctgaagaaagcctgctccaccaacgacctgaaggagttgctcatcttcaaccagcagcaagtaccatctggagagtccgcaatcctggaccgagttgctgatggcatggcgtttggggcccttctgccctgcaaggagtgttcaggacagctggtttttaagagcgacgcttattactgtactggggatgtcactgcctggaccaagtgcatggtcaagacacagaatcccagccgaaaggaatgggtaactccaaaggaattccgagaaatatcctacctcaagaaattaaagatcaaaaagcaggaccggctgttccctccagagagcagcgccccagcaccaccagcacctcccgtctcgatcacctccgcacccacagctgtgaactcctctgcaccagcagacaaacccctgtctaacatgaagatcctgactcttggtaagctctcccagaacaaggacgaagcaaaggccatgattgagaaactcggaggcaagctgacaggatctgccaacaaggcctccttgtgtatcagcactaagaaggaggtggagaagatgagtaagaagatggaggaagtgaaagcagccaatgttcgagtcgtgtgtgaggacttcctccaggatgtgtctgcctcagctaagagcctccaagagctgctctcagcccatagcttgtcctcgtggggggctgaggtgaaggtagagcctggtgaagtggtggtccccaaggggaagtcagctgcaccctccaagaagagcaagggtgctgtcaaggaggaaggtgtcaacaagtctgaaaagaggatgaaactaactctgaagggaggagcagccgttgatcctgactctggtctggaacactctgcacatgtcctggagaaaggcgggaaggtgttcagtgccacgcttggcctggtggacattgtgaaagggactaactcctattacaaactgcaacttctggagtccgacaaggagagcaggtattggatcttccggtcctggggccgagtgggcacagttatcggcagtaacaagcttgagcagatgccgtccaaagaggatgctgttgaacacttcatgaagttatacgaagagaagactggaaatgcctggcactcgaaaaacttcacaaagtatcccaagaagttctaccctctggagattgactatggccaggacgaagaggcagtaaagaagctggcggtgaagcctggcactaagtcgaagctgccgaagccggtgcaggagctcgtcgggatgatcttcgacgtggagagcatgaagaaggccttggtggagtacgagattgaccttcagaagatgcccttggggaaactgagcagaaggcagatccaggccgcctactctatcctcagtgaggtccagcaggcagtgtcccaaggcagcagtgaatctcagatcctggatctctccaatcgcttctacaccctcatcccccatgactttggaatgaagaagcccccacttctgaacaacacagacagtgtgcaggccaaggtggagatgctggacaacctcctggacatcgaggttgcctatagtcttctcaggggtgggtctgatgacagcagtaaggaccccatcgatgtcaactatgagaagctcaaaactgacattaaggtggttgacagagattctgaagaggctgaggtcatcaggaagtatgtgaagaacactcacgcgaccacgcacaatgcctatgacctggaagtgatagacatctttaagatagagcgagagggagagagccaacgctacaagcccttcaggcagcttcacaaccggagactgctgtggcacgggtccaggaccaccaacttcgcaggcatcctgtcacagggtctgcggatagccccacctgaagcacctgtgacaggctacatgtttgggaaaggaatctactttgctgatatggtgtccaaaagtgcgaactactgccacacgtctcagggagacccgattggcttaatactgttgggagaagttgcccttggaaacatgtacgaactcaagcatgcttctcacatcagcaagttacccaagggcaagcacagtgtcaaaggtttgggcaaaaccgcccctgacccttcggccagcatcaccctggatggtgtagaggttccgctgggaacagggattccgtctggtgttaatgacacctgcctgctgtataacgagtacattgtctacgacattgctcaggtgaatctgaagtacctactgaaactgaagttcaatttcaagacctccttgtggtagagtgaaggcgggctttgccagcacccggggcctaggggataatgcccctagtg

SEQ ID NO: 1099 - protein, 1014 aa, Rattus norvegicus
  ref <308>: DATABASE ACCESSION NUMBER: Refseq / NP_037195
  ref <309>: DATABASE ENTRY DATE: 2003-01-14
MAEATERLYRVEYAKSGRASCKKCSESIPKDSLRMAIMVQSPMFDGKVPHWYHFSCFWKVGHSIRQPDTEVDGFSELRWDDQQKVKKTAEAGGVAGKGQHGGGGKAEKTLGDFAAEYAKSNRSTCKGCMEKIEKGQMRLSKKMLDPEKPQLGMIDRWYHPTCFVKNRDELGFRPEYSASQLKGFSLLSAEDKEALKKQLPAVKSEGKRKCDEVDGIDEVAKKKSKKGKDKESSKLEKALKAQNELVWNIKDELKKACSTNDLKELLIFNQQQVPSGESAILDRVADGMAFGALLPCKECSGQLVFKSDAYYCTGDVTAWTKCMVKTQNPSRKEWVTPKEFREISYLKKLKIKKQDRLFPPESSAPAPPAPPVSITSAPTAVNSSAPADKPLSNMKILTLGKLSQNKDEAKAMIEKLGGKLTGSANKASLCISTKKEVEKMSKKMEEVKAANVRVVCEDFLQDVSASAKSLQELLSAHSLSSWGAEVKVEPGEVVVPKGKSAAPSKKSKGAVKEEGVNKSEKRMKLTLKGGAAVDPDSGLEHSAHVLEKGGKVFSATLGLVDIVKGTNSYYKLQLLESDKESRYWIFRSWGRVGTVIGSNKLEQMPSKEDAVEHFMKLYEEKTGNAWHSKNFTKYPKKFYPLEIDYGQDEEAVKKLAVKPGTKSKLPKPVQELVGMIFDVESMKKALVEYEIDLQKMPLGKLSRRQIQAAYSILSEVQQAVSQGSSESQILDLSNRFYTLIPHDFGMKKPPLLNNTDSVQAKVEMLDNLLDIEVAYSLLRGGSDDSSKDPIDVNYEKLKTDIKVVDRDSEEAEVIRKYVKNTHATTHNAYDLEVIDIFKIEREGESQRYKPFRQLHNRRLLWHGSRTTNFAGILSQGLRIAPPEAPVTGYMFGKGIYFADMVSKSANYCHTSQGDPIGLILLGEVALGNMYELKHASHISKLPKGKHSVKGLGKTAPDPSASITLDGVEVPLGTGIPSGVNDTCLLYNEYIVYDIAQVNLKYLLKLKFNFKTSLW

SEQ ID NO: 1100 - DNA, 2400 bp, Rattus norvegicus
  ref <308>: DATABASE ACCESSION NUMBER: Refseq / NM_012736
  ref <309>: DATABASE ENTRY DATE: 2002-11-14
ggtgaggccgactgactccgttctagctggaggttcctgacttccctgctcgccgacccctggcgtgtgacgaccgatctcaggctgagcaatggcgtttcaaaaggtagtgaaagggactattcttatgggtggaggagctctggccactgttttgggactctctcagtttgctcactacagaaggaagcaagtaagcctggcgtatgtggaagcagcaacatgcttctcagagcccgtgaacagggagcctccttccagagaagctcagctcatgactctgcagaacacatcggaatttgacatcctcgtcattggaggaggagccacaggatgtggctgtgcgctagacgccgtcaccagaggactgaaaacagcccttgtagagagaaatgacttcgcatcagggactagcagcagaagcactaaattgatccatggtggcgtacgatacctccagaaggctatcacgaacttggatgttgaacagtataggatggtgaaagaggcccttcatgaacgtgccaacttactagaaatcgctccccatctatcagctccgctgcctataatgctgccactttataagtggtggcagttaccttattactgggtgggaatcaagatgtatgatctggttgcaggaagtcattgcctgaagagcagttatgtcctcagtaaatccagagcccttgagcatttccccatgctccagaaggacaagctggtcggagccattgtctactatgatggacagcacaatgacgcccggatgaacctcgccatcgccctcaccgctgccaggtacggggctgccacggccaattacatggaggtggtgagcttgctcaagaagacagaccccgaaactgggaaagagcgcgtgagtggtgcccggtgcaaggacgtgctcacagggcatgagtttaacgtgagagctaaatgcgttatcaatgccaccggccctttcacagactccgtgcgcaaaatggatgataacgatgttgttcccatctgccagcccagtgcaggggttcacattgtgatgcccgggtactacagccccgagaacatgggacttcttgatcctgcaaccagtgatggcagagttattttcttcttgccttgggagaagatgacaattgcgggtaccactgattcgccaacggacgtcacgcaccatcctattccttcggaagacgacattaacttcatcttaaatgaagtgcggaactacctgagttgcgacgttgaagtgagaagaggggatgtcctggcagcgtggagtggcattcgcccgcttgttaccgatcccaagtctgcaaacactcagtccatctctcgaaatcatgttgtggaagtcagcgacagtggcctcatcacaatagcaggtgggaagtggaccacatatcgctccatggcagaagatactgtgaacaaagctgtcaagcttcacaacttgaatgcaggacccagtaggaccgttgggctcttccttcaaggaggcaaagattggagccccacactctacatcaggcttgtccaggactatgggcttgagagtgaggttgcacaacacctggccaaaacctatggtgacaaggctttcgacgtggccaaaatggcaagtgtgactggaaaacggtggcctgttgttggagtgcgtcttgtgtcagaatttccgtacatcgaagcagaggtgaaatatgggattaaggagtacgcatgcaccgctgttgacatgatttcacgtcgcacccgcctggcctttcttaatgttcaggctgcagaggaagccctgcccaagattgttgagttaatgggaagagaattgaactggagtgaattgaggaaacaggaagaacttgaaacagccacgaggtttctgtactatgaaatgggctataagtctcgaacagaacaactcacagatagtactgaaatcagcctgctgcctccagacatcgatcggtacaagaagagatttcacatgtttgatgaagacgaaaaaggcttcattaccattgttgatgttcaacgtgtgctagagagtatcaatgtacaaatggacgaagacacactacatgaaattctctgtgaagtagacttgaacaagaatggtcaggttgagctccatgagtttctgcagctgatgagcgcagttcatacaggaagggtgtctggaagccggcttgccatcctcatgaagactgccgaggagaacttggaccgtagagttccaatccccgtggatcgtagttgtggaggattgtgagtctgaccaataaatccacaaccaacaagcctaggacagtcagcactatgtacaaccagagacgacttaaaccactctaaaatagtggccattgtagctgcctttttttttttttttttttaaaa

SEQ ID NO: 1101 - protein, 727 aa, Rattus norvegicus
  ref <308>: DATABASE ACCESSION NUMBER: Refseq / NP_036868
  ref <309>: DATABASE ENTRY DATE: 2002-11-14
MAFQKVVKGTILMGGGALATVLGLSQFAHYRRKQVSLAYVEAATCFSEPVNREPPSREAQLMTLQNTSEFDILVIGGGATGCGCALDAVTRGLKTALVERNDFASGTSSRSTKLIHGGVRYLQKAITNLDVEQYRMVKEALHERANLLEIAPHLSAPLPIMLPLYKWWQLPYYWVGIKMYDLVAGSHCLKSSYVLSKSRALEHFPMLQKDKLVGAIVYYDGQHNDARMNLAIALTAARYGAATANYMEVVSLLKKTDPETGKERVSGARCKDVLTGHEFNVRAKCVINATGPFTDSVRKMDDNDVVPICQPSAGVHIVMPGYYSPENMGLLDPATSDGRVIFFLPWEKMTIAGTTDSPTDVTHHPIPSEDDINFILNEVRNYLSCDVEVRRGDVLAAWSGIRPLVTDPKSANTQSISRNHVVEVSDSGLITIAGGKWTTYRSMAEDTVNKAVKLHNLNAGPSRTVGLFLQGGKDWSPTLYIRLVQDYGLESEVAQHLAKTYGDKAFDVAKMASVTGKRWPVVGVRLVSEFPYIEAEVKYGIKEYACTAVDMISRRTRLAFLNVQAAEEALPKIVELMGRELNWSELRKQEELETATRFLYYEMGYKSRTEQLTDSTEISLLPPDIDRYKKRFHMFDEDEKGFITIVDVQRVLESINVQMDEDTLHEILCEVDLNKNGQVELHEFLQLMSAVHTGRVSGSRLAILMKTAEENLDRRVPIPVDRSCGGL

SEQ ID NO: 1102 - DNA, 598 bp, Rattus norvegicus
  ref <308>: DATABASE ACCESSION NUMBER: Refseq / NM_031120
  ref <309>: DATABASE ENTRY DATE: 2001-04-11
tgctcccatcctcaagtcttttcgtccgcaatggctcccaaaggcggctccaagcagcagtccgaggaggacctgctccttcaggatttcagccgcaacctgtccgccaaatcgtcggcgctgttcttcgggaatgcgttcatcgtgtctgccattcccatctggttgtactggagaatatggcatatggatcttatccagtctgctgttctgtacagcgtgatgacgttagtaagcacttacttggtagcctttgcatacaagaatgtaaaatttgttctcaagcacaaagtagcacagaagagggaagatgctgtttccaaagaagtgacccgcaaactttctgaagctgataatagaaagatgtcccggaaggagaaagatgaaagaatcctgtggaagaagaatgaagttgccgattatgaagctacaacattctccatcttctataacaacactctgttcctggttctggttattgttgcctccttctttatactgaagaacttcaaccccagagtgaactacattctgtccataagtgcttcatctggactcatcgccctcttgtctactggctccaaatagactgtgtagc

SEQ ID NO: 1103 - protein, 185 aa, Rattus norvegicus
  ref <308>: DATABASE ACCESSION NUMBER: Refseq / NP_112382
  ref <309>: DATABASE ENTRY DATE: 2001-04-11
MAPKGGSKQQSEEDLLLQDFSRNLSAKSSALFFGNAFIVSAIPIWLYWRIWHMDLIQSAVLYSVMTLVSTYLVAFAYKNVKFVLKHKVAQKREDAVSKEVTRKLSEADNRKMSRKEKDERILWKKNEVADYEATTFSIFYNNTLFLVLVIVASFFILKNFNPRVNYILSISASSGLIALLSTGSK

SEQ ID NO: 1104 - DNA, 372 bp, Homo sapiens
  ref <308>: DATABASE ACCESSION NUMBER: EMBL / AI420375
  ref <309>: DATABASE ENTRY DATE: 2000-03-03
taagaagcaaagtttaatcatacttattaagcaagacttttcacaagaattgagtataaattcaatctccatatttcagttaacttcaaaccttgtttcaaattatcctttccaagtttcaataatatggcaaataggacaaccagtaaacttttattgcttaagaatatcaatctaggccgggcgcgggggctcacgcctgtaattccagcactttgggaggccgaggcaggtggatcacgagattctttcatctttctccttccgagacatctttctattatcagcttcagaaagttttcgagtcacttctttggaaacagcatcctccctcttctgtgctactttgtgcttgagaacaaatttcacatt

SEQ ID NO: 1105 - DNA, 2350 bp, Rattus norvegicus
  ref <308>: DATABASE ACCESSION NUMBER: EMBL / L00191
  ref <309>: DATABASE ENTRY DATE: 2000-03-04
gtgcccggaagcaagtccaccgccaccatcaacaacattaaaccaggagcagactacaccatcaccctgtatgctgtcactggccgtggggacagtccagccagcagcaagccagtttccatcaattatcaaacagaaattgacaagccatcccagatgcaggtgacggatgtccaggacaacagcatcagtgtcaggtggctgccttcaacttctcctgtgacaggttacagagtgaccaccgctcccaaaaatggcctaggaccaacaaaatctcaaactgtcagtccagatcaaacagaaatgaccattgaaggtttgcaacccaccgtggagtatgtggttagtgtctatgctcagaaccggaacggagaaagccagcccctggttcagactgcagtgaccaccattcctgcgccaaccaatctgaagttcactcaggtgtcacccaccaccttgactgcccagtggacagcgcccagtgttaagctcactggctaccgagtgcgggtgaccccgaaggagaagacaggaccaatgaaagaaatcaacctttctccagacagcacctccgtgattgtgtcagggctcatggtggccaccaagtatgaagtcagcgtctatgctctcaaggacacattgacaagcagaccagctcagggagtcgtcacgactctggagaatgtcagccctccaagaagggcccgtgtgaccgacgctacagaaactaccatcactattagctggagaacgaagacagagacgatcactggcttccaagtcgatgccattccagccaatggccagaccccggttcagaggaccatcagcccggatgtcagaagctatactattacaggtttacagccaggcactgactacaagatccacctgtacacgctcaacgacaatgcccggagctctcctgtggtcattgatgcctccacggccattgatgccccatccaacctgcggttcctgaccaccacacccaactccttgctggtatcatggcaggcaccccgtgccaggattactggctacattatcaagtatgagaagcctggatcccctcccagagaagtggtccctcggccccgccctggtgtcacggaggccaccatcactggtttcccatcaggtctggagccaggaaccgagtacaccatctatgtcatcgcactgaagaacaatcagaagagtgagcccctgattgggaggaaaaagacaggtaaagactcctaaccgaccgttggtttgcagggtgaagttctctacgttttgacacatcgctcctggatttttttttttctagcagaatggcttatatattgtactattaggcacaaatcacctaacatgctctaaaaatgtcttatttatttttctacagccttaagcttcttttaccttgcagaaattcaaattagattgtttgaattggggttgaggtgggggggggctttttaatggtgagagtaaaacctctccgatttgtgttgatttgtttattatttgatttctgaacttcagatatttcagttagttgcaaaggcttaactggagcagagatggctgtctgtggggctcagcggttcaaagctttgtctgtatgagaattcaaactaacattttttcccccatctaaactataaagaaatctgtgaaaagaagaaaaaatccagatttctttctagagtgttctgtgatctgagaaccgctggctgtctgggagcattgatcgggttgatatacagttgttgcctggattgatggtgattggttgcttcttctttgagcttaacgcgctttgcttttttggctctaacctctctcttggctagatgagcttccccaactggttacccttccacaccccaatcttcatggaccagagatcttggatgttccctccacagttcaaaagacccccttcgtcaccaaccctgggtatgacaccgaaaatggtattcagcttcctggcacatcccaccaacaacccagtgttgggcaacaaatgatctttgaggaacatggctttaggcgaaccacgccacccactgcggccacccccgtcaggcttaggccaagaccatacctgccgaatgtagatgaggaggtccaaatcggtcatgttcccaggggagacgtagactaccacctctatcctcatgttccggggctcaatccaaatgcctctacaggacaagaagctctctctcagacaaccatctcttggacgccattccaggagagttctgagtacatcatttcatgccaacctgttggcactgacgaagagcccttacaggtatatattacagcccttattatgagtgtctctctagat

SEQ ID NO: 1106 - DNA, 541 bp, Rattus norvegicus
  ref <308>: DATABASE ACCESSION NUMBER: EMBL / AA799721
  ref <309>: DATABASE ENTRY DATE: 2000-03-03
atgctgtctgaagtcagccagggcccctgagccctgccagggaaccaccatgccacctccatgtgaggatgggagctgggataagggtggcttcttgctctcctcgtcacctgtacctgaggagcccagagtgctgtttccactgtggtcagctcagcctctggctgcctgcaggaggtgggacgcagaggggaggaaggtgagccagaggcagggaccccgttgcacacgcatgcagactttctcagtgtttgattttgtttgttctcctcctttgctaaaatgatcatagttgtgtgaagctgctgccaagccagggatgggtaggacagcactatggactgcagccctctgctcctcaggtgcctgggtccatcctacttctgtatttggaacaggaagagccgcaggttaatgttcttggcagccagcagcttgttgcactccacagagtcgatgatgggcagcggcacatagtctgtctcgttgctctcgttggtgaagacaaagtggtagataacaggactgatcctcacatcat

SEQ ID NO: 1107 - DNA, 623 bp, Rattus norvegicus
  ref <308>: DATABASE ACCESSION NUMBER: EMBL / AI169756
  ref <309>: DATABASE ENTRY DATE: 2000-03-03
gagtggtgctggccgtcagtgttgggtataagttttatagaccagcccagtgattagccatgattgagagttatcgtggggtgtatgggatgttgttttgtttttgagactttaaattacaacacaagctggtcttgtgttgttggttcctattcagtatttcctggggattgtttgctttttaagtgaaacacttctgaccaatagcacagaacgtcttaatgccagaggtcacttcagcatcttcctgcttagaaaactcacagctggctgcctcactgccctgagagtcagtgagacgtgtagcttgtgttcaatttttacatcctctgattgtttatcttgtatagataagcacaaagagaaggtgcttgctaacagagggacaccgctgccatgtcccaacaagctgttcagtttaaactgctgaatgacattatttgagctatttaaagcttatttttagtatgaactaaatgaaggttaaaacatgctttagaaaatgcactgatctccgcactgtgtgtacagtattggacaaaggatttgttcattttgttgcattattttgaatattgtcttttcattttaataaagttatattacttatttatgacaccgtt

SEQ ID NO: 1108 - DNA, 627 bp, Rattus norvegicus
  ref <308>: DATABASE ACCESSION NUMBER: Refseq / NM_017338
  ref <309>: DATABASE ENTRY DATE: 2003-01-14
accaaccgcctggctccatcaggaccccgcagtctcagctccaagtcatcgctcaccagggaggcatcatgggctttctgaagttctcccctttcctggttgtcagcatcttgctcctgtaccaggcatgcggcctccaggcagttcctttgaggtcaaccttagaaagcagcccaggcatggccactctcagtgaagaagaagctcgcctactggctgcactggtgcagaactatatgcagatgaaagtcagggagctggagcaggaggaggaacaggaggctgagggctctagcttggacagccccagatctaagcggtgtgggaatctgagtacctgcatgctgggcacgtacacacaagacctcaacaagtttcacaccttcccccaaacttcaattggggttggagcacctggcaagaaaagggatatggccaaggacttggagacaaaccaccacccctattttggcaactaggtccctcctctcctttccagtttccatcttgctttcttcctataacttgatgcatgtagttcctctctggctgttctctgggctattatgggttactttcatgaggcaaaggatggtatctggaatctccaatgggtgaggagaaagg

SEQ ID NO: 1109 - protein, 136 aa, Rattus norvegicus
  ref <308>: DATABASE ACCESSION NUMBER: Refseq / NP_059034
  ref <309>: DATABASE ENTRY DATE: 2003-01-14
MGFLKFSPFLVVSILLLYQACGLQAVPLRSTLESSPGMATLSEEEARLLAALVQNYMQMKVRELEQEEEQEAEGSSLDSPRSKRCGNLSTCMLGTYTQDLNKFHTFPQTSIGVGAPGKKRDMAKDLETNHHPYFGN

SEQ ID NO: 1110 - DNA, 530 bp, Rattus norvegicus
  ref <308>: DATABASE ACCESSION NUMBER: EMBL / AA800549
  ref <309>: DATABASE ENTRY DATE: 2000-03-03
gttattaaaaggaatttaataatcttaattaaaaatccataacagcgaattccgtcacaggcctcggcagctgggagtaactccagaggtacaggccccttggtgatacggtcagaccccaccttggaggcacgaagctacttcaatacaatatcaaagatccatgagaatattttttttaaaaaagttttaaatatattagactcttttgattgccatttttacagaaagctgctgatacagtatacagagtttttaacttttttttcacataaaatacattttttttcttaagtgttctctgtacatcagtggcttctggtctggtgaattattgcggagggctgggtgtctgcagacttttccagggtgtgcagagccaggccccgcacagtggcattagaagtgcccatgagaaggaggccctctggctaacaagggagaggccttgggctttctagaaaaagagtgggtcacttcagtggagctgtccaccctggccatttgatccttggcttttctgtgccctg

SEQ ID NO: 1111 - DNA, 6162 bp, Homo sapiens
  ref <308>: DATABASE ACCESSION NUMBER: Refseq / XM_028840
  ref <309>: DATABASE ENTRY DATE: 2003-01-05
gccacaccatgaggccccagccccaccagaggccccgcgctgccctggcccccggtgcaccgtgctagcccccagccagggcgttggggagggcggtggccatggccagtcacgtggacctgctgacggagctgcagctgctggagaaggtgcccacgctggagcggctgcgggctgcccagaagcgccgggcccagcagctgaagaaatgggcacagtacgagcaggacttgcagcaccgcaagcgaaagcatgagcggaagcgcagcacgggcggccgccgcaagaaagtgtccttcgaggccagcgtggccctgctggaggcctcgctgaggaacgacgccgaggaagtacgctacttcctgaagaataaggtcagccctgatttgtgcaatgaggacggactcacagccctacaccagtgctgcatcgacaactttgaggaaattgtgaagctgctcctctcccatggtgccaatgtgaacgccaaggacaacgagctgtggacacctctccatgctgcagccacctgcggccacatcaacctggtgaagatcctcgttcagtatggggccgacttgcttgctgtcaactcggatgggaacatgccatatgacctctgcgaggatgaacccaccctggatgtcatcgagacctgcatggcataccagggcatcacccaagagaaaatcaacgagatgcgggtggctcctgagcagcagatgattgcggacatccactgcatgatcgcagcgggccaggacctggactggatagatgcccagggtgccacactgctgcacatagctggagccaatggatacctgcgggcagctgagctcctcctggaccatggagtgcgtgtggatgtgaaggactgggatggctgggagcccctgcatgcagctgccttctggggacagatgcagatggcagagctattggtgtcccatggagctagtctcagtgcaaggacatccatggatgagatgccaatagacctgtgcgaggaggaagagttcaaggtcctgctgctggagctaaaacacaagcatgatgtgatcatgaagtcacagctgaggcacaagtcatccttgagccggaggacctccagcgcaggcagccgtgggaaggtggtgcggcgagccagcctgtcggacaggaccaacctgtataggaaggagtatgagggagaggccatcctgtggcagcggagtgcagctgaggatcagcggacctccacctacaacggggacatcagggagaccaggacagaccaagagaataaggaccctaaccccaggctggagaagcccgtgctactctccgaatttcctaccaagatcccacgaggtgaactggacatgcctgttgagaatggcctccgggctccggtcagtgcctaccagtatgcgctggccaacggggatgtctggaaggtgcatgaggtgcctgactacagcatggcctatggcaaccctggcgtggccgacgccaccccgccctggagcagctacaaggaacagagccctcagacgcttctggagctgaagcggcagcgggctgcagccaagctgctcagccaccccttccttagcacacacctgggcagcagcatggccaggacgggcgagagtagcagtgaaggcaaggcccccttgatcggaggcagaacttcaccgtacagcagcaatgggacctcggtatattacacggtcaccagcggagatcccccactcttaaagttcaaggcccccatagaggagatggaggagaaggtgcatggctgttgccgtatctcctagtctccgtgtgatggaggagggagatgcctggggaggggctcctggaatccaggccagcccaacagccctggctggggaggtgtcagggcagctggggagaggtgggctctgcttttcagaggaactcagaccccagccctcagctggctgcccatagcatcccatgtcccacgtcccgtggttctgcttcctgctgcatcgtctgccatctgacacaaggcctgtcgtggcctcctggttcactctgctgtctgatcttgggagggtgggcttgagatcccagctctattcttggtataaaggcttctccggatcagtacatgcatgtcacattaacacacacacacacacacatatacacacacacacaagctcgatcagtgtgtgtaggaatgacatacctgggctcaggggaagcaagggggcttagaatttgtggggtattcccaaaaggatggaagttaagactcagagtctcattaccactgccaatgtggttttagcaggggaggggacctgctaagctgagacccatagtcctgctcagagttatcccaaagtctgagccaccagccacacctgacaggggtgagaagtcctcgctgtgttcagagggagccaggaatctacatgggtagatgagatagacacagacctgctccccgcagccttgttgagagccacacttctgcccatgccaggagccagctgtgtgaccatccaggggtggagggggaaaaccaggcaatttcgttcctggaatcaaccaaatcatgttttcctcttggatggaagtgtcaaaggcagaagggtgtgggagggggacaaggtcagtatttaccaaagtgtatctgattttaaaaattcctttagtctgtaaaactcctagagggagggaggtaactgaattcacttctttttgtggatcgtatcaaggtcactgggttttactggctggtgctgggaaaatgaagctaagtgaggagcttccattggaatgcttttccagggagagaggccagttaatttaaaaaaaacagtcgctagttaacagcgacagagcccagcaccctggggtctttgtgaatatccagactgtttcagcccagcccatctcagccaaccctccttagactgagctgtcagagcaagcaattaggggccagcctgcctccacctcccacccccttccacctccatcagtcatgtgtgcagagtcagtgctcgggatcccgggcccagcttttgcctttttggggatgcttggtgagacagatttgccagtcagcccttttgagttcccgcctcacccaggggctcccagcctgcacttgcaggagtggtgatgccccaagtctgcgaatccagggtgcacgtggtcaatatcccctcctgcattcaggagagccatggtagggctagagttgggtcttgcccagccctgcagtttcatagtcccagccttcctggtgctggggagggaggactgtgaatggctgttctcccctcactgctgagtctcccaggaccccctttggagatgcccatggcatgggcactgcccacaggctcagccagaacctcttggtgtacccgataagctgcaggttatcccttgctctgtgcgccttttatttgtccttaaactacctccttagagctctgaaggggtctcctagttccagattttaatttggggaacagatctgggttctttttaaccctcttctttctcagtctatgagaaacttgccctgaggggcacctgggctaggggcttgggactggaagaccatccccgccttgtgccacaactttggtcatgggatctgctctttgtcattcttagccccctactgtggcccccatagccccataacccagagagggagctggacttcagggagcctgagtgatgctttcccaggagcagggcagctggctggaccagaaagtagagggcccatgggagtgactgcacccttggtggctgctggaaggggagaggttctcagcatcaggccacctccaccccaatgccaggatagatgtattctagagtaggggtggaggcggcccaggaggctgaagacaggtgcacagatgcttcccacgaccttgccatttggggtgggctcttcaacatctcaggctgtggctggaacaggacaggatgatctaaaacacacgtaccattggctgtaaaacagtatgagcccagactgacgctgaaatccctcatgagccaaccttagctacaaggtagggagttctgagggaagccgcgtgctcctcaggagagagctgtttaggttttccgatctttttgctcaggggccaaacactgaaggcacgtactgcccaacccactgagcgcctgaggccattccctccttttccgcatgcctcctgcctcctgggctattcctctccacccagaaggctgggaatcccagctgattccctgacaggagccgacttcacacacaggtgactctcaggcattggctcatgttttcagccagggataaaccatcccttcttggggctttaagtccctggggagctttccctgtaggtctcctgggtgttgagagacaagttggagaccaacctccaatgaatgagccgcggtcattcattaattcactcacgtaatttactgagtagctgcaacatgccagcctctacgttaggttctgcggataaaggaggaataagacagagtcaggagaactgttccttgtggtttccgtcccttggggaccacaggcatcagcagtcccattcaagtcacctgaggcaaagtgtctgcatcttcgtccagcgaccctttgcttttcggctcctagaatccttagagtctgaattcctttagctgggaacagctgtcatggtcacccctggataacatttgccaccaagtatagatgctggatcttgggttccaggcagacatcatccaggtccatctggaactttcagtgatagctgccttcagccagcatctttgggggactctataatagcagcttgagatcagtgtctagaagactgttctgcaatttgctgccaaatgcatctcaggtttttaaagtcattgtttcttgctcatggtggctcatttattacatagtcccctcaccccactaatggataatgggaggaaaagttgctgcttccttcagcatcaaagcctttccttgggaatctgcctccctccatggcaggggtggattcgggagctgggagtaaccaggcaaagtcaaccagatgcctagctcctgctgagacccaggtcctatggcagctcctcattagattaaaggagaccacttccaaagcaggtgctgcatggctcaccatcatatgccccaaacaactgaaagttggcggttatcaccagactgtgagtttctggcaagtagcttggggaagctgaataaactctaggcccagggctactaaagacttcaggatagaattctccatcaaatatacagcataagtaaaactgctctgcactgtttaatccatttccaaggggcttagaaaagctaacaagggtgtgtcccctgtcctgccccaccggtttgctggctttgtaataacataagaccattgtggttgttggtgtcagataccttcccatcctgagctctctcacctacctgctctctctcctagagcaggatactggggtacttttaagaagggtgctccttttaagatgcccagaaaagctgtatttaactcttgctatttgtaacttggggatggtctcccctgccccagggcacataagagcaaaggctccaatggtcagtggatgactctgcaaaagtgaccccctgtgccagaagctatagccctctccccaacaggtctctcttgttggccagagggcctgcttcccatgggcattgcaagtgccaccgtgcggggcctggctctgcacacccaggaaaagtctgcagacccccagccctccgcaataattcaccagaccagaagccactggtgtacagagaacacttaaaaaaatgtattttatgtgaaaaaaaattaaaactctgtatactgtatcagcagctttgtgtaaaaatggcaatcaagagagtctaatatatttaaaacttttttaaaaaaaatcttcgcagatctttgatatcgtactgaggtaacttccacgtagccccttgccacgcggcaccggtgggccttgggtccaaaactgtggctcagccacatcccaaagggggcacatgtccctggagttgcttccagctgccaaggcctgtgacagaattcgctgttaagagtttttaattaaaattattaaattccttttaataac

SEQ ID NO: 1112 - protein, 567 aa, Homo sapiens
  ref <308>: DATABASE ACCESSION NUMBER: Refseq / XP_028840
  ref <309>: DATABASE ENTRY DATE: 2003-01-05
MASHVDLLTELQLLEKVPTLERLRAAQKRRAQQLKKWAQYEQDLQHRKRKHERKRSTGGRRKKVSFEASVALLEASLRNDAEEVRYFLKNKVSPDLCNEDGLTALHQCCIDNFEEIVKLLLSHGANVNAKDNELWTPLHAAATCGHINLVKILVQYGADLLAVNSDGNMPYDLCEDEPTLDVIETCMAYQGITQEKINEMRVAPEQQMIADIHCMIAAGQDLDWIDAQGATLLHIAGANGYLRAAELLLDHGVRVDVKDWDGWEPLHAAAFWGQMQMAELLVSHGASLSARTSMDEMPIDLCEEEEFKVLLLELKHKHDVIMKSQLRHKSSLSRRTSSAGSRGKVVRRASLSDRTNLYRKEYEGEAILWQRSAAEDQRTSTYNGDIRETRTDQENKDPNPRLEKPVLLSEFPTKIPRGELDMPVENGLRAPVSAYQYALANGDVWKVHEVPDYSMAYGNPGVADATPPWSSYKEQSPQTLLELKRQRAAAKLLSHPFLSTHLGSSMARTGESSSEGKAPLIGGRTSPYSSNGTSVYYTVTSGDPPLLKFKAPIEEMEEKVHGCCRIS

SEQ ID NO: 1113 - DNA, 284 bp, Rattus norvegicus
  ref <308>: DATABASE ACCESSION NUMBER: EMBL / Y17164
  ref <309>: DATABASE ENTRY DATE: 1998-10-30
cctcccagaacccattcttcccttccccatgggctgttgaagataaacaagagggactgtacttctgtggaaaacaatttgcataatactaatttattgccgtcctggactctgtgagcgtgtccgcagagccgtagtaaatattgtgattttatttaaactcttcagaggaaaccggatgctgaagtgcagtcccagcacacttcctctttttttaggcaaacctcgactcgacgtattttaaattttcagtcattcactcacagtataaaagcactcctgac

SEQ ID NO: 1114 - DNA, 618 bp, Rattus norvegicus
  ref <308>: DATABASE ACCESSION NUMBER: Refseq / NM_031090
  ref <309>: DATABASE ENTRY DATE: 2003-01-13
atgtccagcatgaatcccgaatatgattatttattcaagttactcctgattggcgactctggggttggaaagtcttgccttctccttaggtttgcggatgacacgtatacggaaagctacatcagcacgattggtgtggatttcaagatacggactatagagctagacgggaaaacaatcaagcttcagatatgggacacagcaggccaggaacggtttcgaacaatcacctccagttattacagaggagcccatggaatcatagttgtgtatgatgtgacagaccaggagtccttcaataacgtgaaacagtggctgcaggagatcgatcgctacgccagcgaaaatgtcaacaagttgttggtagggaacaaatgtgacctgaccacaaagaaagtagtagactacacaacagccaaggaatttgcagattcccttggaattccatttttggaaaccagtgctaagaacgaaaagaatgtagaacagtctttcatgaccatggcagcggagattaaaaagcggatgggtcctggagcaacagctggaggtgcggagaagtccaatgttaaaatccagagcactccagtcaagcagtcaggtggaggctgctgctaa

SEQ ID NO: 1115 - protein, 205 aa, Rattus norvegicus
  ref <308>: DATABASE ACCESSION NUMBER: Refseq / NP_112352
  ref <309>: DATABASE ENTRY DATE: 2003-01-13
MSSMNPEYDYLFKLLLIGDSGVGKSCLLLRFADDTYTESYISTIGVDFKIRTIELDGKTIKLQIWDTAGQERFRTITSSYYRGAHGIIVVYDVTDQESFNNVKQWLQEIDRYASENVNKLLVGNKCDLTTKKVVDYTTAKEFADSLGIPFLETSAKNEKNVEQSFMTMAAEIKKRMGPGATAGGAEKSNVKIQSTPVKQSGGGCC

SEQ ID NO: 1116 - DNA, 3973 bp, Homo sapiens
  ref <308>: DATABASE ACCESSION NUMBER: Refseq / NM_022484
  ref <309>: DATABASE ENTRY DATE: 2002-11-05
ggggggatttcggcggcggaaacatggcggtcgcggccgggccggtaacggagaaagtttacgccgacactggcctgtattagcgcgtatggcctcgggccctcgttccccaaggcgtgccgcctccctgttctcagtcgcaggctgaagccttgtctgctctcctcctttttggtttggttttggaactgactccgagggttgggagagcgcgttggtggcgacggccgagtcagatcactataaacaaaatttccacaagagaaaatgttgaaataggagttgcggatacattggatatactggatgaaatacaagcggttaatttttgtaacgtgagggaaaagcccacattgctggttacatgtgtaaatcactgcgttattgctttagtcattgtctctatttagcaatgacaagactggaagaagtaaatagagaagtgaacatgcattcttcagtgcggtatcttggctatttagccagaatcaatttattggttgctatatgcttaggtctatacgtaagatgggaaaaaacagcaaattccttaattttggtaatttttattcttggtctttttgttcttggaatcgccagcatactctattactatttttcaatggaagcagcaagtttaagtctctccaatctttggtttggattcttgcttggcctcctatgttttcttgataattcatcctttaaaaatgatgtaaaagaagaatcaaccaaatatttgcttctaacatccatagtgttaaggatattgtgctctctggtggagagaatttctggctatgtccgtcatcggcccactttactaaccacagttgaatttctggagcttgttggatttgccattgccagcacaactatgttggtggagaagtctctgagtgtcattttgcttgttgtagctctggctatgctgattattgatctgagaatgaaatctttcttagctattccaaacttagttatttttgcagttttgttatttttttcctcattggaaactcccaaaaatccgattgcttttgcgtgtttttttatttgcctgataactgatcctttccttgacatttattttagtggactttcagtaactgaaagatggaaaccctttttgtaccgtggaagaatttgcagaagactttcagtcgtttttgctggaatgattgagcttacattttttattctttccgcattcaaacttagagacactcacctctggtattttgtaatacctggcttttccatttttggaattttcaggatgatttgtcatattatttttcttttaactctttggggattccataccaaattaaatgactgccataaagtatattttactcacaggacagattacaatagccttgatagaatcatggcatccaaagggatgcgccatttttgcttgatttcagagcagttggtgttctttagtcttcttgcaacagcgattttgggagcagtttcctggcagccaacaaatggaattttcttgagcatgttcctaatcgttttgccattggaatccatggctcatgggctcttccatgaattgggtaactgtttaggaggaacatctgttggatatgctattgtgattcccaccaacttctgcagtcctgatggtcagccaacactgcttcccccagaacatgtacaggagttaaatttgaggtctactggcatgctcaatgctatccaaagattttttgcatatcatatgattgagacctatggatgtgactattccacaagtggactgtcatttgatactctgcattccaaactaaaagctttcctcgaacttcggacagtggatggacccagacatgatacgtatattttgtattacagtgggcacacccatggtacaggagagtgggctctagcaggtggagatacactacgccttgacacacttatagaatggtggagagaaaagaatggttccttttgttcccggcttattatcgtattagacagcgaaaattcaaccccttgggtgaaagaagtgaggaaaattaatgaccagtatattgcagtgcaaggagcagagttgataaaaacagtagatattgaagaagctgacccgccacagctaggtgactttacaaaagactgggtagaatataactgcaactcctgtaataacatctgctggactgaaaagggacgcacagtgaaagcagtatatggtgtgtcaaaacggtggagtgactacactctgcatttgccaacgggaagcgatgtggccaagcactggatgttacactttcctcgtattacatatcccctagtgcatttggcaaattggttatgcggtctgaaccttttttggatctgcaaaacttgttttaggtgcttgaaaagattaaaaatgagttggtttcttcctactgtgctggacacaggacaaggcttcaaacttgtcaaatcttaatttggaccccaaagcgggatattaataagcactcatactaccaattatcactaacttgccattttttgtatgctgtatttttatttgtggaaaataccttgctacttctgtagctgctctcactttgtcttttcttaagtaattatggtatatataaggcgttgggaaaaaacattttataatgaaagtatgtagggagtcaaatgcttactgtaaatgcataagagacgttaaaaataacactgcactttcaggaatgtttgcttatggtcctgattagaaagaaacagttgtctatgctctgcaatggtcaatgatgaattactaatgccttattttctaggcatataataatagtttagagaatgtagaccagataaatttgtttactgttttaagaaaactaccagtttacttacagaagattcttttttccaaacagtaggtttcatccaagaccatttgaagaactgcaaactctttctcttagaaaagaaagagggcagcctaaaataaacgcaaaatttgcttatactccatcacattcagatgtcttggttgtgacttattaccagtgtggcagagaacccaagttacattttagatcaaaatattctttatgtaggtattgttaaaaggctagagcctacaagttgctcttccatgcgttggtcagggggccctgaaaacactggtaatattaagagtctttctcagggtaacttaatgttttcttaatgaacagtgtttccagctacaaattcttccaataaattgtcttcctttttgaaaagtactctcatagaagaaatttagcaatttctcgttgactgactcagtctattttaagtattcagaaaagattttgatccccattgagttaatgctctgccttgaaaattatttttctgatccttgttagtgataacattttttttctactgaaggtcagaggataggaaacaagtatttctcttctggtatacatgtaatgtattctgtaaaaaagtattcatattggcaattttagttaggcataatattgtggttgtaatttttaaaacttagtgttttgtctgattaaagcaggcactgatcagggtatctcctaagaggtaattcacttcttattcctttccaataattattacattctaaattttcatctatgagaaataacaaacaagaagggaatagaattaaattggggtataatctaatcttcattgtttaaatggtttgccttctcaccattgaagccatttttttatagcctcagaaagaggaaataatgcctccaccattttctacctggtgacttgaaaattgaacttttaagttaggaagaagttagagtcagggaacttgtataccactatctatgcagcattgttatagtctgattatttctgtgttttgaatatgattttcctaatgctctaaataaaattttgttaaaaatcaaaaaaaaaaaaaaaaaaacttatcgataccgtcgacctcgatgatgtcgac

SEQ ID NO: 1117 - protein, 697 aa, Homo sapiens
  ref <308>: DATABASE ACCESSION NUMBER: Refseq / NP_071929
  ref <309>: DATABASE ENTRY DATE: 2002-11-05
MCKSLRYCFSHCLYLAMTRLEEVNREVNMHSSVRYLGYLARINLLVAICLGLYVRWEKTANSLILVIFILGLFVLGIASILYYYFSMEAASLSLSNLWFGFLLGLLCFLDNSSFKNDVKEESTKYLLLTSIVLRILCSLVERISGYVRHRPTLLTTVEFLELVGFAIASTTMLVEKSLSVILLVVALAMLIIDLRMKSFLAIPNLVIFAVLLFFSSLETPKNPIAFACFFICLITDPFLDIYFSGLSVTERWKPFLYRGRICRRLSVVFAGMIELTFFILSAFKLRDTHLWYFVIPGFSIFGIFRMICHIIFLLTLWGFHTKLNDCHKVYFTHRTDYNSLDRIMASKGMRHFCLISEQLVFFSLLATAILGAVSWQPTNGIFLSMFLIVLPLESMAHGLFHELGNCLGGTSVGYAIVIPTNFCSPDGQPTLLPPEHVQELNLRSTGMLNAIQRFFAYHMIETYGCDYSTSGLSFDTLHSKLKAFLELRTVDGPRHDTYILYYSGHTHGTGEWALAGGDTLRLDTLIEWWREKNGSFCSRLIIVLDSENSTPWVKEVRKINDQYIAVQGAELIKTVDIEEADPPQLGDFTKDWVEYNCNSCNNICWTEKGRTVKAVYGVSKRWSDYTLHLPTGSDVAKHWMLHFPRITYPLVHLANWLCGLNLFWICKTCFRCLKRLKMSWFLPTVLDTGQGFKLVKS

SEQ ID NO: 1118 - DNA, 1467 bp, Rattus norvegicus
  ref <308>: DATABASE ACCESSION NUMBER: Refseq / NM_053842
  ref <309>: DATABASE ENTRY DATE: 2003-01-13
ccgtggttctaccggcggttagttctctcttctgtgttgtcctccctcctcgttcccgatcgccgccagccggctacacgggcggcggcgcggttcctgtgggaagcgcagcacaagtcgagcggtaacgcgaagcgtcgagcccaacgcggcggaggctgtgcagccaacatggcggcggcggcggcggcgggcccggagatggtccgcgggcaggtgttcgacgtggggccgcgctacactaatctctcgtacatcggagaaggcgcctacggcatggtttgttctgcttatgataatctcaacaaagttcgagttgctatcaagaaaatcagtccttttgagcaccagacctactgtcagagaaccctgagagagataaaaatcctactgcgcttcagacatgagaacatcatcggcatcaatgacatcatccgggcaccaaccattgagcagatgaaagatgtatatatagtacaggacctcatggagacagatctttacaagctcttgaagacacagcacctcagcaatgatcatatctgctattttctttatcagatcctgagaggattaaagtatatacattcagctaatgttctgcaccgtgacctcaagccttccaacctcctgctgaacaccacttgtgatctcaagatctgtgactttggccttgcccgtgttgcagatccagaccatgatcatacagggttcttgacagagtatgtagccacgcgttggtacagagctccagaaattatgttgaattccaagggttataccaagtccattgatatttggtctgtgggctgcatcctggcagagatgctatccaacaggcctatcttcccaggaaagcattaccttgaccagctgaatcacatcctgggtattcttggatctccatcacaggaagatctgaattgtataataaatttaaaagctagaaactatttgctttctctcccgcacaaaaataaggtgccgtggaacaggttgttcccaaacgctgactccaaagctctggatttactggataaaatgttgacatttaaccctcacaagaggattgaagttgaacaggctctggcccacccgtacctggagcagtattatgacccaagtgatgagcccattgctgaagcaccattcaagtttgacatggagctggacgacttacctaaggagaagctcaaagaactcatttttgaagagactgctcgattccagccaggatacagatcttaaattggtcaggacaagggctcagaggactggacgcgttcagatgtcggtgtccccccagttcttgaccctggtcctgtctccagcccgtctcagcttacccactcttgactcctttgagccgttccgaggggcagtctggtcgtagtggcttttatactttcacggaattcttcagtccagagagttctcctgcaccaggccctgcacagttgcactcag

SEQ ID NO: 1119 - protein, 358 aa, Rattus norvegicus
  ref <308>: DATABASE ACCESSION NUMBER: Refseq / NP_446294
  ref <309>: DATABASE ENTRY DATE: 2003-01-13
MAAAAAAGPEMVRGQVFDVGPRYTNLSYIGEGAYGMVCSAYDNLNKVRVAIKKISPFEHQTYCQRTLREIKILLRFRHENIIGINDIIRAPTIEQMKDVYIVQDLMETDLYKLLKTQHLSNDHICYFLYQILRGLKYIHSANVLHRDLKPSNLLLNTTCDLKICDFGLARVADPDHDHTGFLTEYVATRWYRAPEIMLNSKGYTKSIDIWSVGCILAEMLSNRPIFPGKHYLDQLNHILGILGSPSQEDLNCIINLKARNYLLSLPHKNKVPWNRLFPNADSKALDLLDKMLTFNPHKRIEVEQALAHPYLEQYYDPSDEPIAEAPFKFDMELDDLPKEKLKELIFEETARFQPGYRS

SEQ ID NO: 1120 - DNA, 1514 bp, Homo sapiens
  ref <308>: DATABASE ACCESSION NUMBER: Refseq / NM_138957
  ref <309>: DATABASE ENTRY DATE: 2003-01-15
gcccctccctccgcccgcccgccggcccgcccgtcagtctggcaggcaggcaggcaatcggtccgagtggctgtcggctcttcagctctcccgctcggcgtcttccttcctcctcccggtcagcgtcggcggctgcaccggcggcggcgcagtccctgcgggaggggcgacaagagctgagcggcggccgccgagcgtcgagctcagcgcggcggaggcggcggcggcccggcagccaacatggcggcggcggcggcggcgggcgcgggcccggagatggtccgcgggcaggtgttcgacgtggggccgcgctacaccaacctctcgtacatcggcgagggcgcctacggcatggtgtgctctgcttatgataatgtcaacaaagttcgagtagctatcaagaaaatcagcccctttgagcaccagacctactgccagagaaccctgagggagataaaaatcttactgcgcttcagacatgagaacatcattggaatcaatgacattattcgagcaccaaccatcgagcaaatgaaagatgtatatatagtacaggacctcatggaaacagatctttacaagctcttgaagacacaacacctcagcaatgaccatatctgctattttctctaccagatcctcagagggttaaaatatatccattcagctaacgttctgcaccgtgacctcaagccttccaacctgctgctcaacaccacctgtgatctcaagatctgtgactttggcctggcccgtgttgcagatccagaccatgatcacacagggttcctgacagaatatgtggccacacgttggtacagggctccagaaattatgttgaattccaagggctacaccaagtccattgatatttggtctgtaggctgcattctggcagaaatgctttctaacaggcccatctttccagggaagcattatcttgaccagctgaaccacattttgggtattcttggatccccatcacaagaagacctgaattgtataataaatttaaaagctaggaactatttgctttctcttccacacaaaaataaggtgccatggaacaggctgttcccaaatgctgactccaaagctctggacttattggacaaaatgttgacattcaacccacacaagaggattgaagtagaacaggctctggcccacccatatctggagcagtattacgacccgagtgacgagcccatcgccgaagcaccattcaagttcgacatggaattggatgacttgcctaaggaaaagctcaaagaactaatttttgaagagactgctagattccagccaggatacagatcttaaatttgtcaggtacctggagtttaatacagtgagctctagcaagggaggcgctgccttttgtttctagaatattatgttcctcaaggtccattattttgtattcttttccaagctccttattggaaggtatttttttaaatttagaattaaaaattatttagaaaaaaaaaaaaaaaaaaaaaaaaaaaaaa

SEQ ID NO: 1121 - protein, 360 aa, Homo sapiens [sequence omitted]

SEQ ID NO: 1122 - DNA, 468 bp, Rattus norvegicus
  ref <308>: DATABASE ACCESSION NUMBER: Refseq / NM_031032
  ref <309>: DATABASE ENTRY DATE: 2003-01-23
aaaatgagtgagtccttggtggtttgtgatgttgctgaagatttagtggaaaagctgagaaagtttcgttttcgaaaagaaacccacaatgctgctattattatgaagattgacaaggataaacgcttggtggtgctggatgaggagctcgagggtgtctctccagatgaacttaaagatgaactacctgaacggcaacctcgcttcattgtgtatagttataaataccagcacgacgatggccgggtctcctaccctctgtgctttatcttctccagtcctctggggtgcaaacctgagcagcagatgatgtacgctgggagtaagaacaagctggtccagaccgccgaactaaccaaggtatttgaaataagaaacaccgaagacctgactgaagaatggttacgtgagaaacttggatttttccactaatgtgaacttctgtgtttcttaagtatttatgtatta

SEQ ID NO: 1123 - protein, 142 aa, Rattus norvegicus
  ref <308>: DATABASE ACCESSION NUMBER: Refseq / NP_112294
  ref <309>: DATABASE ENTRY DATE: 2003-01-23
MSESLVVCDVAEDLVEKLRKFRFRKETHNAAIIMKIDKDKRLVVLDEELEGVSPDELKDELPERQPRFIVYSYKYQHDDGRVSYPLCFIFSSPLGCKPEQQMMYAGSKNKLVQTAELTKVFEIRNTEDLTEEWLREKLGFFH

SEQ ID NO: 1124 - DNA, 424 bp, Homo sapiens
  ref <308>: DATABASE ACCESSION NUMBER: EMBL / AA806487
  ref <309>: DATABASE ENTRY DATE: 2000-03-03
ggaaaaggaaaatgagtgagtctttggttgtttgtgatgttgccgaagatttagtggaaaagctgagaaagtttcgttttcgcaaagaaacgaacaacgctgctattataagtaagctaaaagtgattgcctcaaagttacatggtcttaatttgtttttaatcttgtagctacattgaatgaactgaaccgttggaaagcaatgttacttcctctgtgtcatttccccaccaccacctttagatcactttaaaaaataagtaacagctaattctaatgtcacagaacagaggtggattgtcccacctcccccatagtccttttatcagctgcctgtacagctctggagaaggcggtcgtcttggtccttgggtaatgaggattcccatcgcagtgacccatccacccatccttcttgggggac

SEQ ID NO: 1125 - DNA, 5028 bp, Rattus norvegicus
  ref <308>: DATABASE ACCESSION NUMBER: Refseq / NM_012760
  ref <309>: DATABASE ENTRY DATE: 2003-01-14
gcctggcaggcgggagaacgctccggagttgtggccgtgggcaccgggctcgcggcaagaggagcggagagcgggcatctcctgagcgccgtcatggctgcttaggctgcgcctgccagcggaccgacggtgtcgcccgaatccggctcggataggtctggttggagtctgtgcctgcttgcttggcgtgtggttgttcctgcttgattggcacggtgccattggcttcgtatttgggaatcggaggagttaatcttgtctcttctcacaggttcgagtcctcagaccttctgcaggactccatccatatctgcctcgcagctgactctcctgctcacacagaagacggccatcctagatccccagctattgtgctgaccatccccttcctgctccggatctcgcctggctgctaggctgtggtgctgccttttcagagtcaggctgtagcgactccccgccttcgtcccggctgggcttaggtggaacagtggttcatctcatctcatcagcacttctgaagaagaaagtgtgagaagcagaggccatggctccttttcgctgtcaaaaatgcggcaagtccttcctcaccctggagaagttcaccatccacaattattcccacaccagggagcgcccattcaagtgctccaagactgagtgtggcaaagccttcgtctccaagtataagctgatgagacacatggctacgcactctccccagaagacgcaccagtgcactcattgtgaaaagactttcaaccggaaggatcatctgaagaatcacctccagacccacgatcccaacaagatgatctacgcctgcgaagattgtggcaagaaataccacaccatgctgggctacaagaggcacatggccctgcattcggccagcagcggcgatctcacctgcggcgtctgcaccctggagctggggagcaccgaggtcctgctggaccacctcaagtctcacgcggaagaaaaggcccaccacgcgcccagggagaagaaacaccagtgcgaccactgcgagagatgcttctacacccggaaggatgtgcgtcgccacctggtggtccacacaggatgcaaggacttcctgtgtcagttctgcgcccagagatttgggcgcaaagaccacctcactcgtcacaccaagaagacccactcccaggagctgatgcaagagagcctgcaagcaggagaataccagggcggttaccaacccattgcgcctccgttccagatcaaggctgatcccatgcctcctttccagttagaaatgccccccgagagcgggcttgatgggggcttgcctcctgagattcatggtctagtgcttgcttccccagaggaggttccccagcctatgctgtctatgccgccaatgcagccaatgccagagcagcctttcactctgcaccctggggtagttccctcctctcctcccccgatcattcttcaggagcataagtacagcccagttcctacctcttttgccccgttcgtaagcatgccgatgaaagcagatctcaagggcttttgcaacatgggtctctttgaggaatttcctctgcaagagtgtcagtcgcctgtcaagttcagtcagtgctttgagatggctaaggaagggtttgggaaagtcaccctgcccaaagagctgctggtagatgctgtaaatatagccattcctggctctctggagatttcctctctcttggggttctggcagctgccccctcctcctccccagaatggcttcatgaatggcaccatccctgtgggggccggggagccgctgccccataggataacttgtctggcacagcagcagccaccacctctgctacctccgccgccgccgctgccgctgccagagccgctgccacagccacagctgccgccacagtttcagttgcagctccagccccagccccagatgcagccccagatgcagctgcagcctctacagctgcagctgccccagctgctgccccagctgcagcccgagcctgagccagagccagagccagaggaagaagaggaagaagaagaagagatagaagaagaagaagagatcgaagaagaagaagaagccgaaccagaagcagaagaagaagaggaggcagaagacgaagaggaggcagaggaagaggaagaagagccacagccagaagaagcccaaatagcaatgagcgctgtgaatatgggccagcccccgctacccccgacccctcatgttttcacagctggcaccaacactgctatcctgccccatttccaccacgcgttcagataaattggttttttaagagggtgcttctcttctggaagatgtttcaaacaccagttccagttccagacatcagttacagtttgaagagaagcgttggaaaaacaggaatggggtttctagcttattgccatgagtagattgagaaaaagaactctcttaactgcatgcactgtgccaatacatatatatatatatatatatatatatatatgtatatatatatatatatatatcatccttagtattcatgctttgtaccaaacttagtgagtgcgggcgttctccgtaatcgaactgcaagtagtatcatattattaccctgatattgttagtctcatattattagccttgtattattctcatataatcaaaaccaagatccaaaacatgagctgctaatttgtaaatatcgtgttgagtgttagccgtcgtagtgatgttagctgcgtagttgcgtgttagcactgcctaggaagggcacgagggccaagttgggcttctcccacttggaagatgttttgaagagaagggggtgatctccgtagggcgtccgtaactaggccgtgtgttcttttcagggacccgtctaccttcaggattggatgtagtttagtcgctcttcttcttagctcgctttgtagtttgtccttctggtagcctactgtgtgtgtctgtgtgtagctttataggaaagttccgtgtgaagctgtcggtgtcttcgttttcaaaagtgaattttaaatgtatttttcaatatttttcatgtgatgttgtaccaatgtgaattatgacttcgtttatcttaaagacaaaactggttgtcagtcatatctgacaggaagaaagaaatccctgtgggtaggcaagtcaagtggccaactaatgagaagaagcatcaatcgaaagtgttggctgactgggacactcatgattctcacaggactttgagaaacgtactggaattaaaaaaaaaaaagcttaagtacattagataagaattttctttgcctagcttaacctactacttaagcctcttaagttctgaagtattgtgatcaaccaataggaaaatgtatctgtagttgatgaatttcagtccttgttactttgtatcccaagaggtttgtgttttgggaatgtaaccgtacttgtaatctcagttggtatcttgctaatcgatttgaaagtgtaaaacctaacccttgaagactctgtatttccttttttgagactgtatttcccagcatgtataccctaacctttggagactctgtattctgtttttgagactttccccccgccccccagcatatgtaccccgacccttgaagactgtatttcgtttttgagagcgtatttcccagcatatatacactaacccttgaagactctgtatttccttttttgagactgtatttcccagcatatatacactaacccttgaagactctgtatttccttttttgagactgtatttcccagcatatatacactaacctttgaagactctgtattctgtttttgagacccccccccagcatatgtaccctaacccttgaagactgtatttcgtttttgagaacgtatttcccagcatatatacactaacctttggaagactctgtatttcatttttgagactgtgtttcttagtatacataccctaacctttgaaagactccatttttgagacttccccccccccagcatttgtgccctaacccttggaggctttgtattttttttttgagacttttccgccagcatatatacactaacccttgaagactctgtatttcatttttgagacttttttccccagcatatataccgtaacccttgaagactctgtattccgtttttgagatttttttccctcagcatatataccccaacctttgaagactctgtatttcatttttgagactttttcccagcatatataccctaacctttgaagactctgtattccatttttgagattttttccctcagcatatataccctaacctttgaagactctgtatttcgtttttgagattttttcccccagcatataaacactaacctttgaagactctgtatttcatttttgagacttttttcccagcatatataccctaacccttgaagactctgtaatctgtttttttttttttttgagactttttcccccagcatatatacactaacctttgaagactctgtattccattttttgagacttttttccccagcatatataccctaacctttgaagactctgtatttcatttttgagactttttccccagcatatataccctaacctttgaagactctgtattccgtttttgagaccccccccccggcatgaataccctaatctttgaagactctggtatttcatttttgagatttttttcccctcagcatatatacactaacctttgtagactctgtattccgtttttgagactttccccccccagcatgtataccctaacctttgaagactctgtatttccagcatttgtaccctacccttgaagactctgtatttcccagcatttgtaccctaacccttgaagaccctgtatttcgtttgtaagacttttccccagcatatatatcctacatataataaacgctaagcatctagcaaaaaaaaaaaaaaaaaaaaaaaaaaaaaaaaaaaaaaaaaaaaaaaaaaaaaaaaaaaaaaaaaaaaaaaaaaaaaaaaaaaaaaaaaa

SEQ ID NO: 1126 - protein, 583 aa, Rattus norvegicus
  ref <308>: DATABASE ACCESSION NUMBER: Refseq / NP_036892
  ref <309>: DATABASE ENTRY DATE: 2003-01-14
MAPFRCQKCGKSFLTLEKFTIHNYSHTRERPFKCSKTECGKAFVSKYKLMRHMATHSPQKTHQCTHCEKTFNRKDHLKNHLQTHDPNKMIYACEDCGKKYHTMLGYKRHMALHSASSGDLTCGVCTLELGSTEVLLDHLKSHAEEKAHHAPREKKHQCDHCERCFYTRKDVRRHLVVHTGCKDFLCQFCAQRFGRKDHLTRHTKKTHSQELMQESLQAGEYQGGYQPIAPPFQIKADPMPPFQLEMPPESGLDGGLPPEIHGLVLASPEEVPQPMLSMPPMQPMPEQPFTLHPGVVPSSPPPIILQEHKYSPVPTSFAPFVSMPMKADLKGFCNMGLFEEFPLQECQSPVKFSQCFEMAKEGFGKVTLPKELLVDAVNIAIPGSLEISSLLGFWQLPPPPPQNGFMNGTIPVGAGEPLPHRITCLAQQQPPPLLPPPPPLPLPEPLPQPQLPPQFQLQLQPQPQMQPQMQLQPLQLQLPQLLPQLQPEPEPEPEPEEEEEEEEEIEEEEEIEEEEEAEPEAEEEEEAEDEEEAEEEEEEPQPEEAQIAMSAVNMGQPPLPPTPHVFTAGTNTAILPHFHHAFR

SEQ ID NO: 1127 - DNA, 3249 bp, Homo sapiens
  ref <308>: DATABASE ACCESSION NUMBER: Refseq / NM_006718
  ref <309>: DATABASE ENTRY DATE: 2003-01-24
ggggattgtggaagggtaggggaaggagatttctctctccccaggccactagataaaaggccatgtttgtccacattgggaggctgatgggaagaaaggatgccagaccagttggcctgtccctggggcttgtctcaggacctccaggaagtgtttctgaactgcaggctctcgtgtgtgtctcccatttgtcaaaactttgacctgatcttttcagaatccaccttgtgaggccccagccttggaagccactgcccattgccagaacacggggagtagagcagtgagcactgagtgggcctgaggctgcctttcttccctggcacacgtcctgaggaggggaggttgtggcggcaccaggcagaagctatgccactgctgcgctgggtctccctccccagaagccctcattcttgatttgctcaagctgttcctgcttatcaacaaacaccttaatttatcaaacacagcaaagctagtgacagctgagaggtccatgtctgggtagaaccaggcccacgatgctgcctctcccgtgttctggagttcagctgcagggattctgctgatgtgcccagcaccatcgttctgtttgtgcttaaatggcacagcatttggtcagcacatctgaaaaggaaggtgtgagaagcaaagcccatggccacgttcccctgccagttatgtggcaagacgttcctcaccctggagaagttcacgattcacaattattcccactccagggagcggccgtacaagtgtgtgcagcctgactgtggcaaagcctttgtttccagatataaattgatgaggcatatggctacccattctccccagaaatctcaccagtgtgctcactgtgagaagacgttcaaccggaaagaccacctgaaaaaccacttccagacccacgaccccaacaaaatggcctttgggtgtgaggagtgtgggaagaagtacaacaccatgctgggctataagaggcacctggccctccatgcggccagcagtggggacctcacctgtggggtctgtgccctggagctagggagcaccgaggtgctactggaccacctcaaagcccatgcggaagagaagccccctagcggaaccaaggaaaagaagcaccagtgcgaccactgtgaaagatgcttctacacccggaaggatgtgcgacgccacctggtggtccacacaggatgcaaggacttcctgtgccagttctgtgcccagagatttgggcgcaaggatcacctcacccggcataccaagaagacccactcacaggagctgatgaaagagagcttgcagaccggagaccttctgagcaccttccacaccatctcgccttcattccaactgaaggctgctgccttgcctcctttccctttaggagcttctgcccagaacgggcttgcaagtagcttgccagctgaggtccatagcctcaccctcagtcccccagaacaagccgcccagcctatgcagccgctgccagagtccctggcctccctccacccctcggtatcccctggctctcctccgccaccccttcccaatcacaagtacaacaccacttctacctcatactccccacttgcaagcctgcccctcaaagcagatactaaaggtttttgcaatatcagtttgtttgaggacttgcctctgcaagagcctcagtcacctcaaaagctcaacccaggttttgatctggctaagggaaatgctggtaaagtaaacctgcccaaggagctgcctgcagatgctgtgaacctaacaatacctgcctctctggacctgtcccccctgttgggcttctggcagctgccccctcctgctacccaaaatacctttgggaatagcactcttgccctggggcctggggaatctttgccccacaggttaagctgtctggggcagcagcagcaagaacccccacttgccatgggcactgtgagcctgggccagctccccctgccccccatccctcatgtgttctcagctggcactggctctgccatcctgcctcatttccatcatgcattcagataattgatttttaaagggtatttttcgtattctggaagatgttttaagaagcattttaaatgtcagttacaatatgagaaagatttggaaaacgagactgggactatggcttattcagtgatgactggcttgagatgataagagaattctcgaactgcatgtattgtgccaatctgtcctgagtgttcatgctttgtaccaaatttaatgaacgcgtgttctgtaatcaaactgcaaatattgtcataaccaacatccaaaatgacggctgctatatataagtgtttgtcatatggaatttaatcgtaagccatgatcataatgttaactaaataactttatgtggcactgcctagtaagggaactatggaaaggtttggatttctccaaatctgggagaattttcaaaataagaaaataacctttatatgatatactatgactaggctgtgtatttcttttcagggatttttctaccttcagggttggatgtagtttagttactattaccatagccaacctgtagttttacatatacattttcttgtggagcaatagagttctccattttacagaagcattttaaatgtagtttgaatattttccacaagatgctgcaatgtgagttatcacttcatttatcttaaagaaagactaaactggttgtcagttacatctgacagaaaaaaaaaaaaaaatcactgtgtaaccagggttaagtggttaaaataatccagggcgtcagtcaaaggcattttgctgactttaatattgattatatttttaacagggaatttaaggaaaatattaccggggaattaaaaaatatatatatattaaaacaagaattttcctttgcccctgtccagcctaaacctacctacctcaaggctgcctaagttcctaagtattgtttgtaatcacccaataaataagtgcatttgtaattcatcagtcattattagcttttattaaaagaagattacgttttacaatgtaactataatctcttgaatttggtatcttattaatgagttttaaagatgtaaaacctaaccttttttaaagctccattgtcttatgtttttagaggcttttccgtaaacatatatcttacatataataaacttttcaaatcttgcaaaaaaaaaaaaaaaaaaaaaaaaaaaaaaaaaaaaaaaaaaaaaaaaaaaaaaaaaaaaa

SEQ ID NO: 1128 - protein, 463 aa, Homo sapiens [sequence omitted]

SEQ ID NO: 1129 - DNA, 3974 bp, Rattus norvegicus; identical to SEQ ID NO: 840
  ref <308>: DATABASE ACCESSION NUMBER: EMBL / L38482
  ref <309>: DATABASE ENTRY DATE: 2000-03-04

SEQ ID NO: 1130 - protein, 134 aa, Rattus norvegicus; identical to SEQ ID NO: 841
  misc_feature (1)..(134): Xaa=Unknown amino acid

SEQ ID NO: 1131 - DNA, 2400 bp, Rattus norvegicus; identical to SEQ ID NO: 1100
  ref <308>: DATABASE ACCESSION NUMBER: Refseq / NM_012736
  ref <309>: DATABASE ENTRY DATE: 2002-11-14

SEQ ID NO: 1132 - protein, 727 aa, Rattus norvegicus; identical to SEQ ID NO: 1101
  ref <308>: DATABASE ACCESSION NUMBER: Refseq / NP_036868
  ref <309>: DATABASE ENTRY DATE: 2002-11-14

SEQ ID NO: 1133 - DNA, 2460 bp, Rattus norvegicus
  ref <308>: DATABASE ACCESSION NUMBER: Refseq / NM_012998
  ref <309>: DATABASE ENTRY DATE: 2003-01-14
ccccggcgccaacctagctgccccgcccgctgccgacgtccgacatgctgagccgtgctttgctgtgcctggccctggcctgggcggctagggtgggcgccgacgctctggaggaggaggacaacgtcctggtgctgaagaagagcaacttcgcagagccggcggcgcacaactacctgctggtggagttctatgccccatggtgtggccactgcaaagcactggccccagagtatgccaaagctgctgcaaaactgaaggcagaaggctctgagatccgactagcaaaggtggacgccacagaagagtctgacctggcccagcagtatggtgtccgtggctaccccacaatcaagttcttcaagaatggagacacagcctccccaaaggaatatacagctggcagggaagctgacgacattgtgaactggctgaagaaacgcacaggcccagcagccacaaccctgtctgacactgcagctgcagagtccttggtggactcaagcgaagtgacggtcatcggcttcttcaaggacgcagggtcagactccgccaagcagttcttgctggcagcagaggctgttgatgacataccttttggaatcacttccaatagcgatgtgttttccaagtaccagctggacaaggatggggtggtcctctttaagaagtttgatgaaggccgcaacaattttgaaggtgagatcaccaaggagaagctattagacttcatcaagcacaaccagctgcctttggtcatcgagttcactgaacagacagctccaaagattttcggaggtgaaatcaagacacatattctgctgttcctgcccaagagtgtgtctgactacgatggcaaattgagcaactttaagaaagcggccgagggctttaagggcaagatcctgttcatcttcatcgatagtgaccacactgacaaccagcgcatacttgagttctttggcctgaagaaggaggaatgtccagctgtgcggcttattaccctggaggaagagatgaccaagtacaaaccggagtcagacgagctgacagctgagaagatcacacaattttgccaccacttcctggagggcaagatcaagccccacctgatgagccaggaactgcctgaagactgggacaagcagccagtgaaagtgctagttgggaaaaactttgaggaggttgcttttgatgagaaaaagaacgtgtttgttgaattctatgctccctggtgtggtcactgcaagcagctagccccgatttgggataaactgggagagacatacaaagaccatgagaatatcgtcatcgctaagatggactcaacagccaatgaggtggaagctgtgaaggtgcacagctttcccacactcaagttcttcccagcaagtgcagacagaacggtcattgattacaacggtgagcggacactagatggttttaagaaattcttggagagcggtggccaggatggagcgggggacaatgacgacctcgacctagaagaagctttagagccagatatggaagaagacgacgatcagaaagccgtgaaggatgaactgtagtgcagaagccagatctgggcgcctgaacccaaaacctcggtgggccatgtcccagcagcccacatctccggagcctgagcctcaccccaggagggagcgccatcagaacccagggaatctttctgaagccacactcatctgacacacgtacacttaaacctgtctcttctttttttgcttttcaattttggaaagggatctctgtccaggccagcccatcttgaagggctacgttttgttttaattggtggtgtacttttttgtacgtggattttgtcccaagtgcttgctaccatatttggggatttcacactggtaatgtctttcctgttagagaggtttatgctatcacttcagatttcgtctgtgagatgtttcatcttcctgacatgtctccatgtcgaggtacttgttccaccacgcagacctccctgagaccccttcctgccctgcgcaggaggcgatggttctgggtcgtatgctctctctctctccaccttgtactagtgttgccatgacagcatggcttttgtagtttgcatttaacctggggatttctgcatcctgtcagagggtgggtccccacgtgtggaaaagagacagtggtggcttgctgccaggctcaggccaggcctggacagctctcactcttcttaagccagaactaccgaccagccggccggctgtgggcacattactctggctgctggatcctcttccagcatggcatgtggcctgtgtgaggcagaaccgggacccttgattcccagactgggagtcagctaaggacactggggctgaatgaaatgcccattctcaaggtctatttctaaaccataatgttggaattgaacacattggctaaataaagttgaaattttactaccat

SEQ ID NO: 1134 - protein, 508 aa, Rattus norvegicus
  ref <308>: DATABASE ACCESSION NUMBER: Refseq / NP_037130
  ref <309>: DATABASE ENTRY DATE: 2003-01-14
MLSRALLCLALAWAARVGADALEEEDNVLVLKKSNFAEPAAHNYLLVEFYAPWCGHCKALAPEYAKAAAKLKAEGSEIRLAKVDATEESDLAQQYGVRGYPTIKFFKNGDTASPKEYTAGREADDIVNWLKKRTGPAATTLSDTAAAESLVDSSEVTVIGFFKDAGSDSAKQFLLAAEAVDDIPFGITSNSDVFSKYQLDKDGVVLFKKFDEGRNNFEGEITKEKLLDFIKHNQLPLVIEFTEQTAPKIFGGEIKTHILLFLPKSVSDYDGKLSNFKKAAEGFKGKILFIFIDSDHTDNQRILEFFGLKKEECPAVRLITLEEEMTKYKPESDELTAEKITQFCHHFLEGKIKPHLMSQELPEDWDKQPVKVLVGKNFEEVAFDEKKNVFVEFYAPWCGHCKQLAPIWDKLGETYKDHENIVIAKMDSTANEVEAVKVHSFPTLKFFPASADRTVIDYNGERTLDGFKKFLESGGQDGAGDNDDLDLEEALEPDMEEDDDQKAVKDEL

SEQ ID NO: 1135 - DNA, 487 bp, Rattus norvegicus
  ref <308>: DATABASE ACCESSION NUMBER: EMBL / AA874889
  ref <309>: DATABASE ENTRY DATE: 2000-03-03
gggtttccgcagtggctcctgaagtgggactctaagactgagaccgaggtgctcctggcatctaggtgaatggtgcctcatagagtgtcctcagctcctcctgccaaagatgctcatccccgtgggcatactcttgctggtcactgttagcccgcacatagaaatgggaagcccgggaaccaagttgtagctatgctgtgtgacttcaggcacataaccgctttctctgggcttaagtgtccttttatcctgggatgctccacgaggccccttaggttcccacactcctctgggactctagtagaggtcgggtgtgtgggagcttggatgtcaggctgtgaacatggctgtgtgtctgtgggttctgatccactggggatagtcccagccccacccgttcattctgtaaacaacttgtaaataacctttagcattcctcttgtaacaaaattaatttttatgaaataaattatatttcctagtctat

SEQ ID NO: 1136 - DNA, 695 bp, Rattus norvegicus
  ref <308>: DATABASE ACCESSION NUMBER: Refseq / NM_012733
  ref <309>: DATABASE ENTRY DATE: 2003-01-14
ccttcacccggagcgcattggcagccacagtcccagcggacgccacagccgctcccgccttctccgtgtcggcgatccccagtctgtccccaaaatgcctgtggacttcaacgggtactggaagatgctgagcaacgagaatttcgaggagtacctgcgtgcgctcgatgtcaacgtggccttgcgaaaaatcgccaacttgctgaagccggacaaagagatcgtgcaggatggcgaccacatgatcatccgcacgctgagcacttttcgaaactatatcatggacttccaagttgggaaggagttcgaggaggatctgacaggcatagatgaccgcaagtgcatgaccacagtgagctgggatggtgacaagcttcagtgtgttcagaagggagagaaggagggacgtggctggacccagtggattgagggtgatgaacttcacctggagatgagagcagagggtgtgacctgcaagcaagtgttcaagaaagtacactgagcggcccgagcagataaccttggtctcgaggaacaagtgggatggcccaatggtcaggagccctctctgcctagcacagggctgaaacacatagccaccccaggtttctgccagcagagtctgtctcattgccttgtctcttttccttttcttaaaatgaagctaccccaataaaaatgatctctgtttaaga

SEQ ID NO: 1137 - protein, 135 aa, Rattus norvegicus
  ref <308>: DATABASE ACCESSION NUMBER: Refseq / NP_036865
  ref <309>: DATABASE ENTRY DATE: 2003-01-14
MPVDFNGYWKMLSNENFEEYLRALDVNVALRKIANLLKPDKEIVQDGDHMIIRTLSTFRNYIMDFQVGKEFEEDLTGIDDRKCMTTVSWDGDKLQCVQKGEKEGRGWTQWIEGDELHLEMRAEGVTCKQVFKKVH

SEQ ID NO: 1138 - DNA, 7204 bp, Rattus norvegicus
  ref <308>: DATABASE ACCESSION NUMBER: EMBL / L14323
  ref <309>: DATABASE ENTRY DATE: 1999-04-29
cgcaaagttgggcagggagctgggggaggaggaccgcgagcgagggtggcggagcaggggcgggaggagcggagggaggaggggaccggagcgtgtcactcgcgcgctccctctgtgcacagaggatgtgctgaatggtgcgcttccaggcggcggccgagcaggatcaggcggcgggcggctcgcactgccgggctctgctccttcttgtctcccgaggctctacaatcaccgcgggctccagaccctgcgtcccgcccggggcatggcaggctgctgtgccttgcggtgtagtcccgcttactaagcggcgcgggccagaggtgcggaggccaagaggccgggaggtcggcgggcagcggaggcaagagcctgctgaaccgagagccaagcccgcttgcgcccggagctccgtgtcccgtctccactgcgctcgcccgggccgcccggagccccgatgagcccagatggctggggctcagcccggagtgcacgccttgcaactcaagcccgtgtgcgtgtccgacagcctcaagaagggcaccaaattcgtcaagtgggatgatgactccactatagttactccaattattttgaggaccgatcctcagggatttttcttttactggacagatcagaataaggagacggagctgttagatctcagcctcgtcaaggatgccaggtgtgggaagcacgccaaagctcccaaggaccccaagttacgtgaacttctggatgttgggaacatcggacacttggaacagcgcatgataactgtggtgtatgggccagacctggtgaatatctcccacctgaatcttgtggcttttcaagaggaagtggccaaggaatggacaaatgaggttttcagtttggcaacaaacctgctggctcagaacatgtccagggacgcatttctggagaaagcatatactaagctcaagcttcaggtgaccccagaagggcgcattcctcttaaaaacatctatcgactgttttcggcagaccggaagcgagtggaaactgcgctagaggcttgtagtcttccatcgtcaaggaacgattccatccctcaagaggactttactccagatgtatacagagttttcctgaacaatctttgtccccgacctgaaattgataacatcttctctgaatttggtgccaaaagcaaaccgtaccttactgttgatcagatgatggattttatcaaccttaagcagagagatccccggctgaatgaaatactttacccacctctgaagcaagagcaggtccaagtgttgattgagaagtacgagcccaacagcagcctcgccaagaaagggcagatgtcagtggatggattcatgcgctacctgagcggagaagaaaatggagtcgtttcacctgagaaactggatttgaacgaagacatgtctcagcccctgtctcactatttcatcaattcctcacacaacacctacctcacagctggccagttggctgggaactcgtctgtagagatgtatcgccaggtgcttctgtctggatgtcgctgtgtggagctggactgctggaagggcaggaccgctgaggaagagcctgtcatcacccatggattcaccatgacaacagaaatatccttcaaggaagtcatagaagccatcgcagagtgtgcgttcaagacttctccttttcccatcctcctttcctttgagaaccatgtggattccccgaagcaacaagccaagatggccgagtattgccgattaatctttggtgatgccctccttatggagccactggaaaaatacccactggaatctggggtacctcttccaagccctatggatttaatgtataaaatcttggtgaaaaacaagaagaagtcacacaagtcgtcagagggaagtggtaaaaagaagctctctgagcaagcttccaacacgtacagcgactcttccagcgtgttcgagccttcgtctccgggagctggggaagcagatacggagagtgatgacgatgacgacgatgatgactgtaaaaagtcttccatggatgaggggactgctggcagcgaggccatggccacagaagagatgtctaacctggtgaactatattcagcctgtcaagtttgagtcctttgaaacttcaaaaaaaagaaataaaagctttgaaatgtcttccttcgtggaaaccaaaggactcgaacaactcacgaagtctccagttgaatttgtcgaatacaacaagatgcagcttagcaggatatatcccaaaggaacacgcgtggactcatccaactacatgcctcagctcttctggaatgctggctgtcagatggtggcgctcaacttccagacagtggatctagctatgcagataaacatgggcatgtacgaatacaatgggaagagtggctacaggctgaagccagagttcatgaggaggccagacaagcattttgatccatttactgaaggaatcgtagatgggatagtggccaacactttatctgttaagattatttcaggtcagtttctctctgataagaaagttgggacttatgtggaagtggatatgtttggtttgcctgtggacacaagaaggaaggcatttaaaaccaagacatcccaaggaaatgctgtaaatcctgtctgggaagaagagccaattgtattcaaaaaggtagttctgccttctctggcctgtttaaggatagcagcatatgaggaaggaggcaaatttattggccaccggatcttgcctgtgcaagcaattcggccaggctatcactacatctgcctgcggaatgagaggaaccagcccctgatgctgccagctgtctttgtctacatagaagtcaaagactatgtcccagacacgtatgcagatgtaattgaagcattatcaaacccaatccgatatgtcaatctgatggaacagagagctaagcagttggctgcattgacactggaggatgaagaggaagtcaagaaggaggctgaccccggggaaacgtcatccgaggctccaagtgaaaccaggacaactccagcagagaatggggtgaatcacaccgcaacccttgcacccaagccaccttcccaggctccacacagccagcctgctccagggtctgtgaaggcacccgccaaaacagaggatctgattcagagcgtgttaacagaagtagaggcgcagaccattgaagagctcaagcaacagaaatcgttcgtgaaacttcaaaagaagcactacaaagaaatgaaagacctggtcaagagacaccacaagaaaaccaccgagctcatcaaggagcataccaccaagtacaatgagattcagaatgactacttgagaaggagggcagccttggaaaagtccgccaaaaaggatagcaagaagaaatctgaacccagcagcccagatcatggctcatccgccattgagcaagacctcgcggccctggatgcagaaatgactcagaagttgatagacttgaaagacaagcaacaacagcagctgcttaatcttcggcaagagcagtattacagtgagaagtaccagaagcgggagcacattaaattgctcattcagaagttgacagatgttgctgaagagtgtcagaacaatcagttgaagaagctgaaggaaatctgcgagaaagagaagaaggaattaaagaagaaaatggataagaagaggcaggagaagataacagaagccaagtccaaagacaaaagccagatggaagaggagaagacagagatgatccgatcatacatccaggaggtggtgcagtacatcaagaggttagaggaagcacaaagtaaaagacaagaaaaacttgtggaaaaacacaaggagatccgccagcagatcctggatgagaagcccaagggggaaggctcctcctcagtcttgtcggaaagttgccatgaggatccctctgttccccccaactttactccccccaaccctcaagctctcaagtggtgagcaccgtccttctagccagctgcagatggagctggagcaagaataccaagacaagttcaaaagactgcccctggagattctggagtttgtacaggaagccatgaaagggaaggttagtgaggacagcaatcacggctctgcccctccctcgctggcctcagaccctgctaaggtgaacctcaagtctccctccagtgaggaggtacaaggagagaacgcgggaagagagtttgatactcctctgtgatgtccctgccgggcctaccagacatgcacggctgcttgaactccatcggactctaaagacaaagatcactgcccgggccatcttcctgagaaacatcccttagcctgaaatccacaccaaagggagagttccagaaggatccgtgtgaaggtcccatacccttgtcccttgtgtcatgtggaaactattgtggtcttagagagaagggtgcatgtatgcaggatttttcttttcgttccaatagtaaattaaaagcaggcagctccaggctccatggactatgtaatgaaggacaatgtcttctttgaagaaaactagagctcgtgtcttcgtttgaagccctggtgtacagtatttccaagtaaaagagagagtttgagaagtgcgcggcaccatttaacactctggaacattccactctgagcattgtttccctgactgccccgcaaacccatgttttcaagttaacgtgtatagtgcattgtttcaccctttgctttgcaggcactggtggcttgccatttgctaatttatttatcccagaggcatctgtatttgctattgacatggctttattagataccatagtgactcatataagctggtttcttttataaaaaaaaatcacatgactgtatcatttcccagtgaagccattttacgattagcaatatgggttgtatatttggctgcacgtctttggatatctatcggttgttgacctgaggctatcaaacagctgcaatgggtttgttctgttgagtcagggtttccgccagactgaacaggatccagtgggctattttattgtcagatattttttcgtggttcatttatttttactgtagaaaggaagatagaatatttatctaaatgcacatgtataaatgatatacattatctccatgtatatagtacatgtatgcacccagccatataagtgcacacacatacatacgcatgagtgtacatgtgtgtttattaattggcagtgacccaaatctcttccataagatttaaaagcaagttcagggatacatggacagagaagaaatgggtcgaatatatgttatgtggataattaaattatacggaaatgctaagaatcagtttatggagtcaatgatgcaacttgaggtaatcttagaatttagaaaatgagtttactaaaaaaattggaggatcaaaaattggattttaagtatcagattttgagcttgttttaatggtcagtgtatgcaaaaatgcataggaaatagagtgcaaatgtattactactatcttcaataaattttaactgaataatttcaattttatactgatagaaataaagctctggttgtattttagtttgtatatttacttcacttagttatgtcttttttaattcttattttattctaaagtgaataagagaaacaaattatatcatgctaacgctaataaaatcataattaaaaggtcttaagaaataatattatatagaaaaaatatggtttagagagtgggacaaagaacattaaaacccagcaatgacaatgcccatggcttcattttattttaaagtgaacctgtctgcttataatttagcaaagcaaaaaacagttgtgtcctgaagtttgtgtttcaagaatttagtatttttctggaaataattttatttaactttaagcaataactaggaccataattaagtgttaatcaaaatgaaggcttgtttcaaacaccatgaaagtgtttgatcacacacatacaccacacacacacacacacacacacacacacacacacacacacacacacacctattgagacacaaggggaaaaaaatcacatccccttcagagatgattgtattttatctgaaggatcaagagtgttaattagtcacttactaaagcttaccttccactgaagagagatctcttgtgaaccatacaacttttgcactttgaaggaaaggcattactcagaaggaagtgaggacagtccaaatggaatgctgcattttacacacacagttacagactgttgaaaattggggaagagtgaatggataacaggattcgaaaccaaacttagtggtggttgttgcggaacattggatttcaacatactccatacagcgactgaggttgaataaccttgactttcaaatcctgttttggtagttggacttcattatcttggtgattctagtcattttacaatgttttgtatttggtcatttactgtaatcacatttttatatctgtacagtgacactttttgcagttgtggggtagtgtgtaacactgtgcatcttgcatcatcgaaactactaccgtgatactatccattgataatattaatattacttgaaaaatgacaaaggtaaagaaaaggggtctgtatgatgtgcagttttgtgcctttatgtatttgccttgttcttcgttgaatgtgtgaaattctgtactgtggtttttccaatagtagaaagtagagtcatgcattaaattagactgtatccctgacacctttaaactactgagaataacgtggttggccgtgtaattcagtgttcaaagttctaatgacatgccatgtgctttggtttttaacatttcatgaccaccatacattaattaatactcctgtaatagataagcagtcattaattaagttccaaaagaaagggccattgcttgcattcctttgaatttaatgttgcccttgtacactgtgttaatactgtatgtaatggattgaacattgtgattctcgccttttaagaagagaaagagagagaaggaaaagtatttgatgctcttaaaatgtacatatttgggttcttctatctcaaattatttaaaatgcataattcacatttttttgtaatcattctatgcaattttgtggcatgacgtttcttccacttgtaattttctgtgctttcatcacaagtccaaaggaaacaataaaaatt

SEQ ID NO: 1139 - DNA, 3663 bp, Homo sapiens
  ref <308>: DATABASE ACCESSION NUMBER: Refseq / NM_015192
  ref <309>: DATABASE ENTRY DATE: 2002-11-05
cagatggccggggctcaacccggagtgcacgccttgcaactcaagcccgtgtgcgtgtccgacagcctcaagaagggcaccaaattcgtcaagtgggatgatgattcaactattgttactccaattattttgaggactgaccctcagggatttttcttttactggacagatcaaaacaaggagacagagctactggatctcagccttgtcaaagatgccagatgtgggagacacgccaaagctcccaaggaccccaaattacgtgaacttttggatgtggggaacatcgggcgcctggagcagcgcatgatcacagtggtgtatgggcctgacctcgtgaacatctcccatttgaatctcgtggctttccaagaagaagtggccaaggaatggacaaatgaggttttcagtttggcaacaaacctgctggcccaaaacatgtccagggatgcatttctggaaaaagcctatactaaacttaagctgcaagtcactccagaagggcgtattcctctcaaaaacatatatcgcttgttttcagcagatcggaagcgagttgaaactgctttagaggcttgtagtcttccatcttcaaggaatgattcaatacctcaagaagatttcactccagaagtgtacagagttttcctcaacaacctttgccctcgacctgaaattgataacatcttttcagaatttggtgcaaaaagcaaaccatatcttaccgttgatcagatgatggattttatcaaccttaagcagcgagatcctcggcttaatgaaatactttatccacctctaaaacaagagcaagtccaagtattgattgagaagtatgaacccaacaacagcctcgccagaaaaggacaaatatcagtggatgggttcatgcgctatctgagtggagaagaaaacggagtcgtttcacctgagaaactggatttgaatgaagacatgtctcagcccctttctcactatttcattaattcctcgcacaacacctacctcacagctggccaactggctggaaactcctctgttgagatgtatcgccaagtgctcctgtctggttgtcgctgtgtggagctggactgctggaagggacggactgcagaagaggaacctgtcatcacccatggcttcaccatgacaactgaaatatctttcaaggaagtgatagaagcaattgcggagtgtgcatttaagacttcaccttttccaattctcctttcgtttgagaaccatgtggattccccaaagcagcaagccaagatggcggagtactgccgactgatctttggggatgcccttctcatggagcccctggaaaaatatccactggaatctggagttcctcttccaagccctatggatttaatgtataaaattttggtgaaaaataagaagaaatcacacaagtcatcagaaggaagcggcaaaaagaagctctcagaacaagcctccaacacctacagtgactcctccagcatgttcgagccctcatccccaggagccggagaagctgatacggaaagtgacgacgacgatgatgatgatgactgtaaaaaatcttcaatggatgaggggactgctggaagtgaggctatggccacagaagaaatgtctaatctggtgaactatattcagccagtcaagtttgagtcatttgaaatttcaaaaaaaagaaataaaagttttgaaatgtcttccttcgtggaaaccaaaggacttgaacaactcaccaagtctccagtggaatttgtagaatataacaaaatgcagcttagcaggatatatccaaaaggaacacgtgtggattcatccaactatatgcctcagctcttctggaatgcaggttgtcagatggtggcacttaatttccagacaatggacctggctatgcaaataaatatggggatgtatgaatacaacgggaagagtggctacagattgaagccagagttcatgaggaggcctgacaagcattttgatccatttactgaaggcatcgtagatgggatagtggcaaacactttgtctgttaagattatttcaggtcagtttctttctgataagaaagttgggacttacgtggaagtagatatgtttggtttgcctgtggatacaaggaggaaggcatttaagaccaaaacatcccaaggaaatgctgtgaatcctgtctgggaagaagaacctattgtgttcaaaaaggtggttcttcctactctggcctgtttgagaatagcagtttatgaagaaggaggtaaattcattggccaccgtatcttgccagtgcaagccattcggccaggctatcactatatctgtctaaggaatgaaaggaaccagcctctgacgctgcctgctgtctttgtctacatagaagtgaaagactatgtgccagacacatatgcagatgtcatcgaagctttatcaaacccaatccgatatgtgaacctgatggaacagagagctaagcaattggctgctttgacactggaagatgaagaagaagtaaagaaagaggctgatcctggagaaacaccatcagaggctccaagtgaagcgagaacgactccagcagaaaatggggtgaatcacactacaaccctgacacccaagccaccctcccaggctctccacagccagccagctccaggttctgtaaaggcacctgccaaaacagaagatcttattcagagtgtcttaacagaagtggaagcacagaccatcgaagaactaaagcaacagaaatcgtttgtgaaacttcaaaagaaacactacaaagaaatgaaagacctggttaagagacaccacaagaaaaccactgaccttatcaaagaacacactaccaagtataatgaaattcagaatgactacttgagaaggagagccgctttggaaaagtccgccaaaaaggacagtaagaaaaaatcggaacccagcagccctgatcatggttcatcaacgattgagcaagacctcgctgctctggatgctgaaatgacccaaaagttaatagacttgaaggacaaacaacagcagcagctgcttaatcttcggcaagaacagtattatagtgaaaaataccagaagcgagaacatattaaactgcttattcaaaagttgacggatgtcgcagaagagtgtcagaacaatcagttaaagaagctcaaagaaatctgtgagaaagaaaagaaagaattaaagaagaaaatggataaaaagaggcaggagaagataacagaagctaaatccaaagacaaaagtcagatggaagaggagaagacagagatgatccggtcatatatccaggaagtggtgcagtatatcaagaggctagaagaagcgcaaagtaaacggcaagaaaaactcgtagagaaacacaaggaaatacgtcagcagatcctggatgaaaagcccaagctgcaggtggagctggagcaagaataccaagacaaattcaaaagactgcccctcgagattttggaattcgtgcaggaagccatgaaaggaaagatcagtgaagacagcaatcacggttctgcccctctctccctgtcctcagaccctggaaaagtgaaccacaagactccctccagtgaggagctgggaggagacatcccaggaaaagaatttgatactcctctgtgaatgctcctg

SEQ ID NO: 1140 - protein, 1216 aa, Homo sapiens
  ref <308>: DATABASE ACCESSION NUMBER: Refseq / NP_056007
  ref <309>: DATABASE ENTRY DATE: 2002-11-05
MAGAQPGVHALQLKPVCVSDSLKKGTKFVKWDDDSTIVTPIILRTDPQGFFFYWTDQNKETELLDLSLVKDARCGRHAKAPKDPKLRELLDVGNIGRLEQRMITVVYGPDLVNISHLNLVAFQEEVAKEWTNEVFSLATNLLAQNMSRDAFLEKAYTKLKLQVTPEGRIPLKNIYRLFSADRKRVETALEACSLPSSRNDSIPQEDFTPEVYRVFLNNLCPRPEIDNIFSEFGAKSKPYLTVDQMMDFINLKQRDPRLNEILYPPLKQEQVQVLIEKYEPNNSLARKGQISVDGFMRYLSGEENGVVSPEKLDLNEDMSQPLSHYFINSSHNTYLTAGQLAGNSSVEMYRQVLLSGCRCVELDCWKGRTAEEEPVITHGFTMTTEISFKEVIEAIAECAFKTSPFPILLSFENHVDSPKQQAKMAEYCRLIFGDALLMEPLEKYPLESGVPLPSPMDLMYKILVKNKKKSHKSSEGSGKKKLSEQASNTYSDSSSMFEPSSPGAGEADTESDDDDDDDDCKKSSMDEGTAGSEAMATEEMSNLVNYIQPVKFESFEISKKRNKSFEMSSFVETKGLEQLTKSPVEFVEYNKMQLSRIYPKGTRVDSSNYMPQLFWNAGCQMVALNFQTMDLAMQINMGMYEYNGKSGYRLKPEFMRRPDKHFDPFTEGIVDGIVANTLSVKIISGQFLSDKKVGTYVEVDMFGLPVDTRRKAFKTKTSQGNAVNPVWEEEPIVFKKVVLPTLACLRIAVYEEGGKFIGHRILPVQAIRPGYHYICLRNERNQPLTLPAVFVYIEVKDYVPDTYADVIEALSNPIRYVNLMEQRAKQLAALTLEDEEEVKKEADPGETPSEAPSEARTTPAENGVNHTTTLTPKPPSQALHSQPAPGSVKAPAKTEDLIQSVLTEVEAQTIEELKQQKSFVKLQKKHYKEMKDLVKRHHKKTTDLIKEHTTKYNEIQNDYLRRRAALEKSAKKDSKKKSEPSSPDHGSSTIEQDLAALDAEMTQKLIDLKDKQQQQLLNLRQEQYYSEKYQKREHIKLLIQKLTDVAEECQNNQLKKLKEICEKEKKELKKKMDKKRQEKITEAKSKDKSQMEEEKTEMIRSYIQEVVQYIKRLEEAQSKRQEKLVEKHKEIRQQILDEKPKLQVELEQEYQDKFKRLPLEILEFVQEAMKGKISEDSNHGSAPLSLSSDPGKVNHKTPSSEELGGDIPGKEFDTPL

SEQ ID NO: 1141 - DNA, 622 bp, Rattus norvegicus
  ref <308>: DATABASE ACCESSION NUMBER: EMBL / AI105137
  ref <309>: DATABASE ENTRY DATE: 2000-03-03
cccatgagcgtccccaaggatttctttggtgaatatgttaagaaaggaacggtaaatgccatgcgcttcctcaccgcggtgagcatggagcaaccagagatgctggagaaggtgtccagagagctgtggatgcgcatttggtcccgagatgaagatatcacggagtcccagaacattttgtctgcagcagagaaggccggaatggccacagcgcaagcccaacaccttctgaataagatctccaccgaactggtgaagagcaagctcagggagaccactggggcagcctgcaaatatggggcctttgggctgcccaccactgttgcccacgtggatggtaaaacctacatgctatttgggtctgaccgcatggagttgctagcttacctgctaggagagaagtggatgggccctgtgcccccaaccctgaatgccagactttaagattgccttagaaagtaaactttgacatctccatctgatgaagctgtcttctgtggccctgggggttgaaacaagagtccacctttagctgtggctgcctttacgtctgtgcctcccaagtgcctcttgaaaaaccttaagctctgcattcccataaataaacccgatgccactagac

SEQ ID NO: 1142 - DNA, 1017 bp, Homo sapiens
  ref <308>: DATABASE ACCESSION NUMBER: Refseq / NM_015917
  ref <309>: DATABASE ENTRY DATE: 2002-12-23
gaaaaggagctcctgctgccactgctcttccggagcctgcagcatggggcccctgccgcgcaccgtggagctcttctatgacgtgctgtccccctactcctggctgggcttcgagatcctgtgccggtatcagaatatctggaacatcaacctgcagttgcggcccagcctcataacagggatcatgaaagacagtggaaacaagcctccaggtctgcttccccgcaaaggactatacatggcaaatgacttaaagctcctgagacaccatctccagattcccatccacttccccaaggatttcttgtctgtgatgcttgaaaaaggaagtttgtctgccatgcgtttcctcaccgccgtgaacttggagcatccagagatgctggagaaagcgtcccgggagctgtggatgcgcgtctggtcaaggaatgaagacatcaccgagccgcagagcatcctggcggctgcagagaaggctggtatgtctgcagaacaagcccagggacttctggaaaagatcgcaacgccaaaggtgaagaaccagctcaaggagaccactgaggcagcctgcagatacggagcctttgggttgcccatcaccgtggcccatgtggatggccaaacccacatgttatttggctctgaccggatggagctgctggcgcacctgctgggagagaagtggatgggccctatacctccagccgtgaatgccagactttaagattgcccggaggaagcaaactcttcgtataaaaaaagcaggccatctgcttaacccttggctccaccataaggcactgggactcggatttctctatctgatagaggtattttctgtggccctgggagctgtctgtctttcccctacccccaaggatgccaggaagacgtccaccattagccatgtggcaacctttacttctatgcctcacaagtgcctttcagagagccccaattctgctttcccacaaaataaacctaatgccatcaggcaaaaaaaaaaaaaaaaaaaaa

SEQ ID NO: 1143 - protein, 226 aa, Homo sapiens
  ref <308>: DATABASE ACCESSION NUMBER: Refseq / NP_057001
  ref <309>: DATABASE ENTRY DATE: 2002-12-23
MGPLPRTVELFYDVLSPYSWLGFEILCRYQNIWNINLQLRPSLITGIMKDSGNKPPGLLPRKGLYMANDLKLLRHHLQIPIHFPKDFLSVMLEKGSLSAMRFLTAVNLEHPEMLEKASRELWMRVWSRNEDITEPQSILAAAEKAGMSAEQAQGLLEKIATPKVKNQLKETTEAACRYGAFGLPITVAHVDGQTHMLFGSDRMELLAHLLGEKWMGPIPPAVNARL

SEQ ID NO: 1144 - DNA, 1581 bp, Rattus norvegicus; identical to SEQ ID NO: 368
  ref <308>: DATABASE ACCESSION NUMBER: Refseq / NM_022668
  ref <309>: DATABASE ENTRY DATE: 2003-01-14

SEQ ID NO: 1145 - protein, 245 aa, Rattus norvegicus; identical to SEQ ID NO: 369
  ref <308>: DATABASE ACCESSION NUMBER: Refseq / NP_073159
  ref <309>: DATABASE ENTRY DATE: 2003-01-14

SEQ ID NO: 1146 - DNA, 1205 bp, Rattus norvegicus
  ref <308>: DATABASE ACCESSION NUMBER: Refseq / NM_019174
  ref <309>: DATABASE ENTRY DATE: 2003-01-14
ggcttcgttggtgctggaccccaggctgggcagcgtctatgccctcaagcaccatgcagctccttcttgctctactggcgctggcttacgtggccccctctactgaagattcacactggtgctatgagattcaagccaaggagcccaacagccattgctcagggcctgaacaatggactggagactgtaagaagaaccagcagtctcctatcaatattgtcactagtaagacaaagttgaaccccagtctgacacccttcactttcgttggctatgaccaaaagaagaagtgggaagttaagaacaaccaacactcagtggaaatgtcgctgggggaggacatctatatttttggaggagatctgcccacccagtacaaggccatacagttacacctgcactggtcagaggagtcgaacaagggttcagagcacagtattgatgggaaacattttgccatggagatgcatgtcgtgcataagaagatgacaacaggcgataaggtgcaggactcggactccaaggacaagattgcggtgctggcattcatggttgaggtgggaaacgaggtaaacgagggcttccagcccctggtggaggcactgtccaggctctccaaaccctttacaaactccacagtgagtgagagctgcctgcaggatatgcttcctgaaaagaagaaactgtctgcctacttccgttaccagggctcactgactacaccaggctgtgatgagactgtcatctggactgtgttcgaggaacctattaagatccataaagaccagttcctggaattctcaaaaaagctctactatgaccaagaacagaagttgaacatgaaggacaatgtgaggcccctgcagccactgggaaaccgccaggtgttcaggtctcatgcctcaggacgactgctgtctttgcccctgcccactctattggtccccacactcacctgcctggtggccagcttcctccactgatggtcaaattctggatatctggcctctgacctcaacctttagaggatatggcttctctttctcaatctttccaggttgaactttggggactattaaggtgtgctgtggtggtgcacacctttaatcccagccctggatggagagagcagagacctatggatctctgaccttcccctaacccctgattaaattaaataaaatatggatatgtttttactctta

SEQ ID NO: 1147 - protein, 309 aa, Rattus norvegicus
  ref <308>: DATABASE ACCESSION NUMBER: Refseq / NP_062047
  ref <309>: DATABASE ENTRY DATE: 2003-01-14
MQLLLALLALAYVAPSTEDSHWCYEIQAKEPNSHCSGPEQWTGDCKKNQQSPINIVTSKTKLNPSLTPFTFVGYDQKKKWEVKNNQHSVEMSLGEDIYIFGGDLPTQYKAIQLHLHWSEESNKGSEHSIDGKHFAMEMHVVHKKMTTGDKVQDSDSKDKIAVLAFMVEVGNEVNEGFQPLVEALSRLSKPFTNSTVSESCLQDMLPEKKKLSAYFRYQGSLTTPGCDETVIWTVFEEPIKIHKDQFLEFSKKLYYDQEQKLNMKDNVRPLQPLGNRQVFRSHASGRLLSLPLPTLLVPTLTCLVASFLH

SEQ ID NO: 1148 - DNA, 3773 bp, Rattus norvegicus
  ref <308>: DATABASE ACCESSION NUMBER: Refseq / NM_031075
  ref <309>: DATABASE ENTRY DATE: 2003-01-13
atcaaggggagagactaggcactgggctacagttgcctggcttacaggaactggctcttttcctcaagcctcattaagcagcccactccagttcttgatctttgtctcccagtcctgaagtcctttctctccttaggctgcatccacagcccttctaagtggctgtgagcagtttctcaatatgaactgtatatcagacttcttcacctacgagactaccaagtcggtggttgtgaagagctggaccattgggatcatcaaccgagccgtccagctgctgattatctcctactttgtggggtgggttttcttgcatgagaaggcctaccaagtgagggacaccgccattgagtcctcagtagttacaaaggtgaaaggcttcgggcgctatgccaacagagtcatggacgtgtcggattatgtgaccccaccccagggcacctctgtctttgtcatcatcaccaaaatcatcgttactgaaaatcaaatgcaaggattctgtccagagaatgaagagaagtaccgctgtgtgtctgacagccagtgtgggcctgaacgcttcccaggtggggggatcctcaccggccgctgcgtgaactacagctctgttctccggacctgtgagatccagggctggtgccccactgaggtggacaccgtggagatgcctatcatgatggaggctgagaacttcaccattttcatcaagaacagcatccgtttccctctcttcaactttgagaagggaaacctcctgcctaacctcaccgacaaggacataaagaggtgccgcttccaccctgaaaaggccccattttgccccatcttgagggtaggggatgtggttaagtttgctggacaggattttgccaagctggcccgcacgggtggcgttctgggtattaagatcggctgggtgtgcgatctagacaaggcctgggaccagtgcatccctaaatattccttcactcggctggatggagtttctgagaaaagcagtgtttcccctggctacaacttcaggtttgccaaatactataagatggagaacggcagcgagtaccgcacactcctgaaggcttttggcatccgctttgatgtgctggtatatgggaacgctggcaagttcaacatcatccccaccattatcagctcggtggcggccttcacttctgtgggagtgggcactgttctctgtgacatcatcctgctcaatttcctcaaaggggctgatcactacaaagccaggaagtttgaggaggtgactgagacaacactgaagggtactgcgtcaaccaacccagtgttcgccagtgaccaggccactgtggagaagcagtctacagactcaggggcctattctattggtcactagggcctcttcccagggttccatgctcacccttaggctgcagaacctgcaaacaggccactctatctaagcagtcaggggtgggagggggagaagaagggctgctatttctgctgttcaccccaaagactagatccagatatctaggccctcactgttcaacagataggcaatgcttcccactaagacttgaatcttgcctttaccccttgcatgcctcccacctgcttccctggatcccaggacagcagcatccacccctttccaaaggattgagaaaatggtagctaaggttacacccataggacctaccacgtaccaagcacttccacacatattatcccttttcacccttaaaataatcctataaggtagatttcttgggttgtttgtttgttttgttattaagagaagcaaaggcccagggagaccgaggcgtttgccccaggccatgtagctaggaagtgagatctacaccctggctagcccttctgcccacatctgtaatggaagaatgaactctctaggcatctacccttctgtgtcagttgcctttccctgccttcccatgatgcccaacagtgagctttttcaggaatgcagccctactttaggggagcccacggaaatgcagaaggaaatagctgtgactatcagtgatttttccttgcctcaccccatatgcgaagctcaagctgagggagagacctttattctccaatgaggtcctcacacatccacacatctgggccctcactccggaatctagacagaaaacacacacatacatgaccgacaagaggcaatttctaaccctagcaccatgtcccagtacatcagctgtcttagtttatagcactgttgggaaagccatggttaggggctggggatgtagttgggtaggtagagtgtttgtctagtatgttagccctaagaccaacctgcagcacttcataaaccaggcacacttgtaatcccagcactcgggaggtaggcatggaggatcaaaagttcgagtttatccttgccaacgcaataagtgtgaaccttgcctggaacccatgaaactgtttcaaaatagaagtggggagacccagtaagacccaataccttgtgagcattcagccagggcagcaaggcctgttttcacaggatcctaacaggtgatcaggtaggagctaaaggagcctcagagaccatcatgtctaggcctcttgcttactgatcattaaccctgaggccaaaaccgaaaaatttcttgccttgtgccattgtgaggccccaagagagacacaggtgtcctgtgcattataagctgaagacaagttcacattgtctccatagcccagatgtcccatctcctttctgagcttttaaagaaaacaagagatgttgaggaagctctaaatgtagcgcacaaaactcaaggacagatcaaggtgtaggaaagaagcaggttgagaggctcttttggtttggtttgtttatttggttggttggttggttggttggttggttggttggttttgatgaaaagactttcctgtgcattcctggctggcctcaatttacagatctctctcaactcaacttttccccagtatttggatctgcaggcaagcgccattatacggcagggggcatctcttttaaaagaatatatgattaagtatcagaaaagttcatgcaaatcagtgggcctgaggtatacatttaattaatatcagggccaatctgcctcttaaacatgggcttgatgctgagagcttagaagagatgagcattcatgtggacagagggctggccctcaccggacgagatgagcattcatgtggacagagggctggccctcaccggacggtgcaaagagatgtgggagagggagagtctaggaggaccacaggagttctcacacagacccaacctcaatgatgcccaccccagggggagaagggggtaagagtccttcccactagccttgcatcaatccttttcttccctctcctttccccacagcccccatcataatgtgtgatggggtactgtctccctaacaccagtgtcaattcctgggtagtatccagagacctggccaggcttcatctctccaatagagacatcaggaaaggaaagagcacagcctccaagaaggtagcttatagcccctcattgggcaaggctgagttcaccaagatgctccctagaagaagatggagacacgtgtcctaagaggatctcataccccagactagaataattcttccccacatgcctggacctcttctgggccttcagtaagtgtgtaaactccatgctgtactctccttgtctgaaccaagtccacttcgatgtgctagatgtcagctaatcatagaaattacaacgaccagcttgtatctga

SEQ ID NO: 1149 - protein, 397 aa, Rattus norvegicus
  ref <308>: DATABASE ACCESSION NUMBER: Refseq / NP_112337
  ref <309>: DATABASE ENTRY DATE: 2003-01-13
MNCISDFFTYETTKSVVVKSWTIGIINRAVQLLIISYFVGWVFLHEKAYQVRDTAIESSVVTKVKGFGRYANRVMDVSDYVTPPQGTSVFVIITKIIVTENQMQGFCPENEEKYRCVSDSQCGPERFPGGGILTGRCVNYSSVLRTCEIQGWCPTEVDTVEMPIMMEAENFTIFIKNSIRFPLFNFEKGNLLPNLTDKDIKRCRFHPEKAPFCPILRVGDVVKFAGQDFAKLARTGGVLGIKIGWVCDLDKAWDQCIPKYSFTRLDGVSEKSSVSPGYNFRFAKYYKMENGSEYRTLLKAFGIRFDVLVYGNAGKFNIIPTIISSVAAFTSVGVGTVLCDIILLNFLKGADHYKARKFEEVTETTLKGTASTNPVFASDQATVEKQSTDSGAYSIGH

SEQ ID NO: 1150 - DNA, 1456 bp, Homo sapiens
  ref <308>: DATABASE ACCESSION NUMBER: Refseq / NM_002559
  ref <309>: DATABASE ENTRY DATE: 2003-02-19
aattccggagaggggttggaggaatggggagcctgtccctttaagccatgcaatcctagtgagattctctgctcttgatactctggcttcctgtcctgtaggacctccctctcctgaggccaccactgggcccccttctgagtgtcccctgagcactctctcagcatgaactgcatatccgacttcttcacctatgagaccaccaagtcggtggttgtgaagagctggaccatcgggatcatcaaccgagtagttcagcttctgatcatctcctactttgtagggtgggttttcttgcacgagaaggcttaccaggtacgggacacagccattgagtcctcggtggtaaccaaggtgaagggctccggactctacgccaacagagtcatggatgtgtctgattacgtgacgccacctcagggcacctcggtctttgtcatcatcaccaagatgattgttactgaaaatcagatgcaaggattctgcccagagagtgaggagaaataccgctgtgtatcagacagccagtgcgggcctgagcccttgccaggtggggggatcctcactggccgctgcgtgaactacagctctgtgctccggacctgtgagatccagggctggtgccccacggaggtggacacagtggaaacgcccatcatgatggaagctgagaacttcactattttcatcaagaacagcatccgtttccccctcttcaactttgagaagggaaacctccttcccaacctgacagccagggacatgaagacctgccgcttccacccggacaaggaccctttctgccccatcttgcgggtaggggacgtggtcaagtttgcggggcaggattttgccaaactggcgcgcacggggggagttctgggcattaagatcggctgggtgtgcgacttggacaaggcctgggaccagtgcatccccaaatactccttcacccggctcgacagcgtttctgagaaaagcagcgtgtccccaggctacaacttcaggtttgccaagtactacaaaatggaaaatggcagtgagtaccgcaccctcctgaaggcttttggcatccgcttcgacgtgctggtatacgggaatgctggcaagttcaacatcatccccaccatcatcagctctgtggcggcctttacttctgtgggagtgggaactgttctctgtgacatcatcctgctcaacttcctcaagggggccgaccagtacaaagccaagaagtttgaggaggtgaatgagactacgctgaaaatcgcggctttgaccaacccagtgtaccccagcgaccagaccacagcggagaagcagtccaccgattcgggggccttctccataggccactagggcctctttccagggccccacactcacaaaggctccaggcctccccacagaggaccctgcctgagcaagggggcatgggaaatcgaattcctgctgt

SEQ ID NO: 1151 - protein, 397 aa, Homo sapiens
  ref <308>: DATABASE ACCESSION NUMBER: Refseq / NP_002550
  ref <309>: DATABASE ENTRY DATE: 2003-02-19
MNCISDFFTYETTKSVVVKSWTIGIINRVVQLLIISYFVGWVFLHEKAYQVRDTAIESSVVTKVKGSGLYANRVMDVSDYVTPPQGTSVFVIITKMIVTENQMQGFCPESEEKYRCVSDSQCGPEPLPGGGILTGRCVNYSSVLRTCEIQGWCPTEVDTVETPIMMEAENFTIFIKNSIRFPLFNFEKGNLLPNLTARDMKTCRFHPDKDPFCPILRVGDVVKFAGQDFAKLARTGGVLGIKIGWVCDLDKAWDQCIPKYSFTRLDSVSEKSSVSPGYNFRFAKYYKMENGSEYRTLLKAFGIRFDVLVYGNAGKFNIIPTIISSVAAFTSVGVGTVLCDIILLNFLKGADQYKAKKFEEVNETTLKIAALTNPVYPSDQTTAEKQSTDSGAFSIGH

SEQ ID NO: 1152 - DNA, 974 bp, Rattus norvegicus
  ref <308>: DATABASE ACCESSION NUMBER: Refseq / NM_013007
  ref <309>: DATABASE ENTRY DATE: 2003-01-13
cctcttgcttcccacggctgcaccatgaaaatcctgttttgtgatgtcctgctgctcagcctgctctccagcgtgttcagcagctgtcccgaggactgcctcacctgccaggagaggctccacccggctccgggcagcttcaacctgaagctgtgcatcctccagtgtgaagagaaggtcttcccccgccctctctggactctttgcaccaaagccatggccagtgactctgagcagctcagccctgctgatccagagctcacgtccgctgctctttaccagtcgaaagcctcggagatgcagcacctgaagagaatgccgcgtgtcaggagtgtggtgcaagcccgagacgcagagcctgaggcagatgcagagcctgtcgcagatgaggccgatgaggtggagcagaagcagctgcagaaaaggtttgggggcttcactggggcccggaagtcagcccggaagttggccaaccagaagcggttcagtgagtttatgaggcagtacctggtcctgagcatgcagtcaagccaacgccggcgcactctgcaccagaatggtaatgtgtagccagaaggagcccctcccagctgcaccggccactgcaacccatgagcatccaggtgagcccccgtacagcatgtgtccacaccaagacctgcaggccgggagtcaggattcctccttccctgaggcactgaacacccgcggcacctccccacagcatgtctcaccacaatcctgttgctacatcagagtgtatttttgtaattcctccagctaacattttaatggccccatcttcttgctcatcctctgccctctcgtagggccaggtgagaggaacatgaaatcagacctggggttttgcctcaccactgccataactggtttgtaaaggagctgttctttttgactgattgtttgaaacaactttctccattaaacttctactgagcaaaatggttaataaa

SEQ ID NO: 1153 - protein, 181 aa, Rattus norvegicus
  ref <308>: DATABASE ACCESSION NUMBER: Refseq / NP_037139
  ref <309>: DATABASE ENTRY DATE: 2003-01-13
MKILFCDVLLLSLLSSVFSSCPEDCLTCQERLHPAPGSFNLKLCILQCEEKVFPRPLWTLCTKAMASDSEQLSPADPELTSAALYQSKASEMQHLKRMPRVRSVVQARDAEPEADAEPVADEADEVEQKQLQKRFGGFTGARKSARKLANQKRFSEFMRQYLVLSMQSSQRRRTLHQNGNV

SEQ ID NO: 1154 - DNA, 5433 bp, Rattus norvegicus
  ref <308>: DATABASE ACCESSION NUMBER: Refseq / NM_138535
  ref <309>: DATABASE ENTRY DATE: 2003-01-13
caggcagcaacagccggtggcacagcacagaagccgcctctgctgatagagaatggcccgcagcccgggtgagcctgctgtagccttctccctgactcagactccaccccatccctggctcagctgagtgtcagcggggccttctgcttcccctggaggcaggcaggacctgaccagactgtcctgggaagtgacgatgggccttactcaaaggggggaaaggacacagcggggactgatggggccctggtgtgccgccgccagagcattccagaggagttccggggcatcaccatggtggagctgatcaagcgtgagggcagcactctgggcctgactatctcaggagggactgacaaggacgggaagcccagagtctccaacctgagacccgggggccttgcagccaggagcgatctactgaatgtgggcgactatatccgctcagtgaatgggatccgtctgacccggctccgacatgacgagatcatcacattgctgaagaatgtgggcgagcgcgtggtgctggaggtggagtatgagctgcccccgcccgctcccgaaaacaacccgaggatcatttccaagacggtggacgtctccctctacaaggaaggcaacagttttggctttgtcctcagaggaggtgcccatgaggacctgcacaaatcccgcccattggtcctgacttacgtgcggcctggtggcccagcagacagggagggttccttaaaggtgggcgacaggctgctcagcatagatgggatcccactgcacggggccagccatgctaccgcaatagccaccctgcagcagtgcagccatgaggccctcttccaggtggagtacgatgtggccaccccagacacggtggccaatgcttcaggccctttggtggtagaaatagccaagaccccaggatctgccctggggatctctctcaccactggctcccaccggaacaaaccagctatcactatcgaccgcatcaagccggctagcgtggtggacaggagtggtgccctgcatgctggagaccacatcctggccatcgatggcaccagcacagaacactgctctctggtcgaggccacgaagctcttggccagtgtgaccgagaaagttcgactggagatcttgcctgcaccccagagtcggcggcccctgaagcccccagaggcagtgagaatacagaggagtgagcaactgcaccactgggacccctgtgttccctcttgccatagcccaaggccaagccactgcagggcacccacctgggcacctggaggccaggaccagagccgatccgtgtcctcgactcccttctcctcgccaactatgaaccctgcctttccctgtgccaacgccagcaccctgcccagaggacccatgagccccagaacaacagcggggaggagaaggcagcgaaggaaagaacacaggagctctttgtcactggcctccagcacggtagggcccggtgggcagatcgttcacacggagacgacggaggtagtgctctgtggagaccccctcagtggcttcggcctccagctgcaggggggcatttttgctaccgagaccctgtcctccccacccttggtgcgatttattgaacctgacagccctgctgagaggtgtggtctgctgcaggtgggggaccgcgtcctagccataaatggcattgctactgaggatgggaccatggaggaagccaaccagctgttgcgggatgctgcactggcccgcaaagttgttttggagatcgagtttgatgtggcggagtctgtcatcccaagcagtgggaccttccacgtgaagttacccaaaaggcgtggtgtggagctgggcatcaccattagctcggccagcagaaagcgaggggaacccctgatcatctctgacatcaagaaaggcagcgtggcgcacaggactggcaccctcgagccgggcgacaagctgctggccattgacaatattcgcctggaccattgccccatggagtatgctgtgcaaatcctgcgccaatgtgaggacctggtgaagctgaagatccggaaggacgaggacaactcagatgagcaggagagctcgggcgcagtcagctacacagtggaactgaagcgctatggcggacccctgggtatcaccatctccggtacagaggaaccttttgaccccatcatcatctctggtctcaccaagcggggtctggctgaaaggactggagccatccatgttggggaccgcatactggccatcaacagcgtgagcctcaagggccggcccctgagtgaggccattcaccttctgcaggtggcaggggagactgtcacactgaagatcaagaagcagctggaccgtccccttctcccccgccagtcaggcagcctcagtgaggccagtgatgtggatgaggacccccctgaggccctcaagggaggcttgctgacaacccacttctcacctgctgtacccagcgtggacagtgctgtggagtcctggggcagctctgccacagagggtggctttgggggctcaggctcctacactccgcaggtggcagtccggagtgtgactcctcaggagtggcgttccagcagactgaagagtagccccccaccccttgagccccggaggacgagctacacaccgggccccactgacgaaagcttcccagaggaggaagagggggactgggagccaccaatgaggcatcctgtgtcaccgctctccaccccgtctcatctgcccctgttctaattggctaccaacagtcttggtcgcccctaactgcgtcttccccaccccattctgtgtcaccaaccactgcccagcactgggccctgggcaacgaagactcctcaggcccagcccacccaccctcccacctgccaggagttgacgctgtggttcctgttgcagcccagcccctggccccgcccgagaggagggcttctggagagtgcttggagaggcccttgaagacctggagtcctgtggtcagtctgaactgctaagggagctggaggcttccatcatgacaggcactgtacagtcggtagctgtggatggcaggcctggctctcggccctggcgccggagccgggaagtcggaacatccccggaagacctgcaggagctgctgttgccaacgcccctggagatgcacagggtgaccctgcacaaagacccggtgaggaacgactttggtttcagtgtctcagatggcctcctggagaagggtgtctatgtccacatgtgcgcattgatgggccagctcagcacggaggcctgcagccctttgaccgtctcctgcaggtcaaccatgttcgcactgggacttcgattgctgtctggccgttccactactggcagaggtggggacatccttgagctggtggtcagccgaaaccatctggcacagagccgcagacaccagagcaccgggccccagtagtccccagatgatctgaggtcattatgtaagtcagctggcggagtgcccccagtcatcgattatggcctgcagattcacatccggtagagtggcatcttcaagttgggtcttcaggatgctcagagaaccccacaggaaaggggtcatccctgctgctcagctaggagagcccagctccctgtgcagtcatctcagagcagcgaacagagtggggacggcccactccgtgtggtaatggatgatgccagtatttcccattgggaagttaataagctgtaggtcgacaattctgctctgtggaaagaggcatttggcgacccagctgttcagatggtacccagtgcacagggaccctgccaccgggaaagatatggcacaagaacagtgtcctcccttctcccaaatggtggtgttttgagagcctccagcacctagtgaccatactgaggaaccccaattagggacaatctagggtgccagagaatgcttgccccttcctttgggttggtctttcaattatttcacgggtgattctgaacctcagagcagaactgtggccatcaaccctcctgtcccacaaaaccttagcccaagtccttgcccagaggagggcacagctcgggtcaaacggtccaggagcatccacacacctgccattccagcacatatggtaaaccttgggaagagactgagccacagttctgcccctgaccccatcagaggaagagaggaagaggaaaggagctgacatggagggaggtcagctgaaggatgagagagtggctaactggagcagtgtccaaggaggctattcaaggaggtccccagcatcccttaactctgggctcctccatctctgctaagcagaacccttccagcttcaagcaagactcaagacacttccttcccagcagtctgagctgttctggagactggcttcatgtttgcccagcttaaggtctcaaggacctgcgggaagcctccaaccctgccctgtcacccctctgtgcccttgaagctcactgctagaaagcactccctgttcaagaggacagatgaggtcccagaagccattctttccccgttctcttcttggctgtataaccttgagtaaagctgaaaagacacagggcgagctccagctgcccactaagacacttcagctctctgcttttcctagcttcccccatatcctgcccttcatgatggcttccccagggacccttcaggcaacccagtgactctactttcactgccccagggtagaaagatactacccacccatcatgggcaccaaacaaagaccttcagcttcactagcagagaagtgactcctagccaccagctcacctgatcctgtgtgaccttgggcagatggctcagcctctggatttctggtgtgtggcataactgactgtaccctgaaggcctcttagcttgggaaatctgtgttccacttaatgactccaggctctgaaaatgcaacccctcgaccactgccctcccctcgggctgaggctctcccatcctcccagacgtatgcaactaggccaagcgggtggacctcctggctgtggcctgaggccttctcatatgcaatatacccccctggcttctcacaggggtgtttgccccacacaacatccctagcccccaccccagtgagcatcctgcctgcctatgcattttgggtacctcccctgtgacacccacccccagagctgtatttttctctggctaagattagaacatattccttgtaaagtatttttctatgcgggttttcttagggctcccaggaagcacccagcacacccatggccccactgtacaggttgtttctggtctgtctggggcccacctataaatctttgtcccaccaggcatcacagtgactggggggaggttgagtgctattggggtgattttttttaaataaaattggttaaatgaaaaaaaaaaaaaaaaaaaaa

SEQ ID NO: 1155 - protein, 822 aa, Rattus norvegicus
  ref <308>: DATABASE ACCESSION NUMBER: Refseq / NP_612544
  ref <309>: DATABASE ENTRY DATE: 2003-01-13
MVELIKREGSTLGLTISGGTDKDGKPRVSNLRPGGLAARSDLLNVGDYIRSVNGIRLTRLRHDEIITLLKNVGERVVLEVEYELPPPAPENNPRIISKTVDVSLYKEGNSFGFVLRGGAHEDLHKSRPLVLTYVRPGGPADREGSLKVGDRLLSIDGIPLHGASHATAIATLQQCSHEALFQVEYDVATPDTVANASGPLVVEIAKTPGSALGISLTTGSHRNKPAITIDRIKPASVVDRSGALHAGDHILAIDGTSTEHCSLVEATKLLASVTEKVRLEILPAPQSRRPLKPPEAVRIQRSEQLHHWDPCVPSCHSPRPSHCRAPTWAPGGQDQSRSVSSTPFSSPTMNPAFPCANASTLPRGPMSPRTTAGRRRQRRKEHRSSLSLASSTVGPGGQIVHTETTEVVLCGDPLSGFGLQLQGGIFATETLSSPPLVRFIEPDSPAERCGLLQVGDRVLAINGIATEDGTMEEANQLLRDAALARKVVLEIEFDVAESVIPSSGTFHVKLPKRRGVELGITISSASRKRGEPLIISDIKKGSVAHRTGTLEPGDKLLAIDNIRLDHCPMEYAVQILRQCEDLVKLKIRKDEDNSDEQESSGAVSYTVELKRYGGPLGITISGTEEPFDPIIISGLTKRGLAERTGAIHVGDRILAINSVSLKGRPLSEAIHLLQVAGETVTLKIKKQLDRPLLPRQSGSLSEASDVDEDPPEALKGGLLTTHFSPAVPSVDSAVESWGSSATEGGFGGSGSYTPQVAVRSVTPQEWRSSRLKSSPPPLEPRRTSYTPGPTDESFPEEEEGDWEPPMRHPVSPLSTPSHLPLF

SEQ ID NO: 1156 - DNA, 420 bp, Rattus norvegicus
  ref <308>: DATABASE ACCESSION NUMBER: EMBL / AA997865
  ref <309>: DATABASE ENTRY DATE: 2000-03-03
tcggcacgaggcagctagtggctgcacccgcgaacaccaccctggtccgaaggtagctgcggacagaattgctggcctgatagaagctttggaacgagcagtcaagatgagtgataaaccagacttatcagaagttgaaacatttgacaaatcaaagttgaagaagactaatactgaagaaaagaatactcttccttcgaaggaaactatccagcaggagaaagaatataatcaaagatcataaaatgagattctcctctcaagagcaacttcaactttgctggatagtcttggatttagacatgtttctgtaaacctatccaatatgtagacattttaggcggttcctgataggttcttaagtaccctgactgaaaggtcagcatttaacaccaatcattaaatgtgttttccactgct

SEQ ID NO: 1157 - DNA, 2562 bp, Rattus norvegicus
  ref <308>: DATABASE ACCESSION NUMBER: EMBL / S82649
  ref <309>: DATABASE ENTRY DATE: 2000-03-04
tggtgctggcgtttccctgcttgcacgcggttccctcgagcgccgctccgaccgacgtagccggccgcgaaggcgcccagacggcaagccagcgacccatgctgaagtgagcgcccaggtcagcgagatgctggcgctgctgaccgccggcgtggcgctcgccgtggccgcgggacaagcccaggataacccgatacctggcagtcgcttcgtgtgcaccgcgctgccccccgaagcggcgcgcgccggctgcccgctgcccgcgatgcccatgcagggaggcgcgctgagccctgaggaggagctgcgagccgctgtgctgcactggcgcgagaccgtcgtgcagcagaaggagacgctgggcgctcagcgagaagccatccgagaactcaccagcaagctggcccgctgtgagggactagccggcggtaaggcgcgcggcacgggggccacgggcaaggacaccatgggcgacctgccgcgggacccgggccacgtcgtggagcagcttagccgctcgctgcagaccctcaaggaccgcttggagagcctcgagctccaactccacaccaacgcgtctaatgccgggctgccgagcgacttccgagaggtgctccagcggaggctgggggagctggagaggcagttgctacgcaaggtggccgagctggaagacgagaagtccctgctccacaatgagacctcggctcaccggcagaagacagagaacacactgaatgcactgctgcagagggtgactgagctggagagaggcaacagtgcattcaagtcaccagatgcattcaaagtgtccctccctctccgtacaaactacctatacggcaagatcaagaagacgttgcccgagctgtatgccttcaccatctgcctgtggctgcggtccagcgcctcgccaggcatcggcacgccattctcctacgctgtgcctgggcaagccaatgagattgtgctgatagagtggggtaacaatcccatagagctgcttatcaacgacaaggtcgcacagctgcccctgtttgtcagcgatggcaagtggcaccatatctgcatcacctggaccactcgagacggcatgtgggaagcattccaggacggggagaagctgggcaccggggagaacctggcaccctggcatcccatcaagccagggggtgtgctcatcctggggcaggagcaggacactgtgggaggcagatttgatgccacacaggccttcgttggagagcttagccagttcaacatatgggaccgtgtcctccgggcacaagagatcatcaacatcgccaactgctccacgaacatgcctggaaacatcatcccatgggtggacaacaatgtcgatgtgtttggaggggcttccaagtggcctgtggagacgtgcgaagagcgtctcctggacttgtagctaccttctccctgtcccagaggccaagagcgggctgttctggggagttcaaggcatctattcccgagttcaactaaaatctctggcctgagtaggaaagaaccagagcccctaaggcaggctgtgtggcctcctttgtcttaggctcctatgttcttactgctttgttctttggtgggaagtgaccgaagccctgggaagagtcctgagccacttcctgctggggtttctagtaaagtctgtgagcctctccacccctcctgtaaatgctagtgcaacccagccctgcctgtcattttggatccttagtgtctcgtgtgtgcttcccgtctgtcccctttgatggctgtgtggtcatcctaccggggtggcctgggtcccttgtgtgtgtagcacatccctgcttttgactgaacacagtgcacagaagctacccgcccctgaaacagggtctctccctcagtgtcatgtgcactctggtctctccctctgaggggactgcagctgctggagggccacgtgcccagacagtccccagcatccccaaagcagaccctccgccatggagaaagtcccccacagcttccccaccctctgtccacctctcagaccccacgcttctaaggaccattgctgggttggctttcaaaagctgctgctctcatctggtgccaaaagttcatttgcagcttctacaccgttctgtgtggtttggggattgactttattcccccacaaaagaggaacagccattagaagccagcctcccctccttttgatgctcagcccactgtgaagagtgagcttgcttgtaagccacattggtttctgtgagcatctgactctcccccgtccagtattttccccggaactggagattcgagtgccattcggctgctacctgcttagtgactccaggctgcatcatgtatcataatttattttaaagacaaagtgattcagtggggaaatttataaagctataaatattatatattttatttttcatacatgtttaaagtgcggatccatggatgttccatttgtaggaccagcttgacgtgcccatcctgacattgtatgccacaagagctcttgtgatgatggaattttgattaaagtgcactggaagatga

SEQ ID NO: 1158 - DNA, 1529 bp, Rattus norvegicus
  ref <308>: DATABASE ACCESSION NUMBER: Refseq / NM_022695
  ref <309>: DATABASE ENTRY DATE: 2002-11-05
tgagtgagagggagggagctcaggccaccacgagacagagatggagaccagcagtccgtggcctccgaggcccagccccagcgcagggctgagcctggaggcgcggctgggcgtggacactcgcctctgggccaaggtgctgttcaccgcgctctactcgctcatcttcgcatttggcacagcgggcaatgcgctgtccgtgcacgtggtgctgaaggcgcgggccggtcgccccgggcgcctgcgctaccacgtgctcagcctggcgctctcagccctgctgctactgctggtcagcatgcccatggagctctacaacttcgtgtggtcccactacccatgggtcttcggcgatctgggctgccgtggctattacttcgtgcgcgagctgtgcgcctacgccacagtgctgagcgttgccagcctaagcgcagagcgctgcctggccgtgtgccagccgctgcgcgcccgccgccttctcaccccgcgccgcacccgccgcctgctgtcactggtctgggtcgcctctctgggccttgccctgcccatggcggttatcatgggacagaagcacgaagtggaaagcgcggacggggagcctgagcctgcctcgcgtgtgtgcacggtgctggtgagccgcgccacacttcaggtcttcatccaggtgaatgtgctggtgtccttcgctctccccttggcactcactgctttcctgaatggcatcactgtcaaccacctgatggccctctactcccaggtaccatcagcttctgcccaagtcagctccatccccagccgcctggagctcctgagtgaggaaggcctcctgggcttcatcacgtggagaaagactctctccctgggggtccaagccagcctggtgagacacaaggatgccagccagatccgcagcctccagcacagcgcccaggttctcagagccatcgtggctgtgtatgtcatctgctggctgccgtaccatgcccgccgactcatgtactgctacatccccgatgatggatggactaatgagctctatgatttctatcactatttctacatggtgaccaacacgctcttctatgtcagctcagcagtgaccccaatcctctacaacgccgtgtcttcctccttcagaaagctcttcctggaatccctcggctccctgtgtggtgaacagcactccttggtgcccttaccccaagaagccccagagtcaaccactagtacgtacagtttccggctttggggatccccaagaaaccccagcctgggagaaatacaagtatgaagagaacaaacaatggctgcttgggacatgcccgtcagacaagccatgccatcactaacagtccaggtggacctactgacccagtgcatactgcaggcaaaccacataacacctactgccctcagcttcccacagagaacaacagagttgaagaataggaaccgtggcctagtgatgaaggtgcccagtgccaggcctggtacatagtcactactcaataaattttaacccggtgctg

SEQ ID NO: 1159 - protein, 416 aa, Rattus norvegicus
  ref <308>: DATABASE ACCESSION NUMBER: Refseq / NP_073186
  ref <309>: DATABASE ENTRY DATE: 2002-11-05
METSSPWPPRPSPSAGLSLEARLGVDTRLWAKVLFTALYSLIFAFGTAGNALSVHVVLKARAGRPGRLRYHVLSLALSALLLLLVSMPMELYNFVWSHYPWVFGDLGCRGYYFVRELCAYATVLSVASLSAERCLAVCQPLRARRLLTPRRTRRLLSLVWVASLGLALPMAVIMGQKHEVESADGEPEPASRVCTVLVSRATLQVFIQVNVLVSFALPLALTAFLNGITVNHLMALYSQVPSASAQVSSIPSRLELLSEEGLLGFITWRKTLSLGVQASLVRHKDASQIRSLQHSAQVLRAIVAVYVICWLPYHARRLMYCYIPDDGWTNELYDFYHYFYMVTNTLFYVSSAVTPILYNAVSSSFRKLFLESLGSLCGEQHSLVPLPQEAPESTTSTYSFRLWGSPRNPSLGEIQV

SEQ ID NO: 1160 - DNA, 3215 bp, Rattus norvegicus
  ref <308>: DATABASE ACCESSION NUMBER: EMBL / M92076
  ref <309>: DATABASE ENTRY DATE: 2000-03-04
gaattcggtgacgggctctttcagcccaatcctcccttatctgaaggacaggcaaaagattccacttggaaatgagagaagactagaaggaaacattggcttcaccaagtgatatctccaagagatatagaaacaggattcatgaagatgttgacaagactacaaattcttatgttagctttgttttcaaagggatttttactctctttaggagatcacaactttatgaggagggaaattaaaatagaaggagaccttgttttaggaggcttatttcctattaatgaaaaaggcactggaactgaagagtgtgggcgaatcaatgaagaccgaggtatccaacgcctggaggccatgttgtttgccatcgacgagattaacaaagacaattacttgctcccaggagtgaagctgggtgttcatattttggatacatgttcaagggatacctatgcattagagcaatcactggagtttgtcagggcatctttgactaaagtggatgaagccgagtatatgtgtcctgatggatcatatgctattcaagaaaacatcccactgctcattgcaggagtcattggtggttcatacagcagtgtttccatacaggtggcaaacctgctgaggctcttccagatccctcagataagctacgcctccaccagcgccaaactcagtgacaagtcgcgctatgattactttgccaggaccgtgccccctgacttctaccaggccaaagccatggccgagatcttgcgcttcttcaactggacctatgtgtccaccgttgcctctgagggtgactatggggagacagggattgaggccttcgagcaggaagcacggctgcgtaacatctgcatcgccactgctgaaaaggtgggccgctccaacatccgcaagtcctacgacagcgtgatacgtgagctcctgcagaaacccaatgcgcgggtcgtggtcctgttcatgcgcagtgacgactcacgagagctgatcgcggcagccaaccgcgtgaatgcctccttcacctgggtggccagcgacggctggggtgctcaggagagcatagtcaagggcagtgagcatgtagcctatggcgccatcacccttgagctggcatctcacccggttcgccagtttgatcgctacttccagagcctcaacccctacaacaatcatcgtaacccctggttccgagacttctgggagcagaagttccagtgcagcctccagaacaagagaaaccacagacaggtttgtgacaagcacctggccattgacagcagcaactatgagcaagaatccaagattatgtttgtggtgaatgcagtgtacgccatggcgcatgcgctgcacaaaatgcagcgcaccctctgtcccaacaccaccaagctctgtgatgcaatgaagatcctagatggaaagaaattgtacaaggagtatttgctgaaaatcaacttcacagctccattcaacccaaataaaggagcagacagcattgtgaagtttgacacttttggagacgggatgggaagatacaacgtgttcaacttgcagcagacaggtgggaagtattcttacttgaaggttggccactgggcagaaaccttgtctctagatgtggactctatccattggtcccggaactcagtccccacttcccagtgcagtgatccctgtgccccgaatgaaatgaagaacatgcagcccggggatgtttgctgctggatctgtatcccctgtgagccctatgaatacctggtcgatgagttcacctgtatggattgtggccctggccagtggcccactgcagacctatctggatgctacaaccttccagaggattacatcaaatgggaagacgcctgggcaataggcccggtcaccattgcctgcctgggctttctgtgtacatgcatagttataactgtttttatcaagcacaacaacacacccttggtcaaagcatcaggtcgagaactctgctacatcttgttatttggagttagcctgtcctattgcatgacattcttcttcattgctaagccatcgcctgtcatctgtgcgttgcgccgacttgggcttgggacctctttcgccatctgttattcagcgctgctgaccaagacaaactgcattgctcgcatcttcgatggggtcaagaacggcgctcagaggccgaaattcatcagccccagttctcaggtttttatttgcctgggtttgatactggtgcaaattgtgatggtgtccgtgtggcttatcctggagactccaggtactagaagatacacccttccagagaagcgggaaacagtcatcctgaaatgcaatgtcaaagattccagcatgttgatctctctgacctatgacgtggtcctggtgatcctatgcactgtgtatgccttcaaaacgaggaagtgtcctgaaaacttcaatgaagccaagtttataggcttcaccatgtacaccacctgcatcatctggttggcattcctccctatattttatgtgacatcaagtgactacagagtgcagacgacaacaatgtgcatctccgttagcctgagcggtttcgtggtcttgggctgtttgtttgcccccaaggtgcacatcgtcctgttccaaccccagaagaatgtggtcacacacagacttcacctcaacaggttcagcgtcagcggaactgcaaccacctattctcagtcctctgcaagcacatatgtcccaacagtgtgcaacggaagggaagtcctggactccaccacctcatctctgtgattgtgatacgcagttcagttctcatgtttttaggctgttagacaaagtgctcacatgctgctccagaacatggaaacagaacaaaacaacaaccctagtatctttttttttctttttttagaaacagtacaataaattatttttgaggactgtatggtatgtagtgatgtgctacaactttctaggctgattttagtgccctaattaacagccccttccccaggacatggaaataaccattgtttacagagctgagcattggtgacagggtctgacagggtcagtctactaaaacgaaaaacaaaaaagacaaaacaaaaaaaatacagtggcaatattaggtaaccttttttcctatgaagtcttttgtaggttcttgttgtaactaatttagggtgagtttctacgttgtatattaaagttacattacgtgt

SEQ ID NO: 1161 - DNA, 3410 bp, Homo sapiens
  ref <308>: DATABASE ACCESSION NUMBER: Refseq / NM_000840
  ref <309>: DATABASE ENTRY DATE: 2000-10-31
cttttgtgtcggatgaggaggaccaaccatgagccagagcccgggtgcaggctcaccgccgccgctgccaccgcggtcagctccagttcctgccaggagttgtcggtgcgaggaattttgtgacaggctctgttagtctgttcctcccttatttgaaggacaggccaaagatccagtttggaaatgagagaggactagcatgacacattggctccaccattgatatctcccagaggtacagaaacaggattcatgaagatgttgacaagactgcaagttcttaccttagctttgttttcaaagggatttttactctctttaggggaccataactttctaaggagagagattaaaatagaaggtgaccttgttttagggggcctgtttcctattaacgaaaaaggcactggaactgaagaatgtgggcgaatcaatgaagaccgagggattcaacgcctggaagccatgttgtttgctattgatgaaatcaacaaagatgattacttgctaccaggagtgaagttgggtgttcacattttggatacatgttcaagggatacctatgcattggagcaatcactggagtttgtcagggcatctttgacaaaagtggatgaagctgagtatatgtgtcctgatggatcctatgccattcaagaaaacatcccacttctcattgcaggggtcattggtggctcttatagcagtgtttccatacaggtggcaaacctgctgcggctcttccagatccctcagatcagctacgcatccaccagcgccaaactcagtgataagtcgcgctatgattactttgccaggaccgtgccccccgacttctaccaggccaaagccatggctgagatcttgcgcttcttcaactggacctacgtgtccacagtagcctccgagggtgattacggggagacagggatcgaggccttcgagcaggaagcccgcctgcgcaacatctgcatcgctacggcggagaaggtgggccgctccaacatccgcaagtcctacgacagcgtgatccgagaactgttgcagaagcccaacgcgcgcgtcgtggtcctcttcatgcgcagcgacgactcgcgggagctcattgcagccgccagccgcgccaatgcctccttcacctgggtggccagcgacggctggggcgcgcaggagagcatcatcaagggcagcgagcatgtggcctacggcgccatcaccctggagctggcctcccagcctgtccgccagttcgaccgctacttccagagcctcaacccctacaacaaccaccgcaacccctggttccgggacttctgggagcaaaagtttcagtgcagcctccagaacaaacgcaaccacaggcgcgtctgcgacaagcacctggccatcgacagcagcaactacgagcaagagtccaagatcatgtttgtggtgaacgcggtgtatgccatggcccacgctttgcacaaaatgcagcgcaccctctgtcccaacactaccaagctttgtgatgctatgaagatcctggatgggaagaagttgtacaaggattacttgctgaaaatcaacttcacggctccattcaacccaaataaagatgcagatagcatagtcaagtttgacacttttggagatggaatggggcgatacaacgtgttcaatttccaaaatgtaggtggaaagtattcctacttgaaagttggtcactgggcagaaaccttatcgctagatgtcaactctatccactggtcccggaactcagtccccacttcccagtgcagcgacccctgtgcccccaatgaaatgaagaatatgcaaccaggggatgtctgctgctggatttgcatcccctgtgaaccctacgaatacctggctgatgagtttacctgtatggattgtgggtctggacagtggcccactgcagacctaactggatgctatgaccttcctgaggactacatcaggtgggaagacgcctgggccattggcccagtcaccattgcctgtctgggttttatgtgtacatgcatggttgtaactgtttttatcaagcacaacaacacacccttggtcaaagcatcgggccgagaactctgctacatcttattgtttggggttggcctgtcatactgcatgacattcttcttcattgccaagccatcaccagtcatctgtgcattgcgccgactcgggctggggagttccttcgctatctgttactcagccctgctgaccaagacaaactgcattgcccgcatcttcgatggggtcaagaatggcgctcagaggccaaaattcatcagccccagttctcaggttttcatctgcctgggtctgatcctggtgcaaattgtgatggtgtctgtgtggctcatcctggaggccccaggcaccaggaggtatacccttgcagagaagcgggaaacagtcatcctaaaatgcaatgtcaaagattccagcatgttgatctctcttacctacgatgtgatcctggtgatcttatgcactgtgtacgccttcaaaacgcggaagtgcccagaaaatttcaacgaagctaagttcataggttttaccatgtacaccacgtgcatcatctggttggccttcctccctatattttatgtgacatcaagtgactacagagtgcagacgacaaccatgtgcatctctgtcagcctgagtggctttgtggtcttgggctgtttgtttgcacccaaggttcacatcatcctgtttcaaccccagaagaatgttgtcacacacagactgcacctcaacaggttcagtgtcagtggaactgggaccacatactctcagtcctctgcaagcacgtatgtgccaacggtgtgcaatgggcgggaagtcctcgactccaccacctcatctctgtgattgtgaattgcagttcagttcttgtgtttttagactgttagacaaaagtgctcacgtgcagctccagaatatggaaacagagcaaaagaacaaccctagtacctttttttagaaacagtacgataaattatttttgaggactgtatatagtgatgtgctagaactttctaggctgagtctagtgcccctattattaacaattcccccagaacatggaaataaccattgtttacagagctgagcattggtgacagggtctgacatggtcagtctactaaaaaacaaaaaaaaaaaacaaaaaaaaaaaaacaaaagaaaaaaataaaaatacggtggcaatattatgtaaccttttttcctatgaagttttttgtaggtccttgttgtaactaatttaggatgagtttctatgttgtatattaaagttacattatgtgtaacagattgattttctcagcacaaaataaaaagcatctgtattaatgtaaagatactgagaataaaaccttcaaggtttt

SEQ ID NO: 1162 - protein, 877 aa, Homo sapiens
  ref <308>: DATABASE ACCESSION NUMBER: Refseq / NP_000831
  ref <309>: DATABASE ENTRY DATE: 2000-10-31
MLTRLQVLTLALFSKGFLLSLGDHNFLRREIKIEGDLVLGGLFPINEKGTGTEECGRINEDRGIQRLEAMLFAIDEINKDDYLLPGVKLGVHILDTCSRDTYALEQSLEFVRASLTKVDEAEYMCPDGSYAIQENIPLLIAGVIGGSYSSVSIQVANLLRLFQIPQISYASTSAKLSDKSRYDYFARTVPPDFYQAKAMAEILRFFNWTYVSTVASEGDYGETGIEAFEQEARLRNICIATAEKVGRSNIRKSYDSVIRELLQKPNARVVVLFMRSDDSRELIAAASRANASFTWVASDGWGAQESIIKGSEHVAYGAITLELASQPVRQFDRYFQSLNPYNNHRNPWFRDFWEQKFQCSLQNKRNHRRVCDKHLAIDSSNYEQESKIMFVVNAVYAMAHALHKMQRTLCPNTTKLCDAMKILDGKKLYKDYLLKINFTAPFNPNKDADSIVKFDTFGDGMGRYNVFNFQNVGGKYSYLKVGHWAETLSLDVNSIHWSRNSVPTSQCSDPCAPNEMKNMQPGDVCCWICIPCEPYEYLADEFTCMDCGSGQWPTADLTGCYDLPEDYIRWEDAWAIGPVTIACLGFMCTCMVVTVFIKHNNTPLVKASGRELCYILLFGVGLSYCMTFFFIAKPSPVICALRRLGLGSSFAICYSALLTKTNCIARIFDGVKNGAQRPKFISPSSQVFICLGLILVQIVMVSVWLILEAPGTRRYTLAEKRETVILKCNVKDSSMLISLTYDVILVILCTVYAFKTRKCPENFNEAKFIGFTMYTTCIIWLAFLPIFYVTSSDYRVQTTTMCISVSLSGFVVLGCLFAPKVHIILFQPQKNVVTHRLHLNRFSVSGTGTTYSQSSASTYVPTVCNGREVLDSTTSSL

SEQ ID NO: 1163 - DNA, 3655 bp, Rattus norvegicus
  ref <308>: DATABASE ACCESSION NUMBER: Refseq / NM_024000
  ref <309>: DATABASE ENTRY DATE: 2003-01-13
agtcgaagcggctgcagctggcgccgcgtctgccccgcgtgcccggagcggattctgccggccgcccccggagccctgctgagccggttatcgcttcctgcctgtgaccgaccagcgttgcagagcctagcaatgccgtttggttgtgtgactctgggtgacaagaagaactataaccagccatcggaagtgactgacagatatgatttgggacaagtcgtcaagaccgaggagttttgtgaaatcttccgggccaaggacaagacaacaggcaagctgcatacctgcaagaaattccagaagcgtgatggccgcaaggttcggaaggcagccaagaacgagattggaatcctgaagatggtaaagcaccccaacatcctgcagctggtagatgtgtttgtgacccgcaaagaatacttcatctttctggagctggccacggggagggaggtgtttgactggatcctggaccagggctactactcggagcgagacacgagcaacgtggtgcggcaggtcctggaggctgtggcctacttgcactctctcaagattgtgcacaggaacctcaagctagaaaacctagtgtactacaacaggctaaagaactcaaagattgtcatcagtgactttcacctggctaagctagagaacggtcttatcaaggagccctgtggaacgccggagtatctggcaccggaagtggtaggacggcaacggtatggacgtcctgtggattgttgggccattggtgtcatcatgtatatcctgctttcaggcaacccgcccttctatgaggaggtagaagaagatgactatgagaaccatgataagaatctcttccgcaagatcctcgccggtgactatgagtttgactctccgtactgggatgatatttctcaagcagccaaagacctggtcacaaggctgatggaggtggagcaagaccagcggatcaccgccgaagaggccatctcccatgaatggatttctggcaatgcagcttctgataagaacatcaaggatggcgtctgtgcccagatcgagaagaactttgccagagccaagtggaagaaggccgtccgagtgaccactctcatgaagcggctccgggcaccagagcagtctggaacggctgctacttcagatgctgccactcccggggctgctggtggggccgtcgctgcagctgcaggtggagctgccccagcctctggagccagtgctactgtaggcacagggggtgatgctgggtgtgcagccaagagcgatgacatggcctctgcagatcgtagtgccaccccagccacagatggcagtgccaccccagccacagatggcagtgtcaccccagccactgacgggagcatcaccccagccactgatgggagtgtcactccagctactgacaggagtgctacaccagctactgatgggagagccacaccagccacagaagagagcacagtgcccgccgctcaaagcagtgccgcgccagctgcaaaggcagcagccacccctgagccggctgtggcccagccggacagcacagccctagagggtgccacaggccaggctccaccctctagtaaaggagaagaggctactggctgtgcccaggagtctcagagggtggagacaagctgaatgggcagtctgttgggggttttgagggatgggaaggagggtgggagtttggatgaggggcttctcactgtatatagagtcactggcatgatgccctagctccccccaagctccctcatcccagtggggcatgcctgggggccatgggagagcagtgtcgtctcctgtgtggatgtatgtgagtggtgggcaggccagaggcagggccagccccagcccctgcatggattccttgtggctttctgtctttcgctagcttcaccagtttctgttccttgtgggatgctgctctagggatactcagggggtccttgctctccttcccttcccgtcttctcatgtccccaggcaggccctgcaagcctcatactttcccaggccctaaatgggtggccttgccctgagagctggtcctccagcgaggccctgtcagcagtgttaggctcctgcacacgaaggtgtgtgtacctgtggtgtttgggctgctctaggagtagatgctggctgtaaaagatgatgcagaaatctagggcagtgtgctttaagttaagtctggtcacatggttgggggcaggcactgcatgttagctgtggggatcctcagaagtgggagagagaatgggtagaagcgtccatctttttccctgggtgggggtggggatcttccctctgaagatccttgtgttatttcatagcctcctgagtcctgtagtgggttgctctgcatcctgattcttacgacactccaaaggaagagagaaacatgttggatgcagcagcgatgcctaggagaacagagtacagggccagcagcaccagtgccccagcctatctgggtcttctctgtgagcgagatagggagggctggtgtcccccatggtcttcctagatgccactaccaacgaagagacctttcccataaccacctcatgcaggctcaggccataaatcctcttcctcccagggaggcatggcagtacctcataggctgctttgggagcttgcttttcacagcagcagattttctgttcttcgttcagcaatgcggagaggctttacctctgtgtctactaccagaggctgaggtatcgctcagccatgggatgaggaagtagaataagatttcccagctccctgagggatgctctcggcaggcacccttggtcagactctaccacagcctgcacaggcagccacgctggtccttgcccttgctcggcactccatggtggtactgcccttctccctgcatgcctgtgggtctgctctggtatgtgaaggttggtgggctaactgtgtgcctgctgaacctggcaaataaacgtcaccctgcaaagcctctggccaccctcttgcctttgcttcctctgtcctattggggaggagcctatggaaggcagtgtgggagggaagaggccatgggagcagttccgggtagcggctgatgctcagtgcattgcttggggtaagagtggaggtcaccttctccgatgtgtacctggatgatgttaatggtaaatcctctgggctcaaaaaaaccatgagtggtgtgtttaagccaagaagtatccctagccgagcactgaagggctgatgcttttccaattcttgttgacgaagagcctttgtcttaacttggacatagaggtggaatccactcagggacaaccactataggaagtgaccttgttcatgggcacagtgggcctccttgggctggggagaaagtggggttgcacaagttttgtgctgtatgttgatgcctacttcctgtgaatacctgtgctttccacttagaccaaaaagatttcattctgtcttccctggctgacgcagacctgctttataatatggagtcatgtatgttccttttgggggagtaatattgctaatgatactataaaaatccctaaggagattcgcttcaactcggaggggctttggtaaactcatctgggttgctttctcagggaggaccttaaattatctgatgtgggaataataaaga

SEQ ID NO: 1164 - protein, 504 aa, Rattus norvegicus
  ref <308>: DATABASE ACCESSION NUMBER: Refseq / NP_076490
  ref <309>: DATABASE ENTRY DATE: 2003-01-13
MPFGCVTLGDKKNYNQPSEVTDRYDLGQVVKTEEFCEIFRAKDKTTGKLHTCKKFQKRDGRKVRKAAKNEIGILKMVKHPNILQLVDVFVTRKEYFIFLELATGREVFDWILDQGYYSERDTSNVVRQVLEAVAYLHSLKIVHRNLKLENLVYYNRLKNSKIVISDFHLAKLENGLIKEPCGTPEYLAPEVVGRQRYGRPVDCWAIGVIMYILLSGNPPFYEEVEEDDYENHDKNLFRKILAGDYEFDSPYWDDISQAAKDLVTRLMEVEQDQRITAEEAISHEWISGNAASDKNIKDGVCAQIEKNFARAKWKKAVRVTTLMKRLRAPEQSGTAATSDAATPGAAGGAVAAAAGGAAPASGASATVGTGGDAGCAAKSDDMASADRSATPATDGSATPATDGSVTPATDGSITPATDGSVTPATDRSATPATDGRATPATEESTVPAAQSSAAPAAKAAATPEPAVAQPDSTALEGATGQAPPSSKGEEATGCAQESQRVETS

SEQ ID NO: 1165 - DNA, 3012 bp, Homo sapiens
  ref <308>: DATABASE ACCESSION NUMBER: Refseq / NM_024046
  ref <309>: DATABASE ENTRY DATE: 2001-12-10
ggcacgaggctagccgaagcggctgcatctggcgccgcgtctgccccgcgtgctcggagcggattctgcccgccgtccccggagccctcggcgccccgctgagcccgcgatcacttcctccctgtgaccaaccggcgctgcaggttagagcctggcaatgccgtttgggtgtgtgactctgggcgacaagaagaactataaccagccatcggaggtgactgacagatatgatttgggacaggtcatcaagactgaggagttttgtgaaatcttccgggccaaggacaagacgacaggcaagctgcacacctgcaagaagttccagaagcgggacggccgcaaggtgcggaaagctgccaagaacgagataggcatcctcaagatggtgaagcatcccaacatcctacagctggtggatgtgtttgtgacccgcaaggagtactttatcttcctggagctggccacggggagggaggtgtttgactggatcctggaccagggctactactcggagcgagacacaagcaacgtggtacggcaagtcctggaggccgtggcctatttgcactcactcaagatcgtgcacaggaatctcaagctggagaacctggtttactacaaccggctgaagaactcgaagattgtcatcagtgacttccatctggctaagctagaaaatggcctcatcaaggagccctgtgggacccccgagtatctggccccagaggtggtaggccggcagcggtatggacgccctgtggactgctgggccattggagtcatcatgtacatcctgctttcaggcaatccacctttctatgaggaggtggaagaagatgattatgagaaccatgataagaatctcttccgcaagatcctggctggtgactatgagtttgactctccatattgggatgatatttcgcaggcagccaaagacctggtcacaaggctgatggaggtggagcaagaccagcggatcactgcagaagaggccatctcccatgagtggatttctggcaatgctgcttctgataagaacatcaaggatggtgtctgtgcccagattgaaaagaactttgccagggccaagtggaagaaggctgtccgagtgaccaccctcatgaaacggctccgggcaccagagcagtccagcacggctgcagcccagtcggcctcagccacagacactgccacccccggggctgcaggtggggccacagctgcagctgcgagtggagctacctcagcccctgagggtgatgctgctcgtgctgcaaagagtgataatgtggcccccgcagaccgtagtgccaccccagccacagatggaagtgccaccccagccactgatggcagtgtcaccccagccaccgatggaagcatcactccagccactgatgggagtgtcaccccagccactgacaggagcgctactccagccactgatgggagagccacaccagccacagaagagagcactgtgcccaccacccaaagcagtgccatgctggccaccaaggcagctgccacccctgagccggctatggcccagccggacagcacagccccagagggcgccacaggccaggctccaccctctagtaaaggggaagaggctgctggttgtgcccaggagtctcaaagggaggaggccagctgagtaggcagcctggtgagggggggcaggggatgggcaggagggtgggagagtggatgaggggcttctcactgtacatagagtcactggcatgatgccctcgctcccccatgcccccacatcccagtggggcataactaggggtcacgggagagcagtctcgtctcctgtgtgtatgtgtgtgagtggtgggcaggccagtggcagggccggccccagcccctgcatggattccttgtggcttttctgtcttttgctagcttcaccagtttctgttccttgtgggatgctgctctagggatactcagggggctcctgctctccttccccttcccttcttgcctcaccattcccctaggcaggccctgcaggtcccacactctcccaggccctaaacttgggcggccttgccctgagagctggtcctccagcgaggccctgtcagcggtcttaggctcctgcacatgaaggtgtgtgcctgtggtgtgtgggctgctctaggagcagatacaggctggtatagaggatgcagaaaggtagggcagtatgtttaagtccagacttggcacatggctagggatactgctcactagctgtggaggtcctcaggagtggagagaatgagtaggagggcagaagcttccatttttgtccttcctaagaccctgttatttgtgttatttcctgcctttccgagtcctgcagtgggctgccctgtaccctgaacctcatgagcctctaagggaaaggaggaacaattaggacgtggcaatgagacctggcagggcagagtacaagcccagcacccagtgtcccagccttactgggtccttaccctgggccaaacagggagggctgatacctccttgctcttcctagatgcccacctcctacaatctcagcccacaagtcctctccaccctagggggcttgctgcatggcaataactcataatctgatttggaggtttgccctttacaggggcagattttctgctcagttcaacaatgaaatgaagaggaactccctctttctacagctcacttctatcagaggcccaggtgcctcagagccacattgagttgctttttctgggatgaggaagtagggttaaactccccagtttcctgagggaggctcctgacaggtgccctttgtcagaccctaccacagcctggataggcagccacattggtcctcgcccttgctcggcactccgtggtggtcctgcccttctccctgcatgcctgtgggtctgctctggtgtgtgaaggtcggtgggttaactgtgtgcctactgaacctggcaaataaacatcaccctgcaaagccaaaaaaaaaaaaaaaaaaaa

SEQ ID NO: 1166 - protein, 501 aa, Homo sapiens
  ref <308>: DATABASE ACCESSION NUMBER: Refseq / NP_076951
  ref <309>: DATABASE ENTRY DATE: 2001-12-10
MPFGCVTLGDKKNYNQPSEVTDRYDLGQVIKTEEFCEIFRAKDKTTGKLHTCKKFQKRDGRKVRKAAKNEIGILKMVKHPNILQLVDVFVTRKEYFIFLELATGREVFDWILDQGYYSERDTSNVVRQVLEAVAYLHSLKIVHRNLKLENLVYYNRLKNSKIVISDFHLAKLENGLIKEPCGTPEYLAPEVVGRQRYGRPVDCWAIGVIMYILLSGNPPFYEEVEEDDYENHDKNLFRKILAGDYEFDSPYWDDISQAAKDLVTRLMEVEQDQRITAEEAISHEWISGNAASDKNIKDGVCAQIEKNFARAKWKKAVRVTTLMKRLRAPEQSSTAAAQSASATDTATPGAAGGATAAAASGATSAPEGDAARAAKSDNVAPADRSATPATDGSATPATDGSVTPATDGSITPATDGSVTPATDRSATPATDGRATPATEESTVPTTQSSAMLATKAAATPEPAMAQPDSTAPEGATGQAPPSSKGEEAAGCAQESQREEAS

SEQ ID NO: 1167 - DNA, 216 bp, Rattus norvegicus
  ref <308>: DATABASE ACCESSION NUMBER: EMBL / AA891965
  ref <309>: DATABASE ENTRY DATE: 2000-03-03
cttggggggttccccagatcattcttcactgcctaccatcagaagatcccaaaggctccagggttcgacaaacgcctgctgctctaccagctctttaactacctaaaccattggaaccactttgggcgggagtatagaagcccatccctggggatgatgaggaaactgctcaggtagcagagggctggacctaataaaacgtcaaactggatctct

SEQ ID NO: 1168 - DNA, 988 bp, Homo sapiens
  ref <308>: DATABASE ACCESSION NUMBER: Refseq / NM_022158
  ref <309>: DATABASE ENTRY DATE: 2001-12-10
cgtcaagcttggcacgaggccatggagcagctgctgcgcgccgagctgcgcaccgcgaccctgcgggccttcggcggccccggcgccggctgcatcagcgagggccgagcctacgacacggacgcaggcccagtgttcgtcaaagtcaaccgcaggacgcaggcccggcagatgtttgagggggaggtggccagcctggaggccctccggagcacgggcctggtgcgggtgccgaggcccatgaaggtcatcgacctgccgggaggtggggccgcctttgtgatggagcatttgaagatgaagagcttgagcagtcaagcatcaaaacttggagagcagatggcagatttgcatctttacaaccagaagctcagggagaagttgaaggaggaggagaacacagtgggccgaagaggtgagggtgctgagcctcagtatgtggacaagttcggcttccacacggtgacgtgctgcggcttcatcccgcaggtgaatgagtggcaggatgactggccgacctttttcgcccggcaccggctccaggcgcagctggacctcattgagaaggactatgctgaccgagaggcacgagaactctggtcccggctacaggtgaagatcccggatctgttttgtggcctagagattgtccccgcgttgctccacggggatctctggtcgggaaacgtggctgaggacgacgtggggcccattatttacgacccggcttccttctatggccattccgagtttgaactggcaatcgccttgatgtttggggggttccccagatccttcttcaccgcctaccaccggaagatccccaaggctccgggcttcgaccagcggctgctgctctaccagctgtttaactacctgaaccactggaaccacttcgggcgggagtacaggagcccttccttgggcaccatgcgaaggctgctcaagtagcggcccctgccctcccttcccctgtccccgtccccgt

SEQ ID NO: 1169 - protein, 309 aa, Homo sapiens
  ref <308>: DATABASE ACCESSION NUMBER: Refseq / NP_071441
  ref <309>: DATABASE ENTRY DATE: 2001-12-10
MEQLLRAELRTATLRAFGGPGAGCISEGRAYDTDAGPVFVKVNRRTQARQMFEGEVASLEALRSTGLVRVPRPMKVIDLPGGGAAFVMEHLKMKSLSSQASKLGEQMADLHLYNQKLREKLKEEENTVGRRGEGAEPQYVDKFGFHTVTCCGFIPQVNEWQDDWPTFFARHRLQAQLDLIEKDYADREARELWSRLQVKIPDLFCGLEIVPALLHGDLWSGNVAEDDVGPIIYDPASFYGHSEFELAIALMFGGFPRSFFTAYHRKIPKAPGFDQRLLLYQLFNYLNHWNHFGREYRSPSLGTMRRLLK

SEQ ID NO: 1170 - DNA, 1561 bp, Rattus norvegicus
  ref <308>: DATABASE ACCESSION NUMBER: EMBL / X02284
  ref <309>: DATABASE ENTRY DATE: 1996-10-11
atccatcctatttgacggctgccacctcacacagcttctgataccttggagcactcttcttccttggctgtacctgtcatcatggctcaccgatttccagccctcacctcagagcagaagaaggagctctccgagattgcgcagcgcattgttgccaatgggaagggtatcttggctgcagatgagtctgtgggcaccatgggaaaccgcctacagaggataaaggtggaaaacactgaagagaaccgaaggcagttccgagagctcctctttagtgtggacaattctatcagccagagcatcggcggagtgatccttttccatgagacgctctaccagaaggatagccagggaaagctgttcagaaacattctcaaggagaagggaattgtggtgggcatcaagctggaccaaggaggtgccccgcttgcaggaacaaacaaagaaaccaccattcaagggcttgacggcctctccgaacgctgtgctcagtacaagaaagacggagtcgactttgggaagtggcgtgctgtgctgaggatctcggaccagtgcccttccagccttgctatccaagaaaacgccaacgctctggctcgctacgccagcatctgccagcagaatgggctggtacctattgttgagccagaggttcttcctgatggagaccatgacctagagcactgccagtatgtttctgagaaggtcttggctgctgtctacaaggctctcaatgatcatcatgtttaccttgagggcaccctgctaaagccaaacatggtgactgctggacatgcctgcaccaagaagtacacacctgagcaagtggctatggccaccgtcacggctctccacagaactgttcctgcagctgtgcctagtatctgctttttgtctggaggcatgagtgaggaggatgctacacttaacctcaatgctatctaccgttgccctctacctaggccctggaaactaagcttttcatacggcagagccctccaggccagtgcattggctgcttggggcggcaaggctgcaaacaagaaggcaacccaggaagctttcatgaagcgggctgtggccaactgtcaggcagcccaaggacagtatgttcacacgggctcgtcaggcgctgcttccacgcagtcactcttcacagcctcctacacctactagataccgtcacctaccagccagctccagttgtcctaaatattttggttggagacctcaaaggcttcagtcagccctgaaattagatcacatctgattgaacttttgaaaacaccacatactgcgaatcagctgttgaagtgcggagtatgagcacgtcacccagtagtctccgaacacctccagttccccgtgttccagaacatccatccaagagaaggaacgggctttacatggaaggtcagtcttccatgcatacagccactactgagcaaagcagctcggaagggaaggaggagaagggcattttaacaaacatacttaccgggggttggttagagaagaggcacagcagcagaaaaagaaataaaaagtctatgaaccttca

SEQ ID NO: 1171 - DNA, 1593 bp, Rattus norvegicus; identical to SEQ ID NO: 321
  ref <308>: DATABASE ACCESSION NUMBER: Refseq / NM_057105
  ref <309>: DATABASE ENTRY DATE: 2003-01-13

SEQ ID NO: 1172 - protein, 530 aa, Rattus norvegicus; identical to SEQ ID NO: 322
  ref <308>: DATABASE ACCESSION NUMBER: Refseq / NP_476446
  ref <309>: DATABASE ENTRY DATE: 2003-01-13

SEQ ID NO: 1173 - DNA, 2368 bp, Homo sapiens; identical to SEQ ID NO: 323
  ref <308>: DATABASE ACCESSION NUMBER: Refseq / NM_007120
  ref <309>: DATABASE ENTRY DATE: 2002-04-04

SEQ ID NO: 1174 - protein, 534 aa, Homo sapiens; identical to SEQ ID NO: 324
  ref <308>: DATABASE ACCESSION NUMBER: Refseq / NP_009051
  ref <309>: DATABASE ENTRY DATE: 2002-04-04

SEQ ID NO: 1175 - DNA, 510 bp, Rattus norvegicus
  ref <308>: DATABASE ACCESSION NUMBER: EMBL / AI169104
  ref <309>: DATABASE ENTRY DATE: 2000-03-03
ggcacgaggcttagagccccagaccccagtttccccgaggtagcccttggatctagcagcaccctcttgacatgagtgccactgcggtgtttcgaggcctccggcccagccctgagctgcttcttctgggtctgctgttgctgccagctgtggttgctgtcaccagggctagtcctgaagaaagcgacggagatcttagctgtgtgtgtgtgaagaccagttcttccaggatccatctcaaacgcatcaccagcctggaggtgatcaaagcaggaccccactgtgcggttccccagctcatagccacgctgaagaatgggagcaaaatttgcctggaccggcaagtacctctgtataagaaaataatcaagaaactcctggagagttaggtacgagctgcctaaatgtgcaacctgttacatgggattcctggagtcttgtctacttttaatgtaactgcagtcttctgatgttttattatcctcgagatttaaataaatgcattgaacc

SEQ ID NO: 1176 - DNA, 439 bp, Homo sapiens
  ref <308>: DATABASE ACCESSION NUMBER: Refseq / NM_002619
  ref <309>: DATABASE ENTRY DATE: 2002-11-05
ccgcagcatgagctccgcagccgggttctgcgcctcacgccccgggctgctgttcctggggttgctgctcctgccacttgtggtcgccttcgccagcgctgaagctgaagaagatggggacctgcagtgcctgtgtgtgaagaccacctcccaggtccgtcccaggcacatcaccagcctggaggtgatcaaggccggaccccactgccccactgcccaactgatagccacgctgaagaatggaaggaaaatttgcttggacctgcaagccccgctgtacaagaaaataattaagaaacttttggagagttagctactagctgcctacgtgtgtgcatttgctatatagcatacttcttttttccagtttcaatctaactgtgaaagaaacttctgatatttgtgttatccttatgattttaaataaacaaaataaatc

SEQ ID NO: 1177 - protein, 101 aa, Homo sapiens
  ref <308>: DATABASE ACCESSION NUMBER: Refseq / NP_002610
  ref <309>: DATABASE ENTRY DATE: 2002-11-05
MSSAAGFCASRPGLLFLGLLLLPLVVAFASAEAEEDGDLQCLCVKTTSQVRPRHITSLEVIKAGPHCPTAQLIATLKNGRKICLDLQAPLYKKIIKKLLES

SEQ ID NO: 1178 - DNA, 305 bp, Rattus norvegicus
  misc_feature (1)..(305): n=a, c, g or t
  ref <308>: DATABASE ACCESSION NUMBER: EMBL / H31323
  ref <309>: DATABASE ENTRY DATE: 2000-03-04
aaagcaaaggcaccgtagatcttacgcatactttctgagtttcagccctgtaaaagaaatgttaagtttttagatactttatttcccgaataagatataaaatgatctatgaaagaaacagctggagctagagagatggctcaacagttaagagcactgcctgctctaccagaggccctgagttcaattcccagcaaccacatggtggctcacaacctctgtaatgagatctgatgccttcgtctgatgtgtctgaagacngctacagtgtactcatatataataaataaataaatctttaaaag

SEQ ID NO: 1179 - DNA, 2847 bp, Rattus norvegicus
  ref <308>: DATABASE ACCESSION NUMBER: Refseq / NM_031982
  ref <309>: DATABASE ENTRY DATE: 2003-01-13
cagctccaaggcacttgctccatttggggtgtgcctgcacctagctggttgcaaattgggccacagaggatctggaaaggatggaacaacgggctagcttagactcagaggagtctgagtccccaccccaagagaactcctgcctggaccctccagacagagaccctaactgcaagccacctccagtcaagccccacatcttcactaccaggagtcgtacccggctttttgggaagggtgactcggaggaggcctctcccctggactgcccttatgaggaaggcgggctggcttcctgccctatcatcactgtcagctctgttctaactatccagaggcctggggatggacctgccagtgtcaggccgtcatcccaggactccgtctccgctggtgagaagcccccgaggctctatgatcgcaggagcatcttcgatgctgtggctcagagtaactgccaggagctggagagcctgctgcccttcctgcagaggagcaagaagcgcctgactgacagcgagttcaaagacccagagacaggaaagacctgtctgctaaaagccatgctcaatctgcacaatgggcagaatgacaccatcgctctgctcctggacgttgcccggaagacagacagcctgaagcagtttgtcaatgccagctacacagacagctactacaagggccagacagcactgcacattgccattgaacggcggaacatgacgctggtgaccctcttggtggagaatggagcagatgtccaggctgcggctaacggggacttcttcaagaaaaccaaagggaggcctggcttctactttggtgagctgcccctgtccctggctgcgtgcaccaaccagctggccattgtgaagttcctgctgcagaactcctggcagcctgcagacatcagcgcccgggactcagtgggcaacacggtgcttcatgccctggtggaggtggcagataacacagttgacaacaccaagttcgtgacaagcatgtacaacgagatcttgatcctgggggccaaactccaccccacgctgaagctggaagagatcaccaacaggaaggggctcacgccactggctctggctgctagcagtgggaagatcggggtcttggcctacattctccagagggagatccatgaacccgagtgccgacacctatccaggaagttcaccgaatgggcctatgggccagtgcactcctccctttatgacctgtcctgcattgacacctgtgaaaagaactcggttctggaggtgatcgcttacagcagcagtgagacccctaaccgtcatgacatgcttctcgtggaacccttgaaccgactcctacaggacaagtgggacagatttgtcaagcgcatcttctacttcaacttcttcgtctactgcttgtatatgatcatcttcaccgcggctgcctactatcggcctgtggaaggcttgcccccctataagctgaaaaacaccgttggggactatttccgagtcaccggagagatcttgtctgtgtcaggaggagtctacttcttcttccgagggattcaatatttcctgcagaggcgaccatccctcaagagtttgtttgtggacagctacagtgagatacttttctttgtacagtcgctgttcatgctggtgtctgtggtactgtacttcagccaacgcaaggagtatgtggcttccatggtgttctccctggccatgggctggaccaacatgctctactatacccgaggattccagcagatgggcatctatgctgtcatgattgagaagatgatcctcagagacctgtgccggtttatgttcgtctacctcgtgttcttgtttggattttccacagctgtggtgacactgattgaggatgggaagaataactctctgcctatggagtccacaccacacaagtgccgggggtctgcctgcaagccaggtaactcttacaacagcctgtattccacatgtctggagctgttcaagttcaccatcggcatgggcgacctggagttcactgagaactacgacttcaaggctgtcttcatcatcctgttactggcctatgtgattctcacctacatccttctgctcaacatgctcattgctctcatgggtgagaccgtcaacaagattgcacaagagagcaagaacatctggaagctgcagagagccatcaccatcctggatacagagaagagcttcctgaagtgcatgaggaaggccttccgctctggcaagctgctgcaggtggggttcactcctgacggcaaggatgactaccggtggtgtttcagggtggacgaggtaaactggactacctggaacaccaatgtgggtatcatcaacgaggacccaggcaactgtgagggcgtcaagcgcaccctgagcttctccctgaggtcaggccgagtttcagggagaaactggaagaactttgccctggttccccttctgagggatgcaagcactcgagatagacatgccacccagcaggaagaagttcaactgaagcattatacgggatcccttaagccagaggatgctgaggttttcaaggattccatggtcccaggggagaaataatggacactatgcagggatcaatgcggggtctttgggtggtctgcttagggaaccagcagggttgacgttatctgggtccactctgtgcctgcctaggcacattcctaggacttcggcgggcctgctgtgggaactgggaggtgtgtgggaattgagatgtgtatccaaccatgatctccaaacatttggctttcaactctttatggactttattaaacagagtgaatggcaaatctctacttggacacat

SEQ ID NO: 1180 - protein, 838 aa, Rattus norvegicus
  ref <308>: DATABASE ACCESSION NUMBER: Refseq / NP_114188
  ref <309>: DATABASE ENTRY DATE: 2003-01-13
MEQRASLDSEESESPPQENSCLDPPDRDPNCKPPPVKPHIFTTRSRTRLFGKGDSEEASPLDCPYEEGGLASCPIITVSSVLTIQRPGDGPASVRPSSQDSVSAGEKPPRLYDRRSIFDAVAQSNCQELESLLPFLQRSKKRLTDSEFKDPETGKTCLLKAMLNLHNGQNDTIALLLDVARKTDSLKQFVNASYTDSYYKGQTALHIAIERRNMTLVTLLVENGADVQAAANGDFFKKTKGRPGFYFGELPLSLAACTNQLAIVKFLLQNSWQPADISARDSVGNTVLHALVEVADNTVDNTKFVTSMYNEILILGAKLHPTLKLEEITNRKGLTPLALAASSGKIGVLAYILQREIHEPECRHLSRKFTEWAYGPVHSSLYDLSCIDTCEKNSVLEVIAYSSSETPNRHDMLLVEPLNRLLQDKWDRFVKRIFYFNFFVYCLYMIIFTAAAYYRPVEGLPPYKLKNTVGDYFRVTGEILSVSGGVYFFFRGIQYFLQRRPSLKSLFVDSYSEILFFVQSLFMLVSVVLYFSQRKEYVASMVFSLAMGWTNMLYYTRGFQQMGIYAVMIEKMILRDLCRFMFVYLVFLFGFSTAVVTLIEDGKNNSLPMESTPHKCRGSACKPGNSYNSLYSTCLELFKFTIGMGDLEFTENYDFKAVFIILLLAYVILTYILLLNMLIALMGETVNKIAQESKNIWKLQRAITILDTEKSFLKCMRKAFRSGKLLQVGFTPDGKDDYRWCFRVDEVNWTTWNTNVGIINEDPGNCEGVKRTLSFSLRSGRVSGRNWKNFALVPLLRDASTRDRHATQQEEVQLKHYTGSLKPEDAEVFKDSMVPGEK

SEQ ID NO: 1181 - DNA, 4414 bp, Homo sapiens
  ref <308>: DATABASE ACCESSION NUMBER: Refseq / NM_080706
  ref <309>: DATABASE ENTRY DATE: 2002-02-10
ctgccgctcaccctattccagggacacagtctgcttggctcttctggactgagccatcctcatcaccgagatcctccctgaattcagcccacgacagccaccccggccgttttccttgttctgtgtggggagggaggcagcgcggtggttatcaacctcaccctgcagaggaggcacctgaggcccagagacgaggagggatgggtctaacccagaaccacagatggctctgagccgggggcctgtccaccctcccaggccgacgtcagtggccgcaggactgcctgggccctgctaggcctgctcacctctgaggcctctggggtgagaggttcagtcctggaaacacttcagttctagggggctgggggcagcagcaagttggagttttggggtaccctgcttcacagggcccttggcaaggagggcaggtggggtctaaggacaagcagtccttactttgggagtcaaccccggcgtggtggctgctgcaggttgcacactgggccacagaggatccagcaaggatgaagaaatggagcagcacagacttgggggcagctgcggacccactccaaaaggacacctgcccagaccccctggatggagaccctaactccaggccacctccagccaagccccagctctccacggccaagagccgcacccggctctttgggaagggtgactcggaggaggctttcccggtggattgccctcacgaggaaggtgagctggactcctgcccgaccatcacagtcagccctgttatcaccatccagaggccaggagacggctccaccggtgccaggctgctgtcccaggactctgtcgccgccagcaccgagaagaccctcaggctctatgatcgcaggagtatctttgaagccgttgctcagaataactgccaggatctggagagcctgctgctcttcctgcagaagagcaagaagcacctcacagacaacgagttcaaagaccctgagacagggaagacctgtctgctgaaagccatgctcaacctgcatgacggacagaacaccaccatccccctgctcctggagatcgcgcggcaaacggacagcctgaaggagcttgtcaacgccagctacacggacagctactacaagggccagacagcactgcacatcgccatcgagagacgcaacatggccctggtgaccctcctggtggagaacggagcagacgtccaggctgcggcccatggggacttctttaagaaaaccaaagggcggcctggattctacttcggtgaactgcccctgtccctggccgcgtgcaccaaccagctgggcatcgtgaagttcctgctgcagaactcctggcagacggccgacatcagcgccagggactcggtgggcaacacggtgctgcacgccctggtggaggtggccgacaacacggccgacaacacgaagtttgtgacgagcatgtacaatgagattctgatcctgggggccaaactgcacccgacgctgaagctggaggagctcaccaacaagaagggaatgacgccgctggctctggcagctgggaccgggaagatcggggtcttggcctatattctccagcgggagatccaggagcccgagtgcaggcacctgtccaggaagttcaccgagtgggcctacgggcccgtgcactcctcgctgtacgacctgtcctgcatcgacacctgcgagaagaactcggtgctggaggtgatcgcctacagcagcagcgagacccctaatcgccacgacatgctcttggtggagccgctgaaccgactcctgcaggacaagtgggacagattcgtcaagcgcatcttctacttcaacttcctggtctactgcctgtacatgatcatcttcaccatggctgcctactacaggcccgtggatggcttgcctccctttaagatggaaaaaattggagactatttccgagttactggagagatcctgtctgtgttaggaggagtctacttctttttccgagggattcagtatttcctgcagaggcggccgtcgatgaagaccctgtttgtggacagctacagtgagatgcttttctttctgcagtcactgttcatgctggccaccgtggtgctgtacttcagccacctcaaggagtatgtggcttccatggtattctccctggccttgggctggaccaacatgctctactacacccgcggtttccagcagatgggcatctatgccgtcatgatagagaagatgatcctgagagacctgtgccgtttcatgtttgtctacatcgtcttcttgttcgggttttccacagcggtggtgacgctgattgaagacgggaagaatgactccctgccgtctgagtccacgtcgcacaggtggcgggggcctgcctgcaggccccccgatagctcctacaacagcctgtactccacctgcctggagctgttcaagttcaccatcggcatgggcgacctggagttcactgagaactatgacttcaaggctgtcttcatcatcctgctgctggcctatgtaattctcacctacatcctcctgctcaacatgctcatcgccctcatgggtgagactgtcaacaagatcgcacaggagagcaagaacatctggaagctgcagagagccatcaccatcctggacacggagaagagcttccttaagtgcatgaggaaggccttccgctcaggcaagctgctgcaggtggggtacacacctgatggcaaggacgactaccggtggtgcttcagggtggacgaggtgaactggaccacctggaacaccaacgtgggcatcatcaacgaagacccgggcaactgtgagggcgtcaagcgcaccctgagcttctccctgcggtcaagcagagtttcaggcagacactggaagaactttgccctggtcccccttttaagagaggcaagtgctcgagataggcagtctgctcagcccgaggaagtttatctgcgacagttttcagggtctctgaagccagaggacgctgaggtcttcaagagtcctgccgcttccggggagaagtgaggacgtcacgcagacagcactgtcaacactgggccttaggagaccccgttgccacggggggctgctgagggaacaccagtgctctgtcagcagcctggcctggtctgtgcctgcccagcatgttcccaaatctgtgctggacaagctgtgggaagcgttcttggaagcatggggagtgatgtacatccaaccgtcactgtccccaagtgaatctcctaacagactttcaggtttttactcactttactaaacagtttggatggtcagtctctactgggacatgttaggcccttgttttctttgattttattcttttttttgagacagaatttcactcttctcacccaggctggaatgcagtggcacaattttggctccctgcaacctccgcctcctggattccagcaattctcctgcctcggcttcccaagtagctgggattacaggcacgtgccaccatgtctggctaattttttgtatttttttaatagatatggggtttcgccatgttggccaggctggtctcgaactcctgacctcaggtgatccgcccacctcggcctcccaaagtgctgggattacaggtgtgagcctccacacctggctgttttctttgattttattcttttttttttttctgtgagacagagtttcactcttgttgcccaggctggagtgcagtggtgtgatcttggctcactgcaacctctgcctcccgggttcaagcgattcttctgcttcagtctcccaagtagcttggattacaggtgagcactaccacgcccggctaatttttgtatttttaatagagacggggtttcaccatgttggccaggctggtctcgaactcttgacctcaggtgatctgcccgccttggcctcccaaagtgctgggattacaggtgtgagccgctgcgctcggccttctttgattttatattattaggagcaaaagtaaatgaagcccaggaaaacacctttgggaacaaactcttcctttgatggaaaatgcagaggcccttcctctctgtgccgtgcttgctcctcttacctgcccgggtggtttgggggtgttggtgtttcctccctggagaagatgggggaggctgtcccactcccagctctggcagaatcaagctgttgcagcagtgccttcttcatccttccttacgatcaatcacagtctccagaagatcagctcaattgctgtgcaggttaaaactacagaaccacatcccaaaggtacctggtaagaatgtttgaaagatcttccatttctaggaaccccagtcctgcttctccgcaatggcacatgcttccactccatccatactggcatcctcaaataaacagatatgtatacatat

SEQ ID NO: 1182 - protein, 839 aa, Homo sapiens
  ref <308>: DATABASE ACCESSION NUMBER: Refseq / NP_542437
  ref <309>: DATABASE ENTRY DATE: 2002-02-10
MKKWSSTDLGAAADPLQKDTCPDPLDGDPNSRPPPAKPQLSTAKSRTRLFGKGDSEEAFPVDCPHEEGELDSCPTITVSPVITIQRPGDGSTGARLLSQDSVAASTEKTLRLYDRRSIFEAVAQNNCQDLESLLLFLQKSKKHLTDNEFKDPETGKTCLLKAMLNLHDGQNTTIPLLLEIARQTDSLKELVNASYTDSYYKGQTALHIAIERRNMALVTLLVENGADVQAAAHGDFFKKTKGRPGFYFGELPLSLAACTNQLGIVKFLLQNSWQTADISARDSVGNTVLHALVEVADNTADNTKFVTSMYNEILILGAKLHPTLKLEELTNKKGMTPLALAAGTGKIGVLAYILQREIQEPECRHLSRKFTEWAYGPVHSSLYDLSCIDTCEKNSVLEVIAYSSSETPNRHDMLLVEPLNRLLQDKWDRFVKRIFYFNFLVYCLYMIIFTMAAYYRPVDGLPPFKMEKIGDYFRVTGEILSVLGGVYFFFRGIQYFLQRRPSMKTLFVDSYSEMLFFLQSLFMLATVVLYFSHLKEYVASMVFSLALGWTNMLYYTRGFQQMGIYAVMIEKMILRDLCRFMFVYIVFLFGFSTAVVTLIEDGKNDSLPSESTSHRWRGPACRPPDSSYNSLYSTCLELFKFTIGMGDLEFTENYDFKAVFIILLLAYVILTYILLLNMLIALMGETVNKIAQESKNIWKLQRAITILDTEKSFLKCMRKAFRSGKLLQVGYTPDGKDDYRWCFRVDEVNWTTWNTNVGIINEDPGNCEGVKRTLSFSLRSSRVSGRHWKNFALVPLLREASARDRQSAQPEEVYLRQFSGSLKPEDAEVFKSPAASGEK

SEQ ID NO: 1183 - DNA, 8275 bp, Rattus norvegicus
  ref <308>: DATABASE ACCESSION NUMBER: EMBL / M59786
  ref <309>: DATABASE ENTRY DATE: 2000-03-04
cgcagaattctaaatctgagagcaaaagctcaaattcactgccaagcgataaggccgtatgagatttttatggccttcaaacgtggccacagacattgtttctgagtttttaaaaagtacaaggaaaaatacaagtgggatagctgttcagttgtgacatcagctgttggtccccaactggagtcacaatgattcgggccttcgctcagccatccacacccccataccagccgctctccagttgcctgtctgaggacacagagaggaagttcaagggcaaggtggtacacgaagctcaactcaactgtttctacatttctcctggaggttccaactatgggagcccacgcccagctcatgccaacatgaatgccaatgcagctgcaggacttgcccccgagcacatccctactccaggggcagcactgtcctggctggcagccatcgatgccgcccggcaggccaagttaatgggcagtgctggcaatgcgaccatctctaccgtcagttccacacagcggaagcggcagcagtatgggaaacccaagaagcaggggggcacaactgccacacggccgccccgggctctgctctgcctgactctgaagaaccccatcaggagggcatgcatcagcattgttgaatggaaaccatttgaaataattattttattgacgatttttgccaattgtgtggccttagcaatctatattccctttccggaagatgactccaacgccaccaactccaacctggaacgggtggagtatctcttcctcatcatttttaccgtggaagcatttttaaaagtgattgcctacggactactcttccaccccaacgcttacctccgcaacggttggaatttactagattttataatcgtggttgtagggctttttagtgcaattttagaacaagcaaccaaagctgacggggccaacgctctgggagggaaaggagcgggattcgatgtgaaggcactgagagctttccgtgtgcttcgtcccctgcggctggtgtctggagtcccaagtctccaggtggtcctgaactccatcatcaaggccatggtgcccctgctgcacattgccctcctcgtgctcttcgtcatcatcatctatgccattatcggcctggagctcttcatggggaagatgcacaagacctgctacaaccaggagggcataatagatgttccagcggaagaggatccctccccttgtgctttggagacaggccatgggcgacagtgtcagaacgggaccgtgtgcaagcccgggtgggatgggcccaagcacggcatcaccaacttcgacaacttcgccttcgccatgctgacggtgttccagtgtatcaccatggagggctggacagacgtgctgtactggatgcaagacgctatgggctatgagttgccctgggtgtattttgtcagtctggtcatctttggatcctttttcgttctaaatctggttctcggtgttttgagcggagagttttccaaagagagggagaaagccaaagctcgaggagacttccagaagcttcgtgagaagcagcagctagaagaagatctcaaaggctacctggactggatcacccaggcggaagacatagaccctgagaatgaggacgagggcatggatgaagacaaaccccgaaacatgagcatgcccacaagtgagactgagtctgtcaacaccgaaaacgtggctggaggtgacatcgagggtgaaaactgtggagcccggcttgcccaccggatctccaaatccaagttcagccgctactggcgccggtggaatagattctgcagaagaaagtgccgtgccgcagttaagtccaacgtcttctactggctggtgatcttcctggtgttcctcaacaccctcaccattgcctccgaacactacaaccagcctcattggctcacagaagtgcaagacacggccaacaaggccctcctggcccttttcacggcagaaatgctcctgaagatgtacagcctgggtctgcaggcctactttgtatccctcttcaaccgctttgactgtttcattgtgtgcgggggcatcctggagaccatcctggtggagacgaagatcatgtcgcccctgggcatctcctgctggagatgtgtgcggctgctcaggattttcaagatcaccaggtactggaactccctgagcaacctcgtggcgtccttgctgaactcactgcgctccatcgcctccctgctgctactcctcttcctcttcatcatcatcttctccctcctggggatgcagctgtttggtggaaagttcaactttgatgagatgcagacccgtaggagcacgtttgataacttcccgcagtctctcctcactgtgtttcagatcctgaccggggaggactggaattcggtgatgtatgatgggatcatggcttatggcggcccctcttttccagggatgttagtctgtatttacttcatcatcctcttcatctctccaaattatatcctactgaatctcttcttggccattgcggtggacaacctggctgatgcggagagcctgacctctgcccaaaaagaggaagaagaagagaaggagagaaagaagctggccaggactgccagcccagaaaagaaacaggaggtgatggagaaaccagcagtagaggagagcaaagaggagaaaattgagctgaagtccattacagcagatggagaatccccgcccactaccaagatcaacatggatgacctccagcccagtgaaaatgaggacaagagtccccactccaacccagacactgcaggtgaagaggatgaggaggagcccgagatgcctgtgggcccacgcccccggcccctgtctgagctgcaccttaaggaaaaggcagtccccatgccggaagccagtgcatttttcatcttcagcccaaacaacaggttccgcctgcagtgccaccgcattgtcaatgacacgatcttcaccaacctcatcctcttcttcattctgctcagtagcatctccctggcggctgaggaccccgtccagcacacctccttcaggaaccacattctgttttattttgacattgtttttaccaccattttcaccattgaaattgctctaaagatgactgcttacggggctttcctgcacaagggctctttctgccgaaattacttcaatatcctggacctgctggtggttagcgtgtccctcatctcctttggcattcagtccagcgcgatcaacgttgtgaagattttaagagtgcttcgtgtcctcaggcccctgaggatcaacagggccaaggggctaaagcacgtcgttcagtgtgtgtttgtggccatccggaccattggaaacattgtaattgtcaccactctgctgcagttcatgttcgcctgcattggggtccagctcttcaagggaaagctctatacctgttcggatagttccaaacagacggaggcagaatcgaagggtaactatataacatacaagaccggagaagttgaccaccccattatccagcctcgaagttgggagaacagcaagttcgactttgacaatgttctggcagccatgatggccctctttaccgtctccaccttcgaggggtggccagagctgctgtaccgctccattgactcccacacagaagacaagggtcccatctacaactatcgtgtggagatctccatcttcttcatcatctacatcatcatcattgccttcttcatgatgaacatcttcgtgggtttcgtcattgtcaccttccaggagcagggggaacaagaatacaagaactgtgagctggacaagaaccagagacaatgtgtggaatatgccctcaaggcccgacccttgccaaggtacatccccaagaaccagcaccagtacaaagtgtggtacgtggtcaactccacctacttcgagtatctgatgttcgtcctcatcctgctcaacaccatctgcctggccatgcagcactacggccagagctgcctcttcaaaatcgccatgaatatactcaacatgcttttcactggcctcttcacggtggagatgatcctgaagctcattgccttcaaacccaagcactatttctgtgatgcatggaatacatttgacgccttgattgttgtgggtagcattgttgatatagcaatcaccgaggtacacccagctgaacatacccaatgctctccctctatgagtgcagaggagaactcccgcatctccatcaccttcttccgcctcttccgggtcatgcgcctggtgaagctgctgagccgaggggaaggcatccggaccctgctgtggaccttcatcaagtccttccaggccctgccctatgtggcccttttgattgtgatgctgttctttatctatgcagtgattgggatgcaggtatttgggaagattgccctgaatgacaccacagagatcaatcggaacaacaacttccagacgttccctcaggctgtgctactgctcttcaggtgcgccactggggaggcctggcaggatatcatgctagcctgtatgccaggcaagaagtgtgctccagagtctgagcccagcaacagcacggaaggggagacaccctgtggcagcagtttcgctgtcttctacttcatcagcttctacatgctctgtgccttcctgatcatcaacctctttgtagctgttatcatggacaactttgactacctgactagggattggtctatccttggtccccatcacctggatgaattcaagagaatctgggccgaatatgaccctgaagccaagggtcggatcaaacacttggatgtggtgaccctcctccgtcgaattcagcccccactgggttttgggaagttgtgtcctcaccgtgtggcctgcaaacgcctggtgtccatgaacatgcctctgaacagtgatgggacggtcatgttcaatgctacactgtttgcccttgtcaggacagccctgaggatcaaaacagaagggaacctagagcaagccaatgaggagctgagagccatcatcaagaaaatctggaagaggaccagcatgaagctgttggaccaggtggtgccccctgcaggtgatgacgaggtcacagtgggcaagttctatgccaccttcctgatccaagagtacttcaggaaattcaagaagcgaaaagagcaggggctggtcggcaagccctcgcagaggaatgcactgtctctgcaggctggcttacgcaccttgcatgacattgggcctgagatccggagagccatctctggggatctgacggctgaggaggagctggacaaggctatgaaggaggcagtgtctgctgcctccgaagacgacatcttcaggagggctggaggcctgtttggcaaccacgtcagctactaccagagtgacagcaggagcaacttccctcagacgtttgccacccaacgcccactgcacatcaacaagacagggaacaaccaagcggacaccgaatcaccgtcccatgagaagctggtggactccactttcacccccagcagctactcatccacgggctccaatgccaacatcaacaatgccaacaacactgccctgggccgcttcccccaccctgctggctactccagcacggtcagcactgtggagggccatgggcctcccttgtcccctgctgtccgggtacaggaggcagcatggaaactcagctctaagaggtgccactcccgagagagccagggggccacggtgagtcaggatatgtttccagatgagacccgcagcagcgtgaggctgagcgaagaagttgagtactgcagtgagcccagcctgctctccacagatatactctcctaccaggacgatgaaaaccgacaactgacctgtctagaggaggacaagagggagatccagccatgtccgaagaggagtttccttcgctctgcctctctaggtcgaagggcctccttccatctggaatgtctaaagcgacaaaaggatcaagggggagacatctctcagaagacagccttgcccttgcatctggttcatcaccaggcattggcagtggcaggcttgagccccctcctgcagagaagccattctccttccacgtttcccaggccacgccccacgccccctgtcactccaggcagccggggcaggcccctacagcccatccctaccctgcggctggagggggcggagtccagtgagaaactcaacagcagcttcccgtccatccactgcagctcctggtcagaggagaccacagcctgtagtgggggcagcagcatggcccggagagcccggcccgtctccctcaccgtgcccagccaggctggagctccaggcagacagttccacggcagtgccagcagcctggtggaagcggtcttgatttcagaaggactgggacagtttgctcaagatcccaagttcatcgaggtcaccacacaggagctggctgacgcctgcgatatgacaatagaggagatggagaacgccgcagacaacatcctcagcgggggcgcccagcagagccccaacggcaccctcttaccttttgtgaactgcagggacccagggcaggacagggctgtggtcccagaggacgagagctgtgtatatgccctggggcgaggccggagcgaggaagcgctcccggacagcaggtcctatgtcagcaacctgtagtccgcaggctggcgagacgcgggtgttttttattcgtttcaatgttcctaatgggttcgtttcagaagtgcctcactgttctcgtgacctggaggtaaccggaacagcgtcttcattcactgctgtcgggataagcctcagagctgggcggtgtaccgaagtcggcttttcagggagaagccaaggccgttggtgcgggggctccagcaccttcccacggcagcaccgcccaaaggaccccaccccccctaagcaaaagggtgttttccccttgcttgtataaacagtcatttgcacatgttctgtctgagcctggccgtctctatggagcagggccccagggatctatggcaggaatgggccagtgtccccagtaggagccggaaggtggctgcaaggttcccagcagtgcagatctggtccctatgtcccttcagggacccttcccctgctggaactgaggagcaggtgcaggagccagtgcagaccacaccacctgccctcagctagccagacctgggggcgcaggctgcttgcctggtgctctgggtttcatagtttgatggttcttgtcagcatgttgcggttttctaggttttgatttctttattactatttgttgtgttttccacggggaggggaggaagaagagcgtttacaactgcgcagcctcacttcaccggttccacatttgcatatttaagttggatttggtttattgtattctttaaatggtgcggtccaacccccaccctcacccctattggagcaagggttcattatcaccaacggggttcattatcaaccaacggggaggttttacctgctctgtgtatgcccaagtaacatgttacaattttccttaagtcaaagcaactttttcccctttcggtttggttgagcatcacgacctgcaggttaacagtcagtttagataaggcggtgtgtgcctgggcgactgagctgggctcctttctgggcatatggattggttcaggagagaagaaatatgggcatctttgcgtcacacgtgtgtccatagtgggtcgtcttgtgtgtctgtgcatccacacggtacgtgagcaccccgccccacccccgctcaaagtctgtagatcccgttcgggtttgacggccggggagttcaaaatctggggcgattcgaaagcaagaacaaaccactgtctctgcttctgcttctgaaacgagaatctggtaactgcattttctgtcccacgagatatgcaaaagcaatgcaataatatccattttaaaatacgattgtgagttgtgtcacagcattaaaattctattttaaaaaaaacatgaaatttaaggggaaaaactccaagaagacattttgactttcgatatattctgtgtaatgttttattgcattgataatgtttctgttgaagaaactgttatacttgaattcaggtcagtttcagtatttttcaaatatttttttaaaactgaattgcaattgtgccttgcaaatataatgacttaagtttgttttaaaattcacttcttgtatattttgctgcatgtaaagtaaatcattttgtatttgg

SEQ ID NO: 1184 - protein, 2170 aa, Rattus norvegicus
  misc_feature (1)..(2170): Xaa=Unknown amino acid
MIRAFAQPSTPPYQPLSSCLSEDTERKFKGKVVHEAQLNCFYISPGGSNYGSPRPAHANMNANAAAGLAPEHIPTPGAALSWLAAIDAARQAKLMGSAGNATISTVSSTQRKRQQYGKPKKQGGTTATRPPRALLCLTLKNPIRRACISIVEWKPFEIIILLTIFANCVALAIYIPFPEDDSNATNSNLERVEYLFLIIFTVEAFLKVIAYGLLFHPNAYLRNGWNLLDFIIVVVGLFSAILEQATKADGANALGGKGAGFDVKALRAFRVLRPLRLVSGVPSLQVVLNSIIKAMVPLLHIALLVLFVIIIYAIIGLELFMGKMHKTCYNQEGIIDVPAEEDPSPCALETGHGRQCQNGTVCKPGWDGPKHGITNFDNFAFAMLTVFQCITMEGWTDVLYWMQDAMGYELPWVYFVSLVIFGSFFVLNLVLGVLSGEFSKEREKAKARGDFQKLREKQQLEEDLKGYLDWITQAEDIDPENEDEGMDEDKPRNMSMPTSETESVNTENVAGGDIEGENCGARLAHRISKSKFSRYWRRWNRFCRRKCRAAVKSNVFYWLVIFLVFLNTLTIASEHYNQPHWLTEVQDTANKALLALFTAEMLLKMYSLGLQAYFVSLFNRFDCFIVCGGILETILVETKIMSPLGISCWRCVRLLRIFKITRYWNSLSNLVASLLNSLRSIASLLLLLFLFIIIFSLLGMQLFGGKFNFDEMQTRRSTFDNFPQSLLTVFQILTGEDWNSVMYDGIMAYGGPSFPGMLVCIYFIILFISPNYILLNLFLAIAVDNLADAESLTSAQKEEEEEKERKKLARTASPEKKQEVMEKPAVEESKEEKIELKSITADGESPPTTKINMDDLQPSENEDKSPHSNPDTAGEEDEEEPEMPVGPRPRPLSELHLKEKAVPMPEASAFFIFSPNNRFRLQCHRIVNDTIFTNLILFFILLSSISLAAEDPVQHTSFRNHILFYFDIVFTTIFTIEIALKMTAYGAFLHKGSFCRNYFNILDLLVVSVSLISFGIQSSAINVVKILRVLRVLRPLRINRAKGLKHVVQCVFVAIRTIGNIVIVTTLLQFMFACIGVQLFKGKLYTCSDSSKQTEAESKGNYITYKTGEVDHPIIQPRSWENSKFDFDNVLAAMMALFTVSTFEGWPELLYRSIDSHTEDKGPIYNYRVEISIFFIIYIIIIAFFMMNIFVGFVIVTFQEQGEQEYKNCELDKNQRQCVEYALKARPLPRYIPKNQHQYKVWYVVNSTYFEYLMFVLILLNTICLAMQHYGQSCLFKIAMNILNMLFTGLFTVEMILKLIAFKPKHYFCDAWNTFDALIVVGSIVDIAITEVHPAEHTQCSPSMSAEENSRISITFFRLFRVMRLVKLLSRGEGIRTLLWTFIKSFQALPYVALLIVMLFFIYAVIGMQVFGKIALNDTTEINRNNNFQTFPQAVLLLFRCATGEAWQDIMLACMPGKKCAPESEPSNSTEGETPCGSSFAVFYFISFYMLCAFLIINLFVAVIMDNFDYLTRDWSILGPHHLDEFKRIWAEYDPEAKGRIKHLDVVTLLRRIQPPLGFGKLCPHRVACKRLVSMNMPLNSDGTVMFNATLFALVRTALRIKTEGNLEQANEELRAIIKKIWKRTSMKLLDQVVPPAGDDEVTVGKFYATFLIQEYFRKFKKRKEQGLVGKPSQRNALSLQAGLRTLHDIGPEIRRAISGDLTAEEELDKAMKEAVSAASEDDIFRRAGGLFGNHVSYYQSDSRSNFPQTFATQRPLHINKTGNNQADTESPSHEKLVDSTFTPSSYSSTGSNANINNANNTALGRFPHPAGYSSTVSTVEGHGPPLSPAVRVQEAAWKLSSKRCHSRESQGATVSQDMFPDETRSSVRLSEEVEYCSEPSLLSTDILSYQDDENRQLTCLEEDKREIQPCPKRSFLRSASLGRRASFHLECLKRQKDQGGDISQKTALPLHLVHHQALAVAGLSPLLQRSHSPSTFPRPRPTPPVTPGSRGRPLQPIPTLRLEGAESSEKLNSSFPSIHCSSWSEETTACSGGSSMARRARPVSLTVPSQAGAPGRQFHGSASSLVEAVLISEGLGQFAQDPKFIEVTTQELADACDMTIEEMENAADNILSGGAQQSPNGTLLPFVNCRDPGQDRAVVPEDESCVYALGRGRSEEALPDSRSYVSNLX

SEQ ID NO: 1185 - DNA, 8940 bp, Homo sapiens
  ref <308>: DATABASE ACCESSION NUMBER: Refseq / NM_000719
  ref <309>: DATABASE ENTRY DATE: 2003-01-11
ccatggactcaatgtcaatgcttctcatgtgatacacaagaatactcaattaaaaaatgctaagggataagttttttttcagatagagttgagctttaaagggccacaaaccattgaaataggtaagatttgttcctgctcccaagaattaacttattgttcctttgagagcaatatcatacccaatgagactacacaattgagaaaaaatcagttggattaaaaaaatttgtacattaaaattcaaatttccaaagaacctgcaaaggttccaatactagttgattcttatctaactaaatgaaacaatttttgtcctaaatgttcatgatgggaggtaaatgtgataacatatatggggtgtacaattgttttacatgccatgccagacaccagagatatttgtttctaattttcattttcattgaaaacaaaagttgttacttttgcatcctaaagaatggagacaagaagaaaacaaacgtgtatctaaatgtgattaaaatgttaaaaggaaaaaatatcttaatggaaaaaaaataatgatgaaatagaatttacctacattaattccagtcacgatggaaattaaaggagggaagagcagaagcaaaattgtggaagagatgtagactaaaggagcaaatgagcatggctggaagatagtaatcattcctggtcagggtgtgttttcagctttgctgaatccagccttcacagagagtcatggacacacaccaaccacaagagtttatacataaaaaaggcaaaaatttgagagtacaatatactctctgcataataggtaagtgatgatgtaccaagttctcccttagtgtataaataaactcaagagatcaatatttttcttatcacatctcttacaagaaacaagggaattgataatgtcaaaggacactttctgcaacctagtaaagttcgataataaaaatagtgattaaaaggaaccaaatacctaaattgttgaatgtgtttatttttagtcagacattgttcttagcacttacaaaattgatgctccctttagcaataatgaatactcttatttttcatattaactgaacacctaccatgtgtctacccccattaattcactggagatatcagtgaccaaagaagactgataggttctactgttattcctatttacaaaataaaaaatagaagtataaggaactatcaaattatgaagccattgtttgaacccaaaatctgactgagccctcagttcttacatgctcccaggaatatttctggtcataagaactagagcgatttctagattgatcaatattttcccagtagagtcctgcctaggtaatgacagagtctttctcttcagctgtttactagtcttcttcactgaaattccccatttgatcatgccaacatgaatgccaatgcggcagcggggctggcccctgagcacatccccaccccgggggctgccctgtcgtggcaggcggccatcgacgcagcccggcaggctaagctgatgggcagcgctggcaatgcgaccatctccacagtcagctccacgcagcggaagcggcggcaatatgggaaacccaagaagcagggcagcaccacggccacacgcccgccccgagccctgctctgcctgaccctgaagaaccccatccggagggcctgcatcagcattgtcgaatggaaaccatttgaaataattattttactgactatttttgccaattgtgtggccttagcgatctatattccctttccagaagatgattccaacgccaccaattccaacctggaacgagtggaatatctctttctcataatttttacggtggaagcgtttttaaaagtaatcgcctatggactcctctttcaccccaatgcctacctccgcaacggctggaacctactagattttataattgtggttgtggggctttttagtgcaattttagaacaagcaaccaaagcagatggggcaaacgctctcggagggaaaggggccggatttgatgtgaaggcgctgagggccttccgcgtgctgcgccccctgcggctggtgtccggagtcccaagtctccaggtggtcctgaattccatcatcaaggccatggtccccctgctgcacatcgccctgcttgtgctgtttgtcatcatcatctacgccatcatcggcttggagctcttcatggggaagatgcacaagacctgctacaaccaggagggcatagcagatgttccagcagaagatgacccttccccttgtgcgctggaaacgggccacgggcggcagtgccagaacggcacggtgtgcaagcccggctgggatggtcccaagcacggcatcaccaactttgacaactttgccttcgccatgctcacggtgttccagtgcatcaccatggagggctggacggacgtgctgtactggatgcaggacgctatgggctatgagttaccctgggtgtattttgtcagtctggtcatctttggatcctttttcgttctaaatctggttctcggtgtgttgagcggagagttttccaaagagagggagaaggccaaggcccggggagatttccagaagctgcgggagaagcagcagctagaagaggatctcaaaggctacctggattggatcactcaggccgaagacatcgatcctgagaatgaggacgaaggcatggatgaggagaagccccgaaacatgagcatgcccaccagtgagaccgagtccgtcaacaccgaaaacgtggctggaggtgacatcgagggagaaaactgcggcgccaggctggcccaccggatctccaagtcaaagttcagccgctactggcgccggtggaatcggttctgcagaaggaagtgccgcgccgcagtcaagtctaatgtcttctactggctggtgattttcctggtgttcctcaacacgctcaccattgcctctgagcactacaaccagcccaactggctcacagaagtccaagacacggcaaacaaggccctgctggccctgttcacggcagagatgctcctgaagatgtacagcctgggcctgcaggcctacttcgtgtccctcttcaaccgctttgactgcttcgtcgtgtgtggcggcatcctggagaccatcctggtggagaccaagatcatgtccccactgggcatctccgtgctcagatgcgtccggctgctgaggattttcaagatcacgaggtactggaactccttgagcaacctggtggcatccttgctgaactctgtgcgctccatcgcctccctgctccttctcctcttcctcttcatcatcatcttctccctcctggggatgcagctctttggaggaaagttcaactttgatgagatgcagacccggaggagcacattcgataacttcccccagtccctcctcactgtgtttcagatcctgaccggggaggactggaattcggtgatgtatgatgggatcatggcttatggcggcccctcttttccagggatgttagtctgtatttacttcatcatcctcttcatctgtggaaactatatcctactgaatgtgttcttggccattgctgtggacaacctggctgatgctgagagcctcacatctgcccaaaaggaggaggaagaggagaaggagagaaagaagctggccaggactgccagcccagagaagaaacaagagttggtggagaagccggcagtgggggaatccaaggaggagaagattgagctgaaatccatcacggctgacggagagtctccacccgccaccaagatcaacatggatgacctccagcccaatgaaaatgaggataagagcccctaccccaacccagaaactacaggagaagaggatgaggaggagccagagatgcctgtcggccctcgcccacgaccactctctgagcttcaccttaaggaaaaggcagtgcccatgccagaagccagcgcgtttttcatcttcagctctaacaacaggtttcgcctccagtgccaccgcattgtcaatgacacgatcttcaccaacctgatcctcttcttcattctgctcagcagcatttccctggctgctgaggacccggtccagcacacctccttcaggaaccatattctgttttattttgatattgtttttaccaccattttcaccattgaaattgctctgaagatgactgcttatggggctttcttgcacaagggttctttctgccggaactacttcaacatcctggacctgctggtggtcagcgtgtccctcatctcctttggcatccagtccagtgcaatcaatgtcgtgaagatcttgcgagtcctgcgagtactcaggcccctgagggccatcaacagggccaaggggctaaagcatgtggttcagtgtgtgtttgtcgccatccggaccatcgggaacatcgtgattgtcaccaccctgctgcagttcatgtttgcctgcatcggggtccagctcttcaagggaaagctgtacacctgttcagacagttccaagcagacagaggcggaatgcaagggcaactacatcacgtacaaagacggggaggttgaccaccccatcatccaaccccgcagctgggagaacagcaagtttgactttgacaatgttctggcagccatgatggccctcttcaccgtctccaccttcgaagggtggccagagctgctgtaccgctccatcgactcccacacggaagacaagggccccatctacaactaccgtgtggagatctccatcttcttcatcatctacatcatcatcatcgccttcttcatgatgaacatcttcgtgggcttcgtcatcgtcacctttcaggagcagggggagcaggagtacaagaactgtgagctggacaagaaccagcgacagtgcgtggaatacgccctcaaggcccggcccctgcggaggtacatccccaagaaccagcaccagtacaaagtgtggtacgtggtcaactccacctacttcgagtacctgatgttcgtcctcatcctgctcaacaccatctgcctggccatgcagcactacggccagagctgcctgttcaaaatcgccatgaacatcctcaacatgctcttcactggcctctttaccgtggagatgatcctgaagctcattgccttcaaacccaagggttactttagtgatccctggaatgtttttgacttcctcatcgtaattggcagcataattgacgtcattctcagtgagactaatccagctgaacatacccaatgctctccctctatgaacgcagaggaaaactcccgcatctccatcaccttcttccgcctgttccgggtcatgcgtctggtgaagctgctgagccgtggggagggcatccggacgctgctgtggaccttcatcaagtccttccaggccctgccctatgtggccctcctgatcgtgatgctgttcttcatctacgcggtgatcgggatgcaggtgtttgggaaaattgccctgaatgataccacagagatcaaccggaacaacaactttcagaccttcccccaggccgtgctgctcctcttcaggtgtgccaccggggaggcctggcaggacatcatgctggcctgcatgccaggcaagaagtgtgccccagagtccgagcccagcaacagcacggagggtgaaacaccctgtggtagcagctttgctgtcttctacttcatcagcttctacatgctctgtgccttcctgatcatcaacctctttgtagctgtcatcatggacaactttgactacctgacaagggactggtccatccttggtccccaccacctggatgagtttaaaagaatctgggcagagtatgaccctgaagccaagggtcgtatcaaacacctggatgtggtgaccctcctccggcggattcagccgccactaggttttgggaagctgtgccctcaccgcgtggcttgcaaacgcctggtctccatgaacatgcctctgaacagcgacgggacagtcatgttcaatgccaccctgtttgccctggtcaggacggccctgaggatcaaaacagaagggaacctagaacaagccaatgaggagctgcgggcgatcatcaagaagatctggaagcggaccagcatgaagctgctggaccaggtggtgccccctgcaggtgatgatgaggtcaccgttggcaagttctacgccacgttcctgatccaggagtacttccggaagttcaagaagcgaaaagagcagggccttgtgggcaagccctcccagaggaacgcgctgtctctgcaggctggcttgcgcacactgcatgacatcgggcctgagatccgacgggccatctctggagatctcaccgctgaggaggagctggacaaggccatgaaggaggctgtgtccgctgcttctgaagatgacatcttcaggagggccggtggcctgttcggcaaccacgtcagctactaccaaagcgacggccggagcgccttcccccagaccttcaccactcagcgcccgctgcacatcaacaaggcgggcagcagccagggcgacactgagtcgccatcccacgagaagctggtggactccaccttcaccccgagcagctactcgtccaccggctccaacgccaacatcaacaacgccaacaacaccgccctgggtcgcctccctcgccccgccggctaccccagcacagtcagcactgtggagggccacgggccccccttgtcccctgccatccgggtgcaggaggtggcgtggaagctcagctccaacaggatgcactgctgtgacatgctggatggtgggaccttccctcccgccctgggcccccgcagggctcctccctgtctgcatcagcagctccagggttccctggcggggctgagagaggacacaccctgcatcgtgcctggccacgcttcactgtgctgctcttccagagtaggagagtggctcccagcaggctgcacagccccccagcatgccaggtgccactcccgggagagccaggcagccatggcgggtcaggaggagacgtctcaggatgagacctatgaagtgaagatgaaccatgacacggaggcctgcagtgagcccagcctgctctccacagagatgctctcctaccaggatgacgaaaatcggcaactgacgctcccagaggaggacaagagggacatccggcaatctccgaagaggggtttcctccgctctgcctcactaggtcgaagggcctccttccacctggaatgtctgaagcgacagaaggaccgagggggagacatctctcagaagacagtcctgcccttgcatctggttcatcatcaggcattggcagtggcaggcctgagccccctcctccagagaagccattcccctgcctcattccctaggccttttgccaccccaccagccacacctggcagccgaggctggcccccacagcccgtccccaccctgcggcttgagggggtcgagtccagtgagaaactcaacagcagcttcccatccatccactgcggctcctgggctgagaccacccccggtggcgggggcagcagcgccgcccggagagtccggcccgtctccctcatggtgcccagccaggctggggccccagggaggcagttccacggcagtgccagcagcctggtggaagcggtcttgatttcagaaggactggggcagtttgctcaagatcccaagttcatcgaggtcaccacccaggagctggccgacgcctgcgacatgaccatagaggagatggagagcgcggccgacaacatcctcagcgggggcgccccacagagccccaatggcgccctcttaccctttgtgaactgcagggacgcggggcaggaccgagccgggggcgaagaggacgcgggctgtgtgcgcgcgcggggtcgaccgagtgaggaggagctccaggacagcagggtctacgtcagcagcctgtagtgggcgctgccagatgcgggcttttttttatttgtttcaatgttcctaatgggttcgtttcagaagtgcctcactgttctcgtgacctggagttaaccggaacagcgtcttcattcatttctgttgggaccagacgcggagcctgggtgcgcgagccgccctccgggaggaaggcgcccggctgcgtctgcagaggcggggagaggaggcggcgagggtcccggggcgcgaggaaggcgctgccctctcccagctcgcaggccccgggccggccgcgcctctgcgggagagcaccccggcttcccgcgcgccctcaccaaaaggaccctacagcaaacggggtctttcgactctgcttgtagaaaccatttgcacatattctgtacgagcctgctgtctccctagagccagggccctgcggatttggagaagggagcggggcaggacttccaggaggaccccaacccggcccggagagggaggaggaggcctccaggggcgcggagctctggggatgggcgtcgggccggcagtggtgcggctcactccgtccctgcccacctgcgacgggatcccccgaccggcacggccacgccgagctcccggccagccgccggcccgcaggcagcgcgagggaggagctgcgccgccgggccggggccgccggctccgcccaaccaggtggtgctgagcttccgctgagcgctcttttgttttgtggtttgacacttttgttgacagcatgttgcagtttcttttcggttttggttttttttaaatgttttattttgctttcccagcgggaggggaggaagaagagtgtttacaaagtcctgtagccccctcacctttcctgttttcacttttgccaatgtacatcgggtttggttttcttgtattatttaaacggttgtggtttcctttttccacggaggttcaataaaagccgctgcaggagagttttaccaaaaaaaaaaaaaaaaaaa

SEQ ID NO: 1186 - protein, 2180 aa, Homo sapiens
  ref <308>: DATABASE ACCESSION NUMBER: Refseq / NP_000710
  ref <309>: DATABASE ENTRY DATE: 2003-01-11
MNANAAAGLAPEHIPTPGAALSWQAAIDAARQAKLMGSAGNATISTVSSTQRKRRQYGKPKKQGSTTATRPPRALLCLTLKNPIRRACISIVEWKPFEIIILLTIFANCVALAIYIPFPEDDSNATNSNLERVEYLFLIIFTVEAFLKVIAYGLLFHPNAYLRNGWNLLDFIIVVVGLFSAILEQATKADGANALGGKGAGFDVKALRAFRVLRPLRLVSGVPSLQVVLNSIIKAMVPLLHIALLVLFVIIIYAIIGLELFMGKMHKTCYNQEGIADVPAEDDPSPCALETGHGRQCQNGTVCKPGWDGPKHGITNFDNFAFAMLTVFQCITMEGWTDVLYWMQDAMGYELPWVYFVSLVIFGSFFVLNLVLGVLSGEFSKEREKAKARGDFQKLREKQQLEEDLKGYLDWITQAEDIDPENEDEGMDEEKPRNMSMPTSETESVNTENVAGGDIEGENCGARLAHRISKSKFSRYWRRWNRFCRRKCRAAVKSNVFYWLVIFLVFLNTLTIASEHYNQPNWLTEVQDTANKALLALFTAEMLLKMYSLGLQAYFVSLFNRFDCFVVCGGILETILVETKIMSPLGISVLRCVRLLRIFKITRYWNSLSNLVASLLNSVRSIASLLLLLFLFIIIFSLLGMQLFGGKFNFDEMQTRRSTFDNFPQSLLTVFQILTGEDWNSVMYDGIMAYGGPSFPGMLVCIYFIILFICGNYILLNVFLAIAVDNLADAESLTSAQKEEEEEKERKKLARTASPEKKQELVEKPAVGESKEEKIELKSITADGESPPATKINMDDLQPNENEDKSPYPNPETTGEEDEEEPEMPVGPRPRPLSELHLKEKAVPMPEASAFFIFSSNNRFRLQCHRIVNDTIFTNLILFFILLSSISLAAEDPVQHTSFRNHILFYFDIVFTTIFTIEIALKMTAYGAFLHKGSFCRNYFNILDLLVVSVSLISFGIQSSAINVVKILRVLRVLRPLRAINRAKGLKHVVQCVFVAIRTIGNIVIVTTLLQFMFACIGVQLFKGKLYTCSDSSKQTEAECKGNYITYKDGEVDHPIIQPRSWENSKFDFDNVLAAMMALFTVSTFEGWPELLYRSIDSHTEDKGPIYNYRVEISIFFIIYIIIIAFFMMNIFVGFVIVTFQEQGEQEYKNCELDKNQRQCVEYALKARPLRRYIPKNQHQYKVWYVVNSTYFEYLMFVLILLNTICLAMQHYGQSCLFKIAMNILNMLFTGLFTVEMILKLIAFKPKGYFSDPWNVFDFLIVIGSIIDVILSETNPAEHTQCSPSMNAEENSRISITFFRLFRVMRLVKLLSRGEGIRTLLWTFIKSFQALPYVALLIVMLFFIYAVIGMQVFGKIALNDTTEINRNNNFQTFPQAVLLLFRCATGEAWQDIMLACMPGKKCAPESEPSNSTEGETPCGSSFAVFYFISFYMLCAFLIINLFVAVIMDNFDYLTRDWSILGPHHLDEFKRIWAEYDPEAKGRIKHLDVVTLLRRIQPPLGFGKLCPHRVACKRLVSMNMPLNSDGTVMFNATLFALVRTALRIKTEGNLEQANEELRAIIKKIWKRTSMKLLDQVVPPAGDDEVTVGKFYATFLIQEYFRKFKKRKEQGLVGKPSQRNALSLQAGLRTLHDIGPEIRRAISGDLTAEEELDKAMKEAVSAASEDDIFRRAGGLFGNHVSYYQSDGRSAFPQTFTTQRPLHINKAGSSQGDTESPSHEKLVDSTFTPSSYSSTGSNANINNANNTALGRLPRPAGYPSTVSTVEGHGPPLSPAIRVQEVAWKLSSNRMHCCDMLDGGTFPPALGPRRAPPCLHQQLQGSLAGLREDTPCIVPGHASLCCSSRVGEWLPAGCTAPQHARCHSRESQAAMAGQEETSQDETYEVKMNHDTEACSEPSLLSTEMLSYQDDENRQLTLPEEDKRDIRQSPKRGFLRSASLGRRASFHLECLKRQKDRGGDISQKTVLPLHLVHHQALAVAGLSPLLQRSHSPASFPRPFATPPATPGSRGWPPQPVPTLRLEGVESSEKLNSSFPSIHCGSWAETTPGGGGSSAARRVRPVSLMVPSQAGAPGRQFHGSASSLVEAVLISEGLGQFAQDPKFIEVTTQELADACDMTIEEMESAADNILSGGAPQSPNGALLPFVNCRDAGQDRAGGEEDAGCVRARGRPSEEELQDSRVYVSSL

SEQ ID NO: 1187 - DNA, 425 bp, Rattus norvegicus
  ref <308>: DATABASE ACCESSION NUMBER: EMBL / AA892056
  ref <309>: DATABASE ENTRY DATE: 2000-03-03
tgttataaaatacatgaaaaggttgatgcagcagtcagtggagtcagtatggaacatggcgttcgactttattcttgacaatgttcaggtggtcttacagcagacgtatggaagcacattgaaagtcacctgactgtccagagagcctggtgctctctgcccagcagtgcttgtgaggtatttgcaaagtgcatgacagtgatgctctgagttttcataattctacatttctttttaagcaagtgttttgtacatttctttttcaaaaaagtgccaaatttgtcagtattgcatgtaaataattgtgttaattcttttacttgtagcatagattctatttacaaaacgtttgtttataaagttttatggatttttacagtgaagtgtttacagttgtttaataaagaactgtatgtatattttgt

SEQ ID NO: 1188 - DNA, 4276 bp, Homo sapiens
  ref <308>: DATABASE ACCESSION NUMBER: Refseq / NM_016316
  ref <309>: DATABASE ENTRY DATE: 2001-12-19
agagccaccgcggagcgcgcgcggggttggttgccgcgagcgtgggggagcgtggaccgcggcgctgctcagcggtggggctgccttcccccggccctcctccctggtccctggcgagggcactggcggcggcggggccggggtccgcaaggccggagaaggccgccgggcccgggcatggtggtctggggcaacgcggaagaagctccaccatgaggcgaggtggatggaggaagcgagctgaaaatgatggctgggaaacatggggtgggtatatggctgccaaggtccagaaattggaggaacagtttcgatcagatgctgctatgcagaaggatgggacttcatctacaatttttagtggagttgccatctatgttaatggatacacagatccttccgctgaggaattgagaaaactaatgatgttgcatggaggtcaataccatgtatattattccagatctaaaacaacacatattattgccacaaatcttcccaatgccaaaattaaagaattaaagggggaaaaagtaattcgaccagaatggattgtggaaagcatcaaagctggacgactcctctcctacattccatatcagctgtacaccaagcagtccagtgtgcagaaaggtctcagctttaatcctgtatgcagacctgaggatcctctgccaggtccaagcaatatagccaaacagctcaacaacagggtaaatcacatcgttaagaagattgaaacggaaaatgaagtcaaagtcaatggcatgaacagttggaatgaagaagatgaaaataatgattttagttttgtggatctggagcagacctctccgggaaggaaacagaatggaattccgcatcccagagggagcactgccatttttaatggacacactcctagctctaatggtgccttaaagacacaggattgcttggtgcccatggtcaacagtgttgccagcaggctttctccagccttttcccaggaggaggataaggctgagaagagcagcactgatttcagagactgcactctgcagcagttgcagcaaagcaccagaaacacagatgctttgcggaatccacacagaactaattctttctcattatcacctttgcacagtaacactaaaatcaatggtgctcaccactccactgttcaggggccttcaagcacaaaaagcacttcttcagtatctacgtttagcaaggcagcaccttcagtgccatccaaaccttcagactgcaattttatttcaaacttctattctcattcaagactgcatcacatatcaatgtggaagtgtgaattgactgagtttgtcaataccctacaaagacaaagtaatggtatctttccaggaagggaaaagttaaaaaaaatgaaaacaggcaggtctgcacttgttgtaactgacacaggagatatgtcagtattgaattctcccagacatcagagctgtataatgcatgttgatatggattgcttctttgtatcagtgggtatacgaaatagaccagatctcaaaggaaaaccagtggctgttacaagtaacagaggcacaggaagggcacctttacgtcctggcgctaacccccagctggagtggcagtattaccagaataaaatcctgaaaggcaaagcagcagatataccagattcatcattgtgggagaatccagattctgcgcaagcaaatggaattgattctgttttgtcaagggctgaaattgcatcttgtagttatgaggccaggcaacttggcattaagaacggaatgttttttgggcatgctaaacaactatgtcctaatcttcaagctgttccatacgattttcatgcatataaggaagtcgcacaaacattgtatgaaacattggcaagctacactcataacattgaagctgtcagttgtgatgaagcgctggtagacattaccgaaatccttgcagagaccaaacttactcctgatgaatttgcaaatgctgttcgtatggaaatcaaagaccagacgaaatgtgctgcctctgttggaattggttctaatattctcctggctagaatggcaactagaaaagcaaaaccagatgggcagtaccacctaaaaccagaagaagtagatgattttatcagaggccagctagtgaccaatctaccaggagttggacattcaatggaatctaagttggcatctttgggaattaaaacttgtggagacttgcagtatatgaccatggcaaaactccaaaaagaatttggtcccaaaacaggtcagatgctttataggttctgccgtggcttggatgatagaccagttcgaactgaaaaggaaagaaaatctgtttcagctgagatcaactatggaataaggtttactcagccaaaagaggcagaagcttttcttctgagtctttcagaagaaattcaaagaagactagaagccactggcatgaagggtaaacgtctaactctcaaaatcatggtacgaaagcctggggctcctgtagaaactgcaaaatttggaggccatggaatttgtgataacattgccaggactgtaactcttgaccaggcaacagataatgcaaaaataattggaaaggcgatgctaaacatgtttcatacaatgaaactaaatatatcagatatgagaggggttgggattcacgtgaatcagttggttccaactaatctgaacccttccacatgtcccagtcgcccatcagttcagtcaagccactttcctagtgggtcatactctgtccgtgatgtcttccaagttcagaaagctaagaaatccaccgaagaggagcacaaagaagtatttcgggctgctgtggatctggaaatatcatctgcttctagaacttgcactttcttgccaccttttcctgcacatctgccgaccagtcctgatactaacaaggctgagtcttcagggaaatggaatggtctacatactcctgtcagtgtgcagtcgagacttaacctgagtatagaggtcccgtcaccttcccagctggatcagtctgttttagaagcacttccacctgatctccgggaacaagtagagcaagtctgtgctgtccagcaagcagagtcacatggcgacaaaaagaaagaaccagtaaatggctgtaatacaggaattttgccacaaccagttgggacagtcttgttgcaaataccagaacctcaagaatcgaacagtgacgcaggaataaatttaatagcccttccagcattttcacaggtggaccctgaggtatttgctgcccttcctgctgaacttcagagggagctgaaagcagcgtatgatcaaagacaaaggcagggcgagaacagcactcaccagcagtcagccagcgcatctgtgccaaagaatcctttacttcatctaaaggcagcagtgaaagaaaagaaaagaaacaagaagaaaaaaaccattggttcaccaaaaaggattcagagtcctttgaataacaagctgcttaacagtcctgcaaaaactctgccaggggcctgtggcagtccccagaagttaattgatgggtttctaaaacatgaaggacctcctgcagagaaacccctggaagaactctctgcttctacttcaggtgtgccaggcctttctagtttgcagtctgacccagctggctgtgtgagacctccagcacccaatctagctggagctgttgaattcaatgatgtgaagaccttgctcagagaatggataactacaatttcagatccaatggaagaagacattctccaagttgtgaaatactgtactgatctaatagaagaaaaagatttggaaaaactggatctagttataaaatacatgaaaaggctgatgcagcaatcggtggaatcggtttggaatatggcatttgactttattcttgacaatgtccaggtggttttacaacaaacttatggaagcacattaaaagttacataaatattaccagagagcctgatgctctctgatagctgtgccataagtgcttgtgaggtatttgcaaagtgcatgatagtaatgctcggagtttttataattttaaatttcttttaaagcaagtgttttgtacatttcttttcaaaaagtgccaaatttgtcagtattgcatgtaaataattgtgttaattattttactgtagcatagattctatttacaaaatgtttgtttataaagttttatggatttttacagtgaagtgtttacagttgtttaataaagaactgtatgtaaaaaaaaaaaaaaaaaa

SEQ ID NO: 1189 - protein, 1251 aa, Homo sapiens
  ref <308>: DATABASE ACCESSION NUMBER: Refseq / NP_057400
  ref <309>: DATABASE ENTRY DATE: 2001-12-19
MRRGGWRKRAENDGWETWGGYMAAKVQKLEEQFRSDAAMQKDGTSSTIFSGVAIYVNGYTDPSAEELRKLMMLHGGQYHVYYSRSKTTHIIATNLPNAKIKELKGEKVIRPEWIVESIKAGRLLSYIPYQLYTKQSSVQKGLSFNPVCRPEDPLPGPSNIAKQLNNRVNHIVKKIETENEVKVNGMNSWNEEDENNDFSFVDLEQTSPGRKQNGIPHPRGSTAIFNGHTPSSNGALKTQDCLVPMVNSVASRLSPAFSQEEDKAEKSSTDFRDCTLQQLQQSTRNTDALRNPHRTNSFSLSPLHSNTKINGAHHSTVQGPSSTKSTSSVSTFSKAAPSVPSKPSDCNFISNFYSHSRLHHISMWKCELTEFVNTLQRQSNGIFPGREKLKKMKTGRSALVVTDTGDMSVLNSPRHQSCIMHVDMDCFFVSVGIRNRPDLKGKPVAVTSNRGTGRAPLRPGANPQLEWQYYQNKILKGKAADIPDSSLWENPDSAQANGIDSVLSRAEIASCSYEARQLGIKNGMFFGHAKQLCPNLQAVPYDFHAYKEVAQTLYETLASYTHNIEAVSCDEALVDITEILAETKLTPDEFANAVRMEIKDQTKCAASVGIGSNILLARMATRKAKPDGQYHLKPEEVDDFIRGQLVTNLPGVGHSMESKLASLGIKTCGDLQYMTMAKLQKEFGPKTGQMLYRFCRGLDDRPVRTEKERKSVSAEINYGIRFTQPKEAEAFLLSLSEEIQRRLEATGMKGKRLTLKIMVRKPGAPVETAKFGGHGICDNIARTVTLDQATDNAKIIGKAMLNMFHTMKLNISDMRGVGIHVNQLVPTNLNPSTCPSRPSVQSSHFPSGSYSVRDVFQVQKAKKSTEEEHKEVFRAAVDLEISSASRTCTFLPPFPAHLPTSPDTNKAESSGKWNGLHTPVSVQSRLNLSIEVPSPSQLDQSVLEALPPDLREQVEQVCAVQQAESHGDKKKEPVNGCNTGILPQPVGTVLLQIPEPQESNSDAGINLIALPAFSQVDPEVFAALPAELQRELKAAYDQRQRQGENSTHQQSASASVPKNPLLHLKAAVKEKKRNKKKKTIGSPKRIQSPLNNKLLNSPAKTLPGACGSPQKLIDGFLKHEGPPAEKPLEELSASTSGVPGLSSLQSDPAGCVRPPAPNLAGAVEFNDVKTLLREWITTISDPMEEDILQVVKYCTDLIEEKDLEKLDLVIKYMKRLMQQSVESVWNMAFDFILDNVQVVLQQTYGSTLKVT

SEQ ID NO: 1190 - DNA, 1118 bp, Rattus norvegicus
  ref <308>: DATABASE ACCESSION NUMBER: Refseq / NM_032084
  ref <309>: DATABASE ENTRY DATE: 2003-01-13
acgactggtatcagattaatgtcttgtatatctgaattccgcggaattacgcagcattcaacagagagaagagacctgggactaaaactgggattccaaaaagaatcctgcagtgtggcagcctgcttctcaccttctcacctcggagttggctgaacccagaaccaaatgctttgcacgtctcccgtcaactgcttggactcagtttgttgcacttcgataaatatctcttcactggtccgaagagctgccctcacacacaatgacaaccacttcaactatgagaagacacacaacttcaaggtgcacacatttcggggcccacactggtgtgaatactgtgccaattttatgtgggggctcatcgcccagggagtccggtgttcagattgtgggttaaacgtacacaaacaatgttccaagcacgtccccaacgactgccagcccgatctcaagaggatcaagaaagtatactgttgtgatctcaccacacttgtaaaagctcacaacactcagagacccatggtggtggacatatgtattcgggaaattgaagcaagaggattaaaatcagaagggctttacagagtctctgggttcacagaacacattgaagatgtcaagatggcgttcgacagagatggtgaaaaggcggatatctctgctaacatctacccagacataaacatcatcaccggagccctgaaactgtacttcagagacttacccatccccatcatcacatatgacacctataccaagtttatagaggcagcaaaaatctccaatgcagatgagaggcttgaagctgtccatgaggtcctgatgctgctgcctcctgcccactatgagaccctgcgctacctgatgatccatctcaaaaaggttaccatgaatgaaaaggacaatttaatgaacgcagaaaatctggggatcgtgtttgggcccaccctgatgagaccccctgaagacagcaccctcaccaccctccatgacatgcggtaccaaaagctgatcgtgcagattttaatagaaaacgaagatgttctgttttagtccatcagggaagtgcagctgatagagctagtggaataaaaacgtttctcaaaaaaaaaaaa

SEQ ID NO: 1191 - protein, 295 aa, Rattus norvegicus
  ref <308>: DATABASE ACCESSION NUMBER: Refseq / NP_114473
  ref <309>: DATABASE ENTRY DATE: 2003-01-13
MLCTSPVNCLDSVCCTSINISSLVRRAALTHNDNHFNYEKTHNFKVHTFRGPHWCEYCANFMWGLIAQGVRCSDCGLNVHKQCSKHVPNDCQPDLKRIKKVYCCDLTTLVKAHNTQRPMVVDICIREIEARGLKSEGLYRVSGFTEHIEDVKMAFDRDGEKADISANIYPDINIITGALKLYFRDLPIPIITYDTYTKFIEAAKISNADERLEAVHEVLMLLPPAHYETLRYLMIHLKKVTMNEKDNLMNAENLGIVFGPTLMRPPEDSTLTTLHDMRYQKLIVQILIENEDVLF

SEQ ID NO: 1192 - DNA, 512 bp, Rattus norvegicus
  misc_feature (1)..(512): n=a, c, g or t
  ref <308>: DATABASE ACCESSION NUMBER: EMBL / AA799538
  ref <309>: DATABASE ENTRY DATE: 2000-03-03
ggccaagaatcacacatatctgaacgtgctggtggtaccctttggaaaaactcccatttgggccttttaaaactgataatggccaggtggaaccttctgtaacccacttgtttcaccagagccttagtaagtacatgcctgatactgaaaccaaaaccatgcgcactttggtgcctttgtagtagtggaaagtaactgaacctctttcttttcaaacctagatggatcggcaagccgcttaacagaggactttgggggaaaggaccacaaactcagtccatcggtccgtggaagagtccttggaacaagcaactggctattaaaaaggttattttgtaacatttgtctaactttttacttgttttaatctgcctcaagtggcaaacttcattttatgtgccattttgttgctgttattcaaatttcttgtaatttagtgaggtgagcgacttcagatttcattattggattggatattgaggtaaaatttcatttntgtttatagtgctgac

SEQ ID NO: 1193 - DNA, 1879 bp, Homo sapiens
  ref <308>: DATABASE ACCESSION NUMBER: Refseq / NM_003016
  ref <309>: DATABASE ENTRY DATE: 2002-11-05
cgctagcctgcggagcccgtccgtgctgttctgcggcaaggcctttcccagtgtccccacgcggaaggcaactgcctgaaaggcgcggcgtcgcaccgcccagagctgaggaagccggcgccagttcgcggggctccgggccgccactcagagctatgagctacggccgcccccctcccgatgtggagggtatgacctccctcaaggtggacaacctgacctaccgcacctcgcccgacacgctgaggcgcgtcttcgagaagtacaggcgcgtcggcgacgtgtacatcccgcgggatcgctacaccaaggagtcccgcggcttcgccttcgttcgctttcacgacaagcgcgacgctgaggacgctatggatgccatggacggggccgtgctggacggccgcgagctgcgggtgcaaatggcgcgctacggccgccccccggactcacaccacagccgccggggaccgccaccccgcaggtacgggggcggtggctacggacgccggagccgcagccctaggcggcgtcgccgcagccgatcccggagtcggagccgttccaggtctcgcagccgatctcgctacagccgctcgaagtctcggtcccgcactcgttctcgatctcggtcgacctccaagtccagatccgcacgaaggtccaagtccaagtcctcgtcggtctccagatctcgttcgcggtccaggtcccggtctcggtccaggagtcctcccccagtgtccaagagggaatccaaatccaggtcgcgatcgaagagtccccccaagtctcctgaagaggaaggagcggtgtcctcttaagaaaatgatgtatcggcaagcagtgtaaacggaggacttggggaaaaaggaccacatagtccatcgaagaagagtccttggaacaagcaactggctattgaaaaggttattttgtaacatttgtctaactttttacttgtttaagctttgcctcagttggcaaacttcattttatgtgccattttgttgctgttattcaaatttcttgtaatttagtgaggtgaacgacttcagatttcattattggatttggatatttgaggtaaaatttcattttgttatatagtgctgactttttttttttgaaattaaacagattggtaacctaatttgtggcctcctgacttttaaggaaaacgtgtgcagccattacacacagcctaaagctgtcaagagattgactcggcattcgttcattccttaaaattaaaaacctacaaaagttggtgtaaatttgtatatgttatttaccttcagatctaaatggtaatctgaacccaaatttgtataaagacttttcaggtgaaaagacttgattttttgaaaggattgtttatcaaacacaattctaatctcttctcttatgtatttttgtgcactaggcgcagttgtgtagcagttgagtaatgctggttagctgttaaggtggcgtgttgcagtgcagagtgcttggctgtttcctgttttctcccgattgctcctgtgtaaagatgccttgtcgtgcagaaacaaatggctgtccagtttattaaaatgcctgacaactgcacttccagacacccgggccttgcatataaataacggagcatacagtgagcacatctagctgatgataaatacacctttttttccctcttccccctaaaaatggtaaatctgatcatatctacatgtatgaacttaacatggaaaatgttaaggaagcaaatggttgtaactttgtaagtacttataacatggtgtatctttttgcttatgaatatctgtattataaccattgtttctgtagtttaattaaaacattttcttggtgttagctttaaaaaaaaaaaaaaaaa

SEQ ID NO: 1194 - protein, 221 aa, Homo sapiens
  ref <308>: DATABASE ACCESSION NUMBER: Refseq / NP_003007
  ref <309>: DATABASE ENTRY DATE: 2002-11-05
MSYGRPPPDVEGMTSLKVDNLTYRTSPDTLRRVFEKYRRVGDVYIPRDRYTKESRGFAFVRFHDKRDAEDAMDAMDGAVLDGRELRVQMARYGRPPDSHHSRRGPPPRRYGGGGYGRRSRSPRRRRRSRSRSRSRSRSRSRSRYSRSKSRSRTRSRSRSTSKSRSARRSKSKSSSVSRSRSRSRSRSRSRSPPPVSKRESKSRSRSKSPPKSPEEEGAVSS

SEQ ID NO: 1195 - DNA, 484 bp, Rattus norvegicus
  ref <308>: DATABASE ACCESSION NUMBER: EMBL / AA875661
  ref <309>: DATABASE ENTRY DATE: 2000-03-03
cgtctctgcaaatacttactgcaaacccggatttaacggacaaatgggagaagaaatgggtgactgtgggtgacacgtccctgaggatattcaaatgggtgcctgtgacagatagcaaggagaaagaaaaatcaaaatctaataatacagcagcccgagaaccttccgcttcctcacgctcactacgcacacgcgcagcttcctgtcttcacctgtttcattccagcatccctgcctcctgccacagaaaaccccagccatgattggaggttctgaccacagtacctgcccccagtactctttcagctcagactttctagaacgttcccttttctttaaaatctgcatgtttaattaaactttatgattttattttttgtctgaaaaaaagagaagtttaagaaaatggaaatgggtaacagcaagtgaagacctattttagcactgaatagagtatttttaaaattaaactatttgaaatatt

SEQ ID NO: 1196 - DNA, 1187 bp, Homo sapiens
  ref <308>: DATABASE ACCESSION NUMBER: Refseq / NM_138707
  ref <309>: DATABASE ENTRY DATE: 2002-04-28
gggggcgacggccgctgtgacgctgcggcggcggcgggcgggcggcggcgcgtgagacgcgcgatccccggtgtcttgggagcagtgccccggcccccgccgctcccgccgccgccatgtcgggccggtcggtccgggcggagacccgcagccgggccaaggacgacatcaagaaggtgatggcggccatcgagaaagtgcggaaatgggagaagaagtgggtgactgtgggtgacacgtccctgaggatatttaagtgggttcctgtgacagacagcaaggagaaagaaaagtcaaaatcgaacagttcagcagcccgagaacctaatggctttccttctgatgcctcagccaattcctctctccttcttgaattccaggacgaaaacagcaaccagagttccgtgtctgacgtctatcagcttaaggtggacagcagcaccaactcaagccccagcccccagcagagtgagtccctgagcccagcacacacctccgacttccgcacggatgactcccagcccccaacgctgggccaggagatcctggaggagccctccctgccctcctcggaagttgctgatgaacctcctaccctcaccttctagaagagagcgtgcctcaggttacttgaacttgaacggagactgtagactcccggactttcccctaggactgggggccctgtaggctgctgttggaggactgggtagagacattggagggaagggaagggcttttctccacacaagggcagagagtccgtctagatttcttcctgtcctgccagctctgcccatgcctgaggtggtcctacctctcacgggcaccctagctgctgacagccctttgtggccgccgtccccatcccctgccctcagcacacacatctgcacacacgcagctttgttctcacctctacctgtcattccagcatccctgcctcttgtcacaaactgccccagcaagaatttgaggttctgacaacagtacccatcccccacagtaccccttcagctcagtttctagaaagctcccttttctttgaaatctgcatgttgaattgaactttgtgattttattttttgtttcaaaaaagtttaagaaaatggaaatgggcaacagtgagtgaagacatattttagcactgaatagaatatttttaaaattaaactatttgaaatatg

SEQ ID NO: 1197 - protein, 163 aa, Homo sapiens
  ref <308>: DATABASE ACCESSION NUMBER: Refseq / NP_619713
  ref <309>: DATABASE ENTRY DATE: 2002-04-28
MSGRSVRAETRSRAKDDIKKVMAAIEKVRKWEKKWVTVGDTSLRIFKWVPVTDSKEKEKSKSNSSAAREPNGFPSDASANSSLLLEFQDENSNQSSVSDVYQLKVDSSTNSSPSPQQSESLSPAHTSDFRTDDSQPPTLGQEILEEPSLPSSEVADEPPTLTF

SEQ ID NO: 1198 - DNA, 1726 bp, Rattus norvegicus
  ref <308>: DATABASE ACCESSION NUMBER: Refseq / NM_031003
  ref <309>: DATABASE ENTRY DATE: 2003-01-13
cgatcgcgcaagtcggacccgtggatcacagcctgtagatcgcggcccgggcctggaggacaacagcaagtgaagggggttcctcttcctgaaggaggggtcatggccttcttgttgactacccgacggctggtctgcagttcccagaaaaacctccacctcttcacacctggatccagatacatcagccaagctgctgccaaagttgactttgagtttgattatgatggaccactcatgaagacagaagtcccgggccctagatctcaggagctaatgaaacagctgaacacaatccagaatgcagaggccgtgcactttttctgcaactacgaagagagccgaggcaactacctcgtggacgtggatggcaaccgcatgttggacctgtattctcagatctcctctgtacccatcggttacaaccatccggctctggcgaaactcgttcaacagcctcaaaacgcgagcactttcatcaacagacctgccctgggcatcctgcctccagagaactttgtggacaagctccgggagtccttgatgtcggtggcgcccaaaggcatgtgtcagctcatcacgatggcctgcgggtcctgctccaatgagaatgcattcaagaccatcttcatgtggtaccggagtaaagaacgaggtcagagaggtttctccaaagaggagctggagacttgcatggttaaccagagtcctggatgcccagactacagcatcctctccttcatgggtgctttccacgggaggaccatgggttgcttagcgaccacacactccaaagcaattcacaagattgacatcccttcctttgactggcccattgctccattcccacggctgaaatatcccctggaggagtttgtgacggacaatcagcaagaggaggcccgctgtctagaagaggtggaggatctaattgtgaaatatcggaaaaagaagagaacagtggctgggatcatcgtggagcccatccagtccgaaggtggagacaaccacgcatcagatgacttcttccggaagctgagagacatagccaggaagcatggctgtgccttcttggtggacgaggttcagactggaggaggctgtacaggcaagttctgggcccatgaacactggggcttggatgacccagccgacgtgatgtcgttcagcaagaagatgatgactgggggcttcttccacaaggaggagtttcgaccaagtgctccttaccggatcttcaacacctggctgggggacccatccaagaacttgctgctggctgaggtcatcaacatcatcaagcgggaagacctgctcaacaacgtggcccatgccgggaagaccctactgaccgggctgctggacctccaggcccagtacccccagttcgtcagccgggtgaggggacgaggcaccttctgttccttcgacactcccgacaaagccatacggaataaactcatcctaattgccaggaacaaaggtgtggtactggggggctgcggtgacaaatccatacgtttccgtcccacgctggtcttcagggatcaccatgcccacttgttcctcaacattttcagtggtatcttagcagacttcaagtaaagaagccatctccacgacattcagagaaagctctgtcccagcggtgtcaacttgattagtttgcctaattcatattttcacttcaaagtttatcagaggcgaatgcataaactaaagggtc

SEQ ID NO: 1199 - protein, 500 aa, Rattus norvegicus
  ref <308>: DATABASE ACCESSION NUMBER: Refseq / NP_112265
  ref <309>: DATABASE ENTRY DATE: 2003-01-13
MAFLLTTRRLVCSSQKNLHLFTPGSRYISQAAAKVDFEFDYDGPLMKTEVPGPRSQELMKQLNTIQNAEAVHFFCNYEESRGNYLVDVDGNRMLDLYSQISSVPIGYNHPALAKLVQQPQNASTFINRPALGILPPENFVDKLRESLMSVAPKGMCQLITMACGSCSNENAFKTIFMWYRSKERGQRGFSKEELETCMVNQSPGCPDYSILSFMGAFHGRTMGCLATTHSKAIHKIDIPSFDWPIAPFPRLKYPLEEFVTDNQQEEARCLEEVEDLIVKYRKKKRTVAGIIVEPIQSEGGDNHASDDFFRKLRDIARKHGCAFLVDEVQTGGGCTGKFWAHEHWGLDDPADVMSFSKKMMTGGFFHKEEFRPSAPYRIFNTWLGDPSKNLLLAEVINIIKREDLLNNVAHAGKTLLTGLLDLQAQYPQFVSRVRGRGTFCSFDTPDKAIRNKLILIARNKGVVLGGCGDKSIRFRPTLVFRDHHAHLFLNIFSGILADFK

SEQ ID NO: 1200 - DNA, 1724 bp, Homo sapiens
  ref <308>: DATABASE ACCESSION NUMBER: Refseq / NM_080598
  ref <309>: DATABASE ENTRY DATE: 2002-04-03
acaggcattttccaaaggcaagcctggagcgcacggatctgtataaccgcggaaggccctgtttccggtcccttgcgcctgcgctcttgcagccaagaaggcgggaggctggagtagagggaagcctgcaaccggaagtgaaggcagatttccctccttcgtcgctgttgctgccgccatacgcgctctccctgtttagttatggcagagaacgatgtggacaatgagctcttggactatgaagatgatgaggtggagacagcagctgggggagatggggctgaggcccctgccaagaaggatgtcaagggctcctatgtctccatccacagctctggctttcgtgacttcctgctcaagccagagttgctccgggccattgtcgactgtggctttgagcatccgtcagaagtccagcatgagtgcatccctcaggccattctgggaatggatgtcctgtgccaggccaagtcgggcatgggaaagacagcagtgtttgtcttggccacactgcaacagctggagccagttactgggcaggtgtctgtgctggtgatgtgtcacactcgggagttggcttttcagatcagcaaggaatatgagcgcttctctaaatacatgcccaatgtcaaggttgctgttttttttggtggtctgtctatcaagaaggatgaagaggtgctgaagaagaactgcccgcatatcgtcgtggggactccaggccgtatcctagccctggctcgaaataagagcctcaacctcaaacacattaaacactttattttggatgaatgtgataagatgcttgaacagctcgacatgcgtcgggatgtccaggaaatttttcgcatgaccccccacgagaagcaggtcatgatgttcagtgctaccttgagcaaagagatccgtccagtctgccgcaagttcatgcaagatccaatggagatcttcgtggatgatgagacgaagttgacgctgcatgggttgcagcagtactacgtgaaactgaaggacaacgagaagaaccggaagctctttgaccttctggatgtccttgagttcaaccaggtggtgatctttgtgaagtctgtgcagcggtgcattgccttggcccagctactagtggagcagaacttcccagccattgccatccaccgtgggatgccccaggaggagaggctttctcggtatcagcagtttaaagattttcaacgacgaattcttgtggctaccaacctatttggccgaggcatggacatcgagcgggtgaacattgcttttaattatgacatgcctgaggattctgacacctacctgcatcgggtggccagagcaggccggtttggcaccaagggcttggctatcacatttgtgtccgatgagaatgatgccaagatcctcaatgatgtgcaggatcgctttgaggtcaatattagtgagctgcctgatgagatagacatctcctcctacattgaacagacacggtagaagactcgcccattttggaatgtgaccgtctgtccttcaggagaggacaccagggtgggggtgaaggagacactactgcccccacccctgacagcccccaccccatggcttccatcttttgcatcaccaccactcctgaacccccatttctgatttgtcagaatttttttttaacaaaactaaaaatgaaacacatgtgtctgtggtatctaaaaaaaaaaaaaaaaaaaaaaaaa

SEQ ID NO: 1201 - protein, 428 aa, Homo sapiens
  ref <308>: DATABASE ACCESSION NUMBER: Refseq / NP_542165
  ref <309>: DATABASE ENTRY DATE: 2002-04-03
MAENDVDNELLDYEDDEVETAAGGDGAEAPAKKDVKGSYVSIHSSGFRDFLLKPELLRAIVDCGFEHPSEVQHECIPQAILGMDVLCQAKSGMGKTAVFVLATLQQLEPVTGQVSVLVMCHTRELAFQISKEYERFSKYMPNVKVAVFFGGLSIKKDEEVLKKNCPHIVVGTPGRILALARNKSLNLKHIKHFILDECDKMLEQLDMRRDVQEIFRMTPHEKQVMMFSATLSKEIRPVCRKFMQDPMEIFVDDETKLTLHGLQQYYVKLKDNEKNRKLFDLLDVLEFNQVVIFVKSVQRCIALAQLLVEQNFPAIAIHRGMPQEERLSRYQQFKDFQRRILVATNLFGRGMDIERVNIAFNYDMPEDSDTYLHRVARAGRFGTKGLAITFVSDENDAKILNDVQDRFEVNISELPDEIDISSYIEQTR

SEQ ID NO: 1202 - DNA, 2462 bp, Rattus norvegicus
  ref <308>: DATABASE ACCESSION NUMBER: Refseq / NM_021767
  ref <309>: DATABASE ENTRY DATE: 2003-01-14
ttttttttctcttttctttcttttctttttcttttcttttttcacctctccgctttctcatctgctcctgcttttcctctgctcgattcccccagttcgatcccagctatcttcacaagggtgccctcttccctctgaacccatcgccgggcgtaagtgtcaggaggcggcggactcggagattgcctctggagcaggcgatgcgcgccgctgctctgcgcgctgcccgggggaggctggcgggagctggagagctggccagggctgaatggagggaaggggtgcctcgcgtccatggggtctgcttctctcctgaaaggaggctggaccggcgaagtggtctccccgttccccacgcacaatgctaaatggatttacctagtggattcccggtggatggctgtcatgtagaagtgaagaccctccgggaggagctttaaacaatttccaggctccccaaccccggcacacactctcacccgaaactcttggggagtatctctggagaacctggaaccctgcaaacctgggagcagccaccctctctgcgcttgctgttcttcggggctgcctttctggacaagtcccccctgccagctgcattcacctcggctatgtttcggattgtttggggtgtagggtacggcagactccagcacctcgagaagactgtccgaaagagggagaggatgggtgccctggcgcggtgaggcggccagccccgcagcccaccgcgagcagccggattcccggcttcctcgcctcttcttgtgccccaaactttgtctcccgcggcggctgccccttggcgggcgccccgccatgtaccagaggatgctccggtgcggtgccgagctgggatcgcccggaggcggcagtagtggcggcgcaggggggcgcctggccctgctctggatagtcccgctcaccctcagcggcctcctaggagtggcctggggggcatccagtttgggagcgcaccacatccaccatttccatggcagcagcaagcatcattcagtgcctattgcaatctacaggtcaccagcatccttgcgaggcggacacgctgggacgacgtatatctttagcaaaggtggtggacaaattacatataagtggcctcctaatgaccgacccagtacacgagcagacaggctggccatcgggtttagcactgttcagaaggaagcagtgttggtgcgtgtggacagttcctcaggcctgggtgactaccttgagctgcacatacaccaaggaaaaattggagttaaatttaatgttgggacagatgacatcgccattgaggagtccaatgcaatcattaatgatggaaaataccatgtagtgcgtttcacgaggagtggtggcaatgccacgttacaggtggacagctggccagtcatcgaacgataccctgcaggaaacaatgataacgagcgcctggcgattgctagacagcgaattccatatcgacttggtcgagtagttgatgaatggctactcgacaaagggcgtcagctcacaatcttcaatagccaagcaaccataataattggcgggaaagagcagggccagcccttccagggccagctctctgggctttactacaatggcttgaaagttctgaatatggcggcagagaacgatgccaacatcgccatagtgggaaatgtgaggctggtcggtgaagtgccttcctctatgacaactgagtcgacagccactgccatgcagtccgagatgtccacctcaatcatggagaccaccacaaccctggctaccagcacagctcgacgaggaaagccccccacaaaggagcctatcagccagaccacggatgatatccttgtggcctcggcagagtgtcccagcgacgatgaggacattgacccctgtgagccgagctcaggtgggttagccaaccccacccgagtgggcggccgcgaaccatacccaggctcggcagaggtgatccgggagtctagcagtaccactggcatggtggtggggattgtcgcagcagcagctctgtgcatcctcatcctcctctatgccatgtacaagtacagaaaccgggatgaaggctcatatcacgtggatgagagtcgaaactacatcagtaactcagcacagtccaatggggctgtggtcaaggagaagcagcccagcagtgcgaaaagcgccaacaaaaacaagaagaacaaggataaggagtattatgtctgatctcaagattcgaaaaggacacttgtatagaaatagtcttcattttatctgagacataatataaacttatttactttcctttttatgaagcacatacaaaagaagacagggaatgcgatcaggagggaaaactctttttaaaaaaaaacaaacaagtatgtcatgctcttgtttctcaaaaaaaaaacatacacaaaaaaaaggaaagagagaaaaaaaaaaaaaaggaattc

SEQ ID NO: 1203 - protein, 468 aa, Rattus norvegicus
  ref <308>: DATABASE ACCESSION NUMBER: Refseq / NP_068535
  ref <309>: DATABASE ENTRY DATE: 2003-01-14
MYQRMLRCGAELGSPGGGSSGGAGGRLALLWIVPLTLSGLLGVAWGASSLGAHHIHHFHGSSKHHSVPIAIYRSPASLRGGHAGTTYIFSKGGGQITYKWPPNDRPSTRADRLAIGFSTVQKEAVLVRVDSSSGLGDYLELHIHQGKIGVKFNVGTDDIAIEESNAIINDGKYHVVRFTRSGGNATLQVDSWPVIERYPAGNNDNERLAIARQRIPYRLGRVVDEWLLDKGRQLTIFNSQATIIIGGKEQGQPFQGQLSGLYYNGLKVLNMAAENDANIAIVGNVRLVGEVPSSMTTESTATAMQSEMSTSIMETTTTLATSTARRGKPPTKEPISQTTDDILVASAECPSDDEDIDPCEPSSGGLANPTRVGGREPYPGSAEVIRESSSTTGMVVGIVAAAALCILILLYAMYKYRNRDEGSYHVDESRNYISNSAQSNGAVVKEKQPSSAKSANKNKKNKDKEYYV

SEQ ID NO: 1204 - DNA, 3712 bp, Homo sapiens
  ref <308>: DATABASE ACCESSION NUMBER: Refseq / NM_138735
  ref <309>: DATABASE ENTRY DATE: 2003-01-17
ctttttttctttttctttttctttttctgtttctctcccttactccttcgtctgcatcttcttctcagctgcctttccgccgttcgattcccacttccttcagaagggcgcactcttccctctgaacccctcgccgggcgtaagtgtcaggaggcggcggacgcggagattgcctcgggagcaggcgatgcgcgccgctgctccgcgcgctgcccgggggaggctggcgctagcgggcgagccggccggggctgaatggagggaaggggcgcctggattccatggggtctgcttctgtcttgaaaggaggttgggccggcgaagtggcctccctagtccccgcacacaaagctaaatggatttacctagtggattcgcggtggatgtctgtcatgtagaagtgaggaccttccaggaggagctttaaacaatttctcggccccccacccgccggcacgcactctcgcccgaaactctttgggagtatctctcgagaacctggagccctggaaatctgggagcagccacccgctccgcgcttgctgttcccggggctgcctttccggacaagcccctctccagctgcattcgcctcggctatgtttcggattgtttggggtgctaggcacggcggactccaggaccccgagaagactgtccgaaggagggagaggatgggtgccctggcgcggtgaggcggccggcccctcagcccactccgcgccgcccgctcccctgcgccctctcctctccccgcgccccaaactttgcctcccgcggcggctgcccctcggcgggcgccccgccatgtaccagaggatgctccggtgcggcgccgagctgggctcgcccgggggcggcggcggcggcggcggcggcggcggcgcaggggggcgcctggccctgctttggatagtcccgctcaccctcagcggcctcctaggagtggcgtggggggcatccagtttgggagcgcaccacatccaccatttccatggcagcagcaagcatcattcagtgcctattgcaatctacaggtcaccggcatccttgcgaggcggacacgctgggacgacatatatctttagcaaaggtggtggacaaatcacgtataagtggcctcctaatgaccgacccagtacacgagcagacagactggccataggttttagcactgttcagaaagaagccgtattggtgcgagtggacagttcttcaggcttgggtgactacctagaactgcatatacaccagggaaaaattggagttaagtttaatgttgggacagatgacatcgccattgaagaatccaatgcaatcattaatgatgggaaataccatgtagttcgtttcacgaggagtggtggcaatgccacgttgcaggtggacagctggccagtgatcgagcgctaccctgcagggcgtcagctcacaatcttcaatagccaagcaaccataataattggcgggaaagagcagggccagcccttccagggccagctctctgggctgtactacaatggcttgaaagttctgaatatggcagccgaaaacgatgccaacatcgccatagtgggaaatgtgagactggttggtgaagtgccttcctctatgacaactgagtcaacagccactgccatgcaatcagagatgtccacatcaattatggagactaccacgaccctggctactagcacagccagaagaggaaagcccccgacaaaagaacccattagccagaccacagatgacatccttgtggcctcagcagagtgtcccagcgatgatgaggacattgacccctgtgagccgagctcaggtgggttagccaacccaacccgagcaggcggcagagagccgtatccaggctcagcagaagtgatccgggagtccagcagcaccacgggtatggtcgttgggatagtagccgctgccgccctgtgcatccttatcctcctctatgccatgtacaagtacagaaaccgggatgaaggctcataccatgtggacgagagtcgaaactacatcagtaactcagcacagtccaatggggctgttgtaaaggagaaacaacccagcagtgcgaaaagctccaacaaaaataagaaaaacaaggataaagagtattatgtctgatcccaagatcttaaatggacacttgtatagaaatagtcttcattttatctgagacataatataaacttatttactttcctttttatgaagcacatacaaaagaagacagggaatgcaatcaggaaggaaagactttttaaaaaataaaaacaagtatctcatgctcttgtttctcaaaaaagaaaaacaaaaaacaaaaaacaggggccaataaattccctaacatccacagtgttttcatttactctgcttgtctttatgttgctggaacatttctaaaagacagtgatgaccgcacgcattcataaagcaaaggagtactacagcatcaaggcacaacacaaaaaccaacacaaaacataacacaaaaaagaagctacctatgatcctggatttagccaaagtgctagcgctttcctgagaagtcagtccaattgccagagaagactgtccttttgagtgactcaacctgcaaacctttaagagtttgccgcctggtgcaactggagcagtggttggaacttgcatttgaaacaaagtgctggcttttttgaagacttgtgtaggaacacattcaaaaagcccctttctggttgtgagagaggaaaaaaaagtatggaggccttattttcaaaaatgtgaaatataaggcacgttttcacacaaaatttcaaaacaaaaacaagagggcatagatgcaatcattgggaaattttcatgcacgcttattatgttattacatatgtttatataaaatccatctctgtgtgctttctggactgtgataagtgacgttttatagcctgttgtatagaaaatgcaaaatatatctctgctcttcagccatttttggtaaattcaatgttataagtgttgctaagtatagggagttttatgacatcagagcaacaattatttcagttgggtttttctttttttttgccaccattataaattgccacaattacttttattttttaaagaaattacagtgtagtgtttattctaaggaagatatgtatgaatgtatatacaaagactcagctacttcttttcttatatgtacagccttcattctgttgcaattaagttttagtacttgtatgaaaggtgtgaattagaaagtcacatatatacatatgtatcttataatcttttctccctgaaatactcacattcccacatacattcactattttcacacacacacacacacacacacacacacgaatccacagcaatccatcagatatgctggaagatccaaacgtgcatacagtagcaaatatttattgacaaattgaaaagcaggaaggaagagggttgtgccaaggtattgatgacaaatggggtgatttgcttcattgagatcttgctcccaggtaaccttaagaagattttagtccctaaagaaatgaacctttccttatcaaatagaatatcactgatatactgctgcatgaataagaaccattatgtgggcaggttatggaagcaaaattggttaatctacaccttaactctggctgctgcaattgaaaactttctttctaataaaataatatatatatctctg

SEQ ID NO: 1205 - protein, 442 aa, Homo sapiens
  ref <308>: DATABASE ACCESSION NUMBER: Refseq / NP_620072
  ref <309>: DATABASE ENTRY DATE: 2003-01-17
MYQRMLRCGAELGSPGGGGGGGGGGGAGGRLALLWIVPLTLSGLLGVAWGASSLGAHHIHHFHGSSKHHSVPIAIYRSPASLRGGHAGTTYIFSKGGGQITYKWPPNDRPSTRADRLAIGFSTVQKEAVLVRVDSSSGLGDYLELHIHQGKIGVKFNVGTDDIAIEESNAIINDGKYHVVRFTRSGGNATLQVDSWPVIERYPAGRQLTIFNSQATIIIGGKEQGQPFQGQLSGLYYNGLKVLNMAAENDANIAIVGNVRLVGEVPSSMTTESTATAMQSEMSTSIMETTTTLATSTARRGKPPTKEPISQTTDDILVASAECPSDDEDIDPCEPSSGGLANPTRAGGREPYPGSAEVIRESSSTTGMVVGIVAAAALCILILLYAMYKYRNRDEGSYHVDESRNYISNSAQSNGAVVKEKQPSSAKSSNKNKKNKDKEYYV

SEQ ID NO: 1206 - DNA, 1540 bp, Rattus norvegicus
  ref <308>: DATABASE ACCESSION NUMBER: Refseq / NM_012981
  ref <309>: DATABASE ENTRY DATE: 2003-01-14
cggcgcggcggcgcggccccgctggctggcgcggagcgtcagtcggcagcgcggggcccggcgggcgcgggcgaggcgctcctcctccccgtgcgagcgaggaggcggtggccgagggtgggaacccagccccggcgggagcgcgccgagagccacccggcagccctgcgctttgttccgttccggggctggaggtgtggccggcgttgtggcccgttccgcgctggtcctgctgcgctacgtgcacccggctgcacccgggcgcggcggcgggctccggctgtgcgtggcctctgtccctacccacccgcctcctggcgtaaccggtgtgcagcggagaagtccgctcgtcactccgacccaagtaggagggcctggccggcgctcagacagactcctttgattgtagtcatcctggggtctgactaccagaagcatggcgaccagcgctgttcccagtgacaaccttcccacatataaactggtagtggtgggagatggcggtgtgggcaagagtgctctcactattcagtttttccagaagatcttcgtgcctgactacgaccccaccattgaagactcctacctgaagcatacagagatcgacaatcaatgggccatcttggacgttctggacacagctgggcaggaggagttcagtgccatgcgggagcaatacatgcgcacaggggatggcttcctcattgtctactctgtcaccgacaaggccagcttcgagcacgtggaccgcttccaccagctcattctgcgtgtcaaggacagggagtcattcccaatgatcctcgtggccaacaaagtggacctgatgcacctaaggaaagtcaccagggaccaaggaaaagaaatggcgaccaaatacaatatcccatatatagaaaccagtgccaaggacccgcctctcaacgtggacaaaaccttccatgacctagttagagtaattaggcaacaggttccagagaaaaaccagaagaagaaaaagaagacaaaatggcgaggggacagggccaccggcactcacaaactacagtgtgtcatcttgtgacagcctgaagccctgggcatagcaaccgtgaactgccagccctgggaccagcccactgcctaactgcactgagaaccatttctaaccacagcccttggctctggactgggcacaggaagagaacgagggaggaggggcaggagcaggcaggggctggctttgctgcttctcccatggagacatggagacagcttccaaacccttgttgttgattgagcccagttcccagtctcttggtgggcttgttgtttcttttaactccatagggctggtttgctgtggaagtgcttttatccacattcaacgcaccagacaagccatgagcaagcttcctccctgaccccgtccccagtgtctgagctcttgtgtcttttgtagatttttaaattatttgagtaatgattattttattaaagaggtctgtgcccattgcctgcaaagccccaagtctttggcagacctccgataaatgctgga

SEQ ID NO: 1207 - protein, 208 aa, Rattus norvegicus
  ref <308>: DATABASE ACCESSION NUMBER: Refseq / NP_037113
  ref <309>: DATABASE ENTRY DATE: 2003-01-14
MATSAVPSDNLPTYKLVVVGDGGVGKSALTIQFFQKIFVPDYDPTIEDSYLKHTEIDNQWAILDVLDTAGQEEFSAMREQYMRTGDGFLIVYSVTDKASFEHVDRFHQLILRVKDRESFPMILVANKVDLMHLRKVTRDQGKEMATKYNIPYIETSAKDPPLNVDKTFHDLVRVIRQQVPEKNQKKKKKTKWRGDRATGTHKLQCVIL

SEQ ID NO: 1208 - DNA, 1081 bp, Homo sapiens
  ref <308>: DATABASE ACCESSION NUMBER: Refseq / NM_012219
  ref <309>: DATABASE ENTRY DATE: 2002-12-23
ggcggcggcgacgctgcctcctcaccggcgcaggctaggagggggcggcctgagtgccgtagccgagccggggctggagcgcgcggtctgacctacgagaaacatggcaaccagcgccgtccccagtgacaacctccccacatacaagctggtggtggtgggggatgggggtgtgggcaaaagtgccctcaccatccagtttttccagaagatctttgtgcctgactatgaccccaccattgaagactcctacctgaaacatacggagattgacaatcaatgggccatcttggacgttctggacacagctgggcaggaggaattcagcgccatgcgggagcaatacatgcgcacgggggatggcttcctcatcgtctactccgtcactgacaaggccagctttgagcacgtggaccgcttccaccagcttatcctgcgcgtcaaagacagggagtcattcccgatgatcctcgtggccaacaaggtcgatttgatgcacttgaggaagatcaccagggagcaaggaaaagaaatggcgaccaaacacaatattccgtacatagaaaccagtgccaaggacccacctctcaatgtcgacaaagccttccatgacctcgttagagtaattaggcaacagattccggaaaaaagccagaagaagaagaagaaaaccaaatggcggggagaccgggccacaggcacccacaaactgcaatgtgtgatcttgtgacaggcctgaaggcctcgggcacagtgacggtggcctggccagccctcgggacccctccccacctaactgcactgaaaccatttctaaccacaacccttggcccaaggacttggtacaggaagggagaagggcaggtgggcagggagcaagacagggtctggcttttgccaagaggaacggggctttttccaccttcttcaaaagagacaagggaaggccacctgttaaagcaggaagcagcatcaagttgccccttgggcccccccatgttgtttggatttcaaaccgggtttccttcccccttcttttcgggttgggtgttgttggttatttggttaactacatatggtt

SEQ ID NO: 1209 - protein, 208 aa, Homo sapiens [sequence omitted]

SEQ ID NO: 1210 - DNA, 442 bp, Rattus norvegicus
  misc_feature (1)..(442): n=a, c, g or t
  ref <308>: DATABASE ACCESSION NUMBER: EMBL / AF042830
  ref <309>: DATABASE ENTRY DATE: 2000-03-03
gcgccccgagtgtgaggaatgtggtggcctgggttctccaactggcagatgtgagtggcgtcagggagatggtaaagggatcaccaggaacttctccacctgttctcctagcaccaggacctgtcctgatggccactgtgatgctctggagagccgggatatcaacatttgcccccaggactgtctccgtggccccattgttggcgggcatgagcgaggggagcgccaggggattaaagccggctatggcatctgcaactgtttccctgatgagaagaagtgcttatgcgagccagaggacagccagggcccattgtgcgatgagctgtgccgtacggtcatcacagccgctgtcctcttctccttaataatatctgtcctgctgtccaccgtccccatccaccgggaccaaaagcatgcgcacaagccgcccattgnatca

SEQ ID NO: 1211 - DNA, 812 bp, Rattus norvegicus
  ref <308>: DATABASE ACCESSION NUMBER: Refseq / NM_012861
  ref <309>: DATABASE ENTRY DATE: 2003-01-13
ctcagttccagagcctgtgtaccgttccaggttacggagtttctgcacagtttgcaaactggaacttggcagaatggctgagatctgcaaaatgaaatacacggtgttggacagccctttggggaagatagagctgtccggctgtgagcgaggcctgcatgggatacgatttctcagtgggaagaccccaaacactgaccccacagaggctccagcctgtcctgaggtgctcggtgggccagagggagtgccagagcccctggtgcagtgcacagcctggctggaagcctatttccacgaacctgcagccacagaggggcttcccttgcctgctctccatcaccctgtgttccagcaagattcattcaccagacaggtgttatggaagctgctgaaggttgtgaaattcggagaaatggtttcttaccagcaattagcagccctggcaggcaaccccaaagcggctcgtgcagtaggaggagcgatgaggagcaatccagtccccatcctcatcccctgccacagggtgattcgcagtgacggtgccattggcaattactctggaggaggacagactgtgaaagagtggcttctggcccatgagggcatcccaactggacagccggcctccaaaggcttgggtctgattgggagctggctcaagccatccttcgagtcttccagcccaaagccgtctggctgaaattgagtaaccgtttgaatgacacatagatgtaatgcggtgttggaagcggatgtgtggtgggtaccactatattaaaagagctgcatgtgtcctgggaaaaaaaaaa

SEQ ID NO: 1212 - protein, 209 aa, Rattus norvegicus
  ref <308>: DATABASE ACCESSION NUMBER: Refseq / NP_036993
  ref <309>: DATABASE ENTRY DATE: 2003-01-13
MAEICKMKYTVLDSPLGKIELSGCERGLHGIRFLSGKTPNTDPTEAPACPEVLGGPEGVPEPLVQCTAWLEAYFHEPAATEGLPLPALHHPVFQQDSFTRQVLWKLLKVVKFGEMVSYQQLAALAGNPKAARAVGGAMRSNPVPILIPCHRVIRSDGAIGNYSGGGQTVKEWLLAHEGIPTGQPASKGLGLIGSWLKPSFESSSPKPSG

SEQ ID NO: 1213 - DNA, 315 bp, Rattus norvegicus
  ref <308>: DATABASE ACCESSION NUMBER: EMBL / M37568
  ref <309>: DATABASE ENTRY DATE: 2000-03-04
actggggttctgttctgttcagctcctgggcggcgcagcggacgacaaacttacagccggtatcagaccttggaactagagaaggagtttctctttaatccttatttgaccagaaagcgccggatcgaagtctctcacgccctgggactcacggaaagacaagtgaagatttggttccagaatcgaaggatgaagtggaaaaaggagaacaacaaggataaacttcctggggcccgagatgaggagaaggtggaagaagaagggaatgaggaagaggagaaggaggaggaggaaaaggaagaaaataaggactaa

SEQ ID NO: 1214 - DNA, 1072 bp, Rattus norvegicus
  ref <308>: DATABASE ACCESSION NUMBER: Refseq / NM_017187
  ref <309>: DATABASE ENTRY DATE: 2003-01-14
ggcacgagggaaggaagtctctctgtggaggtctgagggaagagctcgcgccaggtagacgctgcgccgtcatcatgggcaagggggaccccaacaagccgcggggcaagatgtcctcgtacgccttcttcgtgcagacctgccgggaggagcacaagaagaagcatcccgactcgtcggtcaacttcgccgagttctcgaagaaatgttcggagagatggaagaccatgtctgccaaggaaaagtcgaagtttgaggatttggccaagagcgacaaagctcgttatgacagggagatgaagaactatgttcctcccaaaggtgataagaaaggaaagaaaaaagatccaaatgctcccaagagaccaccgtctgccttcttcctgttttgctctgaacatcgcccaaagatcaaaagtgaacaccccggcctgtctattggagatactgcaaagaaactgggggagatgtggtctgagcaatctgccaaagataaacaaccgtatgagcagaaagcagctaaactaaaggagaagtatgaaaaggatattgctgcataccgtgccaagggcaaaagtgaagtaggaaagaagggtcctggtaggccaacaggctcaaagaagaagaatgaaccagaagatgaggaagaggaggaggaggaagaagatgatgaagatgaagaggaggaagatgaggatgaagaataagtatctgtcctaaagtgtggagtatatgtgctcaggcaattattttgctaagaatgtgaaattcaagtgcagctcaacattagcttcagtataaaaactgtacagatttttgtatagctgatgagattctttgtagagaaaatactttttaaaaagggtttgtagctttttcaggggctacaacgtacagttagatttaaagcttttgatgttgaatgtttctaaatatttaatggtttctttaatttcttatgatagcaaaaaaaaaaacttcataggaatttctattaccagtaaaagaattttttttttaggatgttgcatttttgtttttttttaaaatttgtaataaaataatgtatatt

SEQ ID NO: 1215 - protein, 210 aa, Rattus norvegicus
  ref <308>: DATABASE ACCESSION NUMBER: Refseq / NP_058883
  ref <309>: DATABASE ENTRY DATE: 2003-01-14
MGKGDPNKPRGKMSSYAFFVQTCREEHKKKHPDSSVNFAEFSKKCSERWKTMSAKEKSKFEDLAKSDKARYDREMKNYVPPKGDKKGKKKDPNAPKRPPSAFFLFCSEHRPKIKSEHPGLSIGDTAKKLGEMWSEQSAKDKQPYEQKAAKLKEKYEKDIAAYRAKGKSEVGKKGPGRPTGSKKKNEPEDEEEEEEEEDDEDEEEEDEDEE

SEQ ID NO: 1216 - DNA, 2149 bp, Rattus norvegicus
  ref <308>: DATABASE ACCESSION NUMBER: EMBL / D87336
  ref <309>: DATABASE ENTRY DATE: 1999-01-21
agcgggttgtagtataaccccggagctcacctgaggaccctgaaaactaacgttttcccacgaggcagtttgggcaccatgaacaacgcaggactaaattcggagaaggtagctgctttgatccagaaactaaattctgaccctcagttcgtacttgcccagaatgtcgggaccacccacgatctgctggacatttgtctgaagagggccacagtccagggtgctcagcatgtgttccagcacgttgtgcctcaggaaggcaagccagtcaccaaccagaagagctctggacgatgctggatcttttcttgtttgaatgttatgagacttccattcatgaaaaaatttaacattgaagaatttgagtttagtcagtcttacctgtttttttgggacaaggtcgaacgctgttacttcttcttgaatgcttttgtggacacagcccagaaaaaagagcctgaagatggaagactggtgcagtatttgcttatgaaccctacaaatgatggtggacagtgggatatgcttgtcaatattgttgaaaaatatggtgttgtccctaagaaatgcttccctgaatcgcatacgacagaggccaccagaagaatgaacgatattctgaatcacaagatgagagaattctgtatacggcttcggaacctggtacacagtggagcaaccaaaggagagatctcatctacacaagatgccatgatggaggagatattcagagtagtgtgcatatgtttgggtaacccaccagagaccttcacctgggagtatcgagacaaagataaaaactaccacaaggtcggccccataacacccttgcagttttacaaggaacacgtgaagccactcttcaacatggaagataagatttgttttgtgaatgacccacggccccagcacaagtacaataaattgtacacagtagactacttgagcaatatggttggagggagaaaaacgctgtataacaaccagcccattgacttcttgaaaaagatggttgctgcctccatcagagatggagaggctgtgtggtttggctgtgatgttgggaagcacttcaatggcaagctgggcctcagtgacatgaatgtctatgatcacgagttagtgttcggtgtctccttgaagaacatgaacaaagctgagaggttggcttttggtgagtcactcatgacccacgccatgaccttcactgctgtctcagagaaggatgaccaggaaggtgcatttgtgaaatggagagtagagaattcatggggtgaagaccacggccacaaaggttacctgtgcatgaccgatgagtggttctctgagtatgtctacgaggtggtggtggacaagaagcatgtcccagaagaggtgctggctgtgttagagcaggagcctattgtcctgccggcatgggaccccatgggggctttggcttgaatgaggtgagtggaccgcctccagctccttcctcttcccatggatcggatgtagctgccaaggacagatccagggactgaaaccaaagttacatgggtggctgttcccacaggatacagtcagactgttgggtttccagtctcttccaggaacctctttgagaaaaatgctttctgctgaaacaaaatattcataaaggaaaaaaataaaggggaaggattggggcatcctgtctgctctcctcatctctgacggctcaggacctcatagcattttaattggatgtagttgtccacggtcatggtctttgtgtttgtggtaagacagtaagatgagcggctgaggtgtgtggagaacaaacagtcctgggctccttgttcctacagtagattagggagggttagctaggatttgaactctcaacgctgcatgctgccgcacaggtcactgtccttcctacctggcagtcgctgaattcaacttccacaaggttgtctcatgtgactaatagctcgagaagggaaggctgatcggctctgacatgattccttcctgttctgaactgtggggctcacctgggccaggttaaacctcgtcaggggctcaactgtcatcactagggcaccccattgaatgctttaacgtctgtctctgcgttgggggttgggtggggagaaaaagtgatgctcattctttctgataactc

SEQ ID NO: 1217 - protein, 455 aa, Rattus norvegicus
  misc_feature (1)..(455): Xaa=Unknown amino acid
MNNAGLNSEKVAALIQKLNSDPQFVLAQNVGTTHDLLDICLKRATVQGAQHVFQHVVPQEGKPVTNQKSSGRCWIFSCLNVMRLPFMKKFNIEEFEFSQSYLFFWDKVERCYFFLNAFVDTAQKKEPEDGRLVQYLLMNPTNDGGQWDMLVNIVEKYGVVPKKCFPESHTTEATRRMNDILNHKMREFCIRLRNLVHSGATKGEISSTQDAMMEEIFRVVCICLGNPPETFTWEYRDKDKNYHKVGPITPLQFYKEHVKPLFNMEDKICFVNDPRPQHKYNKLYTVDYLSNMVGGRKTLYNNQPIDFLKKMVAASIRDGEAVWFGCDVGKHFNGKLGLSDMNVYDHELVFGVSLKNMNKAERLAFGESLMTHAMTFTAVSEKDDQEGAFVKWRVENSWGEDHGHKGYLCMTDEWFSEYVYEVVVDKKHVPEEVLAVLEQEPIVLPAWDPMGALAX

SEQ ID NO: 1218 - DNA, 1762 bp, Rattus norvegicus
  ref <308>: DATABASE ACCESSION NUMBER: EMBL / AF080435
  ref <309>: DATABASE ENTRY DATE: 1999-07-05
tctaagtactgggtacatatctacatcagtcacatatgttccgtgtctgtcttggttctccatgtctgctggttttcctgcagatgactctgaaggagtgtggtatgatggacaagaatttggatgatgaagagtttctgcagcagtatcggaagcagaggatggacgagatgcggcagcagcttcataaagggccccaattcaagcaagtgcttgagatccccagtggagaaggatttttagatatgattgataaagaacagaaaagcacccttatcatggttcatatttatgaagatggtgtcccagggactgaagccatgaatggctgcatgatctgccttgccgcagagtaccccactgtcaaattctgccgagtgaggagctcggttattggggccagcagtcgttttacccggaatgcccttcctgctctgctcatctacaaggcgggtgaattgattggcaattttgttcgtgtcactgaccagctgggcgaagatttctttgctgtagaccttgaagctttcctgcaggaatttggattgctcccagaaaaggaagtcttggtgctgacatctgtgcgaaactctgccacctgtcacagtgaagacagcgatctagaaatagattgaactgataatccagttctgtagctgtctcattgtttgggctagaggacacatgtctgtatttatttctgtccttcctgtcttctggctttacagctgctctttgtagtctggtttagtatgtggaaagtcaagaaactcagattaaatcagaatcctgactcactttgtggctagcagtaaagcgatttctaattatatagacaggaagctgggttcttgagctgtttacatctctagcgtgacatctctgaaattgtttccagtcaatattgacatggcacccttgaaggcaatgtcttgaaaattgtcttctgatgacctcagaattccaccaggtctgagagtagaattccctagtgagtgtgttctgtgcagtgtaaacagtgcatttccataatcacttgattgcaaatcatgtttacttgcaatcagactgtacttattttctccagatccttttctaccagggtccatacaaggttgggaatatagctcagtggtgaactcttaacctagcatacacgtagctccaaggtatctgattcccacccagcactgtcaaaactaaaggttccagatggtgcctgatgctgtagttagcagtggtctctgctgagggagtcactggtccagtccagcataatgaagtatgaacaggaagggatgttttcttgctgactgctgtcatgatgttgggaagcaggcatcctattgactgacactggtgtgtatagagcttgaaaacctcagtaggaggacctttctgtatcctgctcatcagcatcttttcctctgttatttagcaaggtaatgctttgtttaacctttttaactttttaaaaagctttttttgcctattagaaaaaaattcatatttactagaggaaaattggccaaaatacagatgcaaaaatggtttaaaaatataattctgccacctgaatactgtatgttttggtaccattcatatatgggttttttttttaatgtatctagggtttttttttatggattcataggctttggtttgtctttaaatgacattgggatcattctgagcatactgtcagatagtgtgatcagttactaacagaagtttttcatgctattaaatactcttctgtaat

SEQ ID NO: 1219 - DNA, 406 bp, Rattus norvegicus
  ref <308>: DATABASE ACCESSION NUMBER: EMBL / AA799891
  ref <309>: DATABASE ENTRY DATE: 2000-03-03
gatacaaatctatttaatagtaaacatatcaaagatagctttgtgtttcaataaatatattctaaaagtagttcagagcatgctgttgtaatcactaaggaagacttgagactgtcagtccctctgcagaaatgctgtgcacagatgcaaaatgatcaaacgctgagacaataatgaatctcaagaaagtggcgtagccatctcgtgccataatttcttcattttgaagctgcccctctgtgtgtactaaatccgtcaatgatgttttcaggcgggtgcttttcatcactcgatgtggccagaatcacttctgtcccttcagtgctcgagcagagatccaccttcctcatctcaaaatgtgtagccttatatgcaagaagtcctgggttgtgtccccagcagcaaa

SEQ ID NO: 1220 - DNA, 2508 bp, Rattus norvegicus
  ref <308>: DATABASE ACCESSION NUMBER: Refseq / NM_053765
  ref <309>: DATABASE ENTRY DATE: 2003-01-13
ctgaggaactctattttaaaaaactctcaagtaaaaaaaagcaagtcatggagaagaacgggaataaccggaagcttcgggtttgcgttgccacctgcaaccgagccgattactccaaactggcccccatcatgttcggcattaagacggagcctgcgttcttcgagctcgacgtggtggtgctgggctctcacctgatcgacgactacggaaacacataccgcatgattgagcaggacgactttgacatcaacaccaggctacacacgattgttagaggggaagacgaagcagccatggtagagtcagtgggcctagcgctagtgaagctaccggatgtcctcaaccgcctgaagcctgacatcatgattgttcacggagaccgatttgacgccctcgctctggctacatctgctgccctgatgaacatccgcatccttcacattgaaggaggagaggtcagcgggactattgatgactctatcagacacgccataacaaaactggctcactaccacgtgtgctgcaccaggagtgcagagcaacacctgatctccatgtgtgaggaccacgaccgcatccttttggctggctgcccttcctatgacaaactgctctcagccaagaataaagactatatgagcatcattcggatgtggctaggtgatgatgtaaaatgtaaagattacattgttgccctgcaacacccggtgaccaccgacattaagcattccataaagatgttcgaactgacactggatgctcttatctcatttaacaagaggaccctagttctgtttccaaatatcgatgcaggcagcaaggagatggttcgagtgatgcggaagaagggcatcgagcatcaccccaatttccgcgcagtcaagcacgtcccgtttgaccagttcattcagctggtcgcccacgctggctgcatgattgggaatagcagctgtggagtgcgtgaggttggcgcctttggaacccctgtgatcaacctgggcacgcggcagataggaagagaaacgggggagaatgttcttcatgtccgggatgctgacacccaagacaaaatattacaagcactacacctccagttcggtaaacagtacccttgctcaaagatatatggggatggaaatgctgttccaaggattttaaagtttctcaaatccatcgaccttcaagagccactacagaagaaattctgcttccctcccgtgaaggagaacatctctcaggatattgaccatatcctcgaaactctgagtgccttggctgttgatctcggggggacgaatctgagagtggcgatagttagcatgaagggtgaaatagttaagaagtacacccagttcaatcctaaaacctatgaggaaaggattagtctaatcctgcagatgtgtgtggaagcggcagcagaagccgtgaagctcaattgcagaattctgggagtaggcatctccacaggtggccgtgtgaatccccaggaaggagttgtgctgcactcgaccaagctgatacaggagtggaactctgtggacctcaggacaccactctccgacaccctgcatctccccgtgtgggtggacaacgacggcaactgcgctgccatggcggagaggaagtttggccaaggaaaaggacaggagaactttgtgacgctcatcacagggacagggatcggtgggggaatcatccaccagcacgagctgatccacggcagctccttctgtgcggcagagcttggccacctcgtggtgtctctggatggtcctgactgctcctgtggaagccatgggtgcattgaagcctacgcctctggaatggccttgcagagggaagcaaagaagctccacgacgaggacctgctcttggtggaagggatgtcagtgccaaaagacgaagctgtgggcgccctccatctcatccaagccgccaagctgggcaacgtgaaggcccagagcatcttacggacagctggaactgctttgggactcggagttgtgaatatcctccacactatgaatccttccctggtgatcctgtctggagtcctggctagtcactacatccacattgtgagggacgtcatccgccagcaagccctgtcctccgtgcaggatgtggatgtagtggtttcagacttggttgacccggccctgcttggtgcggccagcatggttctggactacacgacccgcaggatccactaggcctcctgggaatagacctggactgagacccaagagctactgagtggaaccacgctctcttagatcagtatttcttcaaaggccagtgtgggaggctgcggagccagctcagtggtcaagagcctaaactgctcttgccaaagacccaagttcagttcccagcacccatgtcaggcactcaactgcctgaaagccaagctccaggggatccagtgcctcagctgcctcaggcagctgcactcaaatgtacatagtcctctccagaatacacgtaaattaaaataaatcttgg

SEQ ID NO: 1221 - protein, 722 aa, Rattus norvegicus
  ref <308>: DATABASE ACCESSION NUMBER: Refseq / NP_446217
  ref <309>: DATABASE ENTRY DATE: 2003-01-13
MEKNGNNRKLRVCVATCNRADYSKLAPIMFGIKTEPAFFELDVVVLGSHLIDDYGNTYRMIEQDDFDINTRLHTIVRGEDEAAMVESVGLALVKLPDVLNRLKPDIMIVHGDRFDALALATSAALMNIRILHIEGGEVSGTIDDSIRHAITKLAHYHVCCTRSAEQHLISMCEDHDRILLAGCPSYDKLLSAKNKDYMSIIRMWLGDDVKCKDYIVALQHPVTTDIKHSIKMFELTLDALISFNKRTLVLFPNIDAGSKEMVRVMRKKGIEHHPNFRAVKHVPFDQFIQLVAHAGCMIGNSSCGVREVGAFGTPVINLGTRQIGRETGENVLHVRDADTQDKILQALHLQFGKQYPCSKIYGDGNAVPRILKFLKSIDLQEPLQKKFCFPPVKENISQDIDHILETLSALAVDLGGTNLRVAIVSMKGEIVKKYTQFNPKTYEERISLILQMCVEAAAEAVKLNCRILGVGISTGGRVNPQEGVVLHSTKLIQEWNSVDLRTPLSDTLHLPVWVDNDGNCAAMAERKFGQGKGQENFVTLITGTGIGGGIIHQHELIHGSSFCAAELGHLVVSLDGPDCSCGSHGCIEAYASGMALQREAKKLHDEDLLLVEGMSVPKDEAVGALHLIQAAKLGNVKAQSILRTAGTALGLGVVNILHTMNPSLVILSGVLASHYIHIVRDVIRQQALSSVQDVDVVVSDLVDPALLGAASMVLDYTTRRIH

SEQ ID NO: 1222 - DNA, 3669 bp, Homo sapiens
  ref <308>: DATABASE ACCESSION NUMBER: Refseq / NM_005476
  ref <309>: DATABASE ENTRY DATE: 2002-12-23
cggcgtctggaactctattttaagaacctctcaaaacgaaacaagcaaatcatggagaagaatggaaataaccgaaagctgcgggtttgtgttgctacttgtaaccgtgcagattattctaaacttgccccgatcatgtttggcattaaaaccgaacctgagttctttgaacttgatgttgtggtacttggctctcacctgatagatgactatggaaatacatatcgaatgattgaacaagatgactttgacattaacaccaggctacacacaattgtgaggggagaagatgaggcagccatggtggagtcagtaggcctggccctagtgaagctgccagatgtccttaatcgcctgaagcctgatatcatgattgttcatggagacaggtttgatgccctggctctggccacatctgctgccttgatgaacatccgaatccttcacattgaaggtggggaagtcagtgggaccattgatgactctatcagacatgccataacaaaactggctcattatcatgtgtgctgcacccgcagtgcagagcagcacctgatatccatgtgtgaggaccatgatcgcatccttttggcaggctgcccttcctatgacaaacttctctcagccaagaacaaagactacatgagcatcattcgcatgtggctaggtgatgatgtaaaatctaaagattacattgttgcactacagcaccctgtgaccactgacattaagcattccataaaaatgtttgaattaacattggatgcacttatctcatttaacaagcggaccctagtcctgtttccaaatattgacgcagggagcaaagagatggttcgagtgatgcggaagaagggcattgagcatcatcccaactttcgtgcagttaaacacgtcccatttgaccagtttatacagttggttgcccatgctggctgtatgattgggaacagcagctgtggggttcgagaagttggagcttttggaacacctgtgatcaacctgggaacacgtcagattggaagagaaacaggggagaatgttcttcatgtccgggatgctgacacccaagacaaaatattgcaagcactgcaccttcagtttggtaaacagtacccttgttcaaagatatatggggatggaaatgctgttccaaggattttgaagtttctcaaatctatcgatcttcaagagccactgcaaaagaaattctgctttcctcctgtgaaggagaatatctctcaagatattgaccatattcttgaaactctaagtgccttggccgttgatcttggcgggacgaacctccgagttgcaatagtcagcatgaagggtgaaatagttaagaagtatactcagttcaatcctaaaacctatgaagagaggattaatttaatcctacagatgtgtgtggaagctgcagcagaagctgtaaaactgaactgcagaattttgggagtaggcatttccacaggtggccgtgtaaatcctcgggaaggaattgtgctgcattcaaccaaactgatccaagagtggaactctgtggaccttaggacccccctttctgacactttgcatctccctgtgtgggtagacaatgatggcaactgtgctgccctggcggaaaggaaatttggccaaggaaagggactggaaaactttgttacacttatcacaggcacaggaatcggtggtggaattatccatcagcatgaattgatccacggaagctccttctgtgctgcagaactgggccaccttgttgtgtctctggatgggcctgattgttcctgtggaagccatgggtgcattgaagcatacgcctctggaatggccttgcagagggaggcaaaaaagctccatgatgaggacctgctcttggtggaagggatgtcagtgccaaaagatgaggctgtgggtgcgctccatctcatccaagctgcgaaacttggcaatgcgaaggcccagagcatcctaagaacagctggaacagctttgggtcttggggttgtgaacatcctccataccatgaatccctcccttgtgatcctctccggagtcctggccagtcactatatccacattgtcaaagacgtcattcgccagcaggccttgtcctccgtgcaggacgtggatgtggtggtttcggatttggttgaccccgccctgctgggtgctgccagcatggttctggactacacaacacgcaggatctactagacctccaggaacagacatggaccttctctccagagctcctgagtggaatcaagttcttgtctttaggatgaccgtttcttaacaatcaaatctggtattgaactgcaggtgactttggcagagaaatgttttcacttttggtctcctcttccagagtcacctttccccactcctatttttgtagatgctattctttctgatgtcttcttactaggggtcattttagctcaaaccctgtaagttacagtcacaattttctgtgccaaagcagctacaataatagagaggaagccttcttagaactctgcttactaatgtattaataccactgagaccttcaggccttgctgggatatcacttcatcctgaagtttgcattaataatccttccaggccgggcacagtggctcacgcctgtaatcccagcactttgggaggccgaggcgggcggatcacgaggtcaggagatcgagaccgccctggctaacatggtgaaacatggtgaaaccccgtctctactaaaaatacaaaaaattagctgggtgtggtggcgggtccagctactcgggaggctgaggcaggagaatggcatgaaccccaggctggagtgcagtggctcaatgcaacctctgccccccgggttcggtgattctcctgcctcagcctcttgagtggctgggattgcgggcacatgcaccacgcccggctgatttttttttgtatttttagtggacagggtttcaccatgttggccaggctggtcttgaactcctgacctcaggtgatccgcccgcctctgcctcccaaggtgctggattacaggtgtaagccatcacacctggccctagtgacaggtttttatgggtacttttagatgatctaagaaatcatgtgcatatatctttcagatttctattttggaaaatgaaggtttctacaacatattgtttcagtgttcaaataaactgaaggactcaacattacatttgaactatatccttcctagtgggttagtgtgaaaaagagtttggctgattcctaaaactctgccagccctgcagtaatctccaggcctggttattgttcagacattccatggtgattcctgggaaggaagcttggctgctcagtttctgagtctggggtgagataatgttctggaaggacatctgttctttggtgtaatctctcatggtgaaatctgctctgtacatcagacaattgcattgctaccaagtttcataccaaatatttgaaaggatggtattgaatctaaaccaaatattaggtttttattaaactcatgggaaggctaatatattccaacgtaaattattacatatggttaagtaattgcatgttaatttattttaatgtaaatatttttgttactgttctgagccaaattctaaagaaaaaataaatacatttccttgttgaaaaaaaaaa

SEQ ID NO: 1223 - protein, 722 aa, Homo sapiens
  ref <308>: DATABASE ACCESSION NUMBER: Refseq / NP_005467
  ref <309>: DATABASE ENTRY DATE: 2002-12-23
MEKNGNNRKLRVCVATCNRADYSKLAPIMFGIKTEPEFFELDVVVLGSHLIDDYGNTYRMIEQDDFDINTRLHTIVRGEDEAAMVESVGLALVKLPDVLNRLKPDIMIVHGDRFDALALATSAALMNIRILHIEGGEVSGTIDDSIRHAITKLAHYHVCCTRSAEQHLISMCEDHDRILLAGCPSYDKLLSAKNKDYMSIIRMWLGDDVKSKDYIVALQHPVTTDIKHSIKMFELTLDALISFNKRTLVLFPNIDAGSKEMVRVMRKKGIEHHPNFRAVKHVPFDQFIQLVAHAGCMIGNSSCGVREVGAFGTPVINLGTRQIGRETGENVLHVRDADTQDKILQALHLQFGKQYPCSKIYGDGNAVPRILKFLKSIDLQEPLQKKFCFPPVKENISQDIDHILETLSALAVDLGGTNLRVAIVSMKGEIVKKYTQFNPKTYEERINLILQMCVEAAAEAVKLNCRILGVGISTGGRVNPREGIVLHSTKLIQEWNSVDLRTPLSDTLHLPVWVDNDGNCAALAERKFGQGKGLENFVTLITGTGIGGGIIHQHELIHGSSFCAAELGHLVVSLDGPDCSCGSHGCIEAYASGMALQREAKKLHDEDLLLVEGMSVPKDEAVGALHLIQAAKLGNAKAQSILRTAGTALGLGVVNILHTMNPSLVILSGVLASHYIHIVKDVIRQQALSSVQDVDVVVSDLVDPALLGAASMVLDYTTRRIY

SEQ ID NO: 1224 - DNA, 1739 bp, Rattus norvegicus
  misc_feature (1)..(1739): n=a, c, g or t
  ref <308>: DATABASE ACCESSION NUMBER: Refseq / NM_080586
  ref <309>: DATABASE ENTRY DATE: 2003-01-13
ctatgcacattccttgtactcactgtgctgctgctgaggtgtgaggcaaactccgcttggggactgagctagtggagaaaggatcttaaaagcgacctgatgggttctgggaaagtcttccttttctctccttccctcctgtggagtcaaactagaggagtgaggttgatattcttgttactaaccctgcatctgggaaactgcattgataaagcagatgatgaagatgatgaagatttaactatgaacaaaacatgggtcttggcacctaaaattcatgaaggagatatcacacagattctcaactctttacttcaaggctatgataacaaacttcgtccagatataggcgtgagacccacagtaattgaaactgatgtttatgtaaacagcattggacctgttgatcccataaacatggagtacacgatagacatcatttttgcccagacttggttcgatagccgtttaaagttcaacagcaccatgaaagtccttatgcttaacagcaacatggtgggaaaaatttggatccctgacacgttcttcaggaactcaaggaaatctgatgcgcactggataacaacgcccaatcgcctgctgcggatatggagtgatggaagggttctctacactctgagattaacaattaatgcagaatgctaccttcaactccataactttcctatggatgaacattcctgtccactggaattttcaagctatggataccctaaaaatgaaattgagtacaagtggaaaaagccctcagtggaagtggctgatcctaagtactggagattgtatcagtttgcctttgtagggttaagaaattcaaccgaaatctctcacacaatctccggagattatattatcatgactatcttttttgacctgagcagacggatgggctatttcacaattcagacctacattccgtgcattctaacagttgttctttcctgggtgtctttttggatcaacaaagatgctgtacctgctagaacatccctgggtatcactacggttttgactatgacaaccctcagtacaatcgctagaaaatctttacctaaggtttcttacgtgacagcaatggatctctttgtctctgtgtgtttcatttttgtgtttgcagcactcatggagtatggaaccttgcattattttactagtaacaataaaggaaaaaccaccagagacaggaagctgaaaagcaaaacttcggtatccccaggtctccatgctggatctactctgattcccatgaacaacatttctatgcctcaaggggaagatgattatggttaccagtgcttggagggcaaagactgtgctacctttttctgttgctttgaagactgcagaactgggtcctggagagaagggcgaatacacatacgcattgccaaaatcgactcctactccaggatctttttcccaacagcttttgccttgttcaatctggtttactgggttggatatctatacttataagttctgccaatagataaaaaaattcataaaaatctggcttagtccaatataatcacttcgatttcataacaggaagttagaatttaaaatgaaagtctaccagttaaaatctgaatcatttggtcatatgattaaggctttcataaataaataagaaagaattattcaggttaatttacctaactaaacatgaaattcatgtccaatatagcacatttaaancagtaaacttaataattttt

SEQ ID NO: 1225 - protein, 465 aa, Rattus norvegicus
  ref <308>: DATABASE ACCESSION NUMBER: Refseq / NP_542153
  ref <309>: DATABASE ENTRY DATE: 2003-01-13
MGSGKVFLFSPSLLWSQTRGVRLIFLLLTLHLGNCIDKADDEDDEDLTMNKTWVLAPKIHEGDITQILNSLLQGYDNKLRPDIGVRPTVIETDVYVNSIGPVDPINMEYTIDIIFAQTWFDSRLKFNSTMKVLMLNSNMVGKIWIPDTFFRNSRKSDAHWITTPNRLLRIWSDGRVLYTLRLTINAECYLQLHNFPMDEHSCPLEFSSYGYPKNEIEYKWKKPSVEVADPKYWRLYQFAFVGLRNSTEISHTISGDYIIMTIFFDLSRRMGYFTIQTYIPCILTVVLSWVSFWINKDAVPARTSLGITTVLTMTTLSTIARKSLPKVSYVTAMDLFVSVCFIFVFAALMEYGTLHYFTSNNKGKTTRDRKLKSKTSVSPGLHAGSTLIPMNNISMPQGEDDYGYQCLEGKDCATFFCCFEDCRTGSWREGRIHIRIAKIDSYSRIFFPTAFALFNLVYWVGYLYL

SEQ ID NO: 1226 - DNA, 1745 bp, Homo sapiens
  ref <308>: DATABASE ACCESSION NUMBER: Refseq / NM_000816
  ref <309>: DATABASE ENTRY DATE: 2003-01-17
cctgacgctttgatggtatctgcaagcgtttttgctgatcttatctctgccccctgaatattaattccctaatctggtagcaatccatctccccagtgaaggacctactagaggcaggtggggggagccaccatcagatcatcaagcataagaataatacaaaggggagggattcttctgcaaccaagaggcaagaggcgagagaaggaaaaaaaaaaaaaaagcgatgagttcaccaaatatatggagcacaggaagctcagtctactcgactcctgtattttcacagaaaatgacggtgtggattctgctcctgctgtcgctctaccctggcttcactagccagaaatctgatgatgactatgaagattatgcttctaacaaaacatgggtcttgactccaaaagttcctgagggtgatgtcactgtcatcttaaacaacctgctggaaggatatgacaataaacttcggcctgatataggagtgaagccaacgttaattcacacagacatgtatgtgaatagcattggtccagtgaacgctatcaatatggaatacactattgatatattttttgcgcaaatgtggtatgacagacgtttgaaatttaacagcaccattaaagtcctccgattgaacagcaacatggtggggaaaatctggattccagacactttcttcagaaattccaaaaaagctgatgcacactggatcaccacccccaacaggatgctgagaatttggaatgatggtcgagtgctctactccctaaggttgacaattgatgctgagtgccaattacaattgcacaattttccaatggatgaacactcctgccccttggagttctccagttatggctatccacgtgaagaaattgtttatcaatggaagcgaagttctgttgaagtgggcgacacaagatcctggaggctttatcaattctcatttgttggtctaagaaataccaccgaagtagtgaagacaacttccggagattatgtggtcatgtctgtctactttgatctgagcagaagaatgggatactttaccatccagacctatatcccctgcacactcattgtcgtcctatcctgggtgtctttctggatcaataaggatgctgttccagccagaacatctttaggtatcaccactgtcctgacaatgaccaccctcagcaccattgcccggaaatcgctccccaaggtctcctatgtcacagcgatggatctctttgtatctgtttgtttcatctttgtcttctctgctctggtggagtatggcaccttgcattattttgtcagcaaccggaaaccaagcaaggacaaagataaaaagaagaaaaaccctgcccctaccattgatatccgcccaagatcagcaaccattcaaatgaataatgctacacaccttcaagagagagatgaagagtacggctatgagtgtctggacggcaaggactgtgccagttttttctgctgttttgaagattgtcgaacaggagcttggagacatgggaggatacatatccgcattgccaaaatggactcctatgctcggatcttcttccccactgccttctgcctgtttaatctggtctattgggtctcctacctctacctgtgaggaggtatgggttttactgatatggttcttattcactgagtctcatggagagatgtctgttctaagtccacttaaataatcctctatgtggttgataagtatctgaatctgtttc

SEQ ID NO: 1227 - protein, 467 aa, Homo sapiens
  ref <308>: DATABASE ACCESSION NUMBER: Refseq / NP_000807
  ref <309>: DATABASE ENTRY DATE: 2003-01-17
MSSPNIWSTGSSVYSTPVFSQKMTVWILLLLSLYPGFTSQKSDDDYEDYASNKTWVLTPKVPEGDVTVILNNLLEGYDNKLRPDIGVKPTLIHTDMYVNSIGPVNAINMEYTIDIFFAQMWYDRRLKFNSTIKVLRLNSNMVGKIWIPDTFFRNSKKADAHWITTPNRMLRIWNDGRVLYSLRLTIDAECQLQLHNFPMDEHSCPLEFSSYGYPREEIVYQWKRSSVEVGDTRSWRLYQFSFVGLRNTTEVVKTTSGDYVVMSVYFDLSRRMGYFTIQTYIPCTLIVVLSWVSFWINKDAVPARTSLGITTVLTMTTLSTIARKSLPKVSYVTAMDLFVSVCFIFVFSALVEYGTLHYFVSNRKPSKDKDKKKKNPAPTIDIRPRSATIQMNNATHLQERDEEYGYECLDGKDCASFFCCFEDCRTGAWRHGRIHIRIAKMDSYARIFFPTAFCLFNLVYWVSYLYL

SEQ ID NO: 1228 - DNA, 901 bp, Rattus norvegicus
  ref <308>: DATABASE ACCESSION NUMBER: EMBL / S81448
  ref <309>: DATABASE ENTRY DATE: 2000-03-04
taatcttcaaacttctcatggtaccactgatggagttggatgagctgtgcctgctcgacatgctggtctacttggaaggtttcatggccttcgtgtccattgtggggctccggtcggttggctctccgtacggccgctactcgccgcagtggcccggcatccgagtgcccgcgcgacctgcctggttcatacaggagctgccctcgatggcctggccgctgtacgagtacattcgtcctgcagccgcgcgactgggcaacctgcctaaccgcgtcctgctggctatgtttctgatccactacgtgcaaaggacgctggttttcccggttctgatcaggggagggaagcccaccctcctggtcacctttgtcttggccttcctgttctgcaccttcaacggctatgtacagagcagatacttgagccagtttgcggtttatgctgaagactgggtgacccatccctgtttcctgacaggctttgccctgtggttagtgggcatggtgataaatatccactcagaccacatcctgaggaatctgagaaaaccaggggaaactggatacaagatacccaggggaggcctgtttgaatacgtatctgcagccaactattttggggagctcgtggagtggtgtggctttgcactggccagctggtccctccagggtgtagtgtttgcactgttcacactcagcacactgctcaccagagcgaagcagcaccatcagtggtaccatgagaagtttgaagattaccccaagtcaagaaaaatactgattccatttgtgctttagtgctctgttagcgctgttgcctcccatgagctgagtctgtctgtctccctggtgactttgctctgagcacttacgaatgaattgttttccttaattctcctgca

SEQ ID NO: 1229 - DNA, 139 bp, Rattus norvegicus
  misc_feature (1)..(139): n=a, c, g or t
  ref <308>: DATABASE ACCESSION NUMBER: EMBL / AA859562
  ref <309>: DATABASE ENTRY DATE: 2000-03-03
tttttttttttttttttgagataggaaaataaggagtttaataattggagggggcagcacacacactgcagcagtcacaccggtgcggtctgccagcaccggctcctgcagtgtcgcagggaangangggttggcatga

SEQ ID NO: 1230 - DNA, 2012 bp, Rattus norvegicus
  ref <308>: DATABASE ACCESSION NUMBER: EMBL / S63519
  ref <309>: DATABASE ENTRY DATE: 2000-06-10
cggtcccacttgcctctaaatgcagacagtgagtacgtcacattaagtgaccaccacttcttagggactgccagtagcagggggaatgatacggccagttgaggcatttagcagtggaactgttctataagtgggtatttattttcgacaaggtaggccacactggcctcatctgctctgagtcttcctaatatagaaagtcatggaagttgtatgtagatgcctttgtgttaaatcttgcttcagaatcagagtgggatctctgggacacataccaagctcgtttgccttcattctgtattttgtttctttgataaaataatgattttcattttttgcttaatactacattcttaagctacatagactctctccgtgatacaacaggcagtgcatgctgttactagttcttttctcctagtaaggcctacacagttatttcttgttaagaagctgtgagatgtgacctccttcctgcttagcatcacacagaaaatctgatttcaagtatctcacttattcccaccgcatcactgtcagaacagcctctcagattcacccaaagaaatacaatcatgatgactcaaatggtgtataactcaggtccagtaattctgcataggtaatcagttaaaacagtttaaacatgaaattgattcaaatattgataatgttttactaatgtgagcaacagtgttatggaaaggattcatttgactcttgtggaatgggcctgtctaatttttcttaacataatcggtaaagtattactaagaaatgctccatcctgtttctgtccaagaaaggaaagcgatacctcctgctccctgaggtggcactagggatttaaccgggaccaggaccgcctgcacgctaggcaagcactctacaaatgagatatattcctagaccaacaaatccttttgttcttctaataatttgtttaaggagtttaatcttgaactccagatgcccgcatagtcttatctgggaagatattcgtttatttctcattttgtcacccatatctacttttttcttagaggttgatgtacagatatctaaaaatatgtattcctcaatgatcttatttaggagagtgtttttactgtcatatttaaaaatagattattttcatgctgccttctgttgattttggcaaattgtataatagatcgtcttgatcattgcattttttgtcttgtaaatgtatattttgtctttgtaaattcatttacttctcaggtgtgactttatggttgactttaaacgtatgaatgaatgaggatgtaaggaaagctgtcttatttattaacgtagatgcggtaaaagaagggtatttgggtttgagcttctttttatttgagtatagaaagttatgcttttaagtaaagaaatagcaagtacagaggaaataaaaataaatagaagaaagtaaaaaggaaaaaaaccctaagaaaatgaaacaaaaaaaaagatgtaagcgaaagcaagccacatgtgatggccaatgcctgtgaccagcacttgagagactaaggcaggaagaatactacaagcttgaggcatgtgtggtttcagagtgactttgaagcccgtctgggccatagagtaagaccaggttttgttctggagaacataaacaagagtatatgataattacagggaatagtctcatggatttacataaagacaacaagagggcttaagtggagatgtgtggtgctgaagtcttgcagattggaggcagggcctgacagagcatccaccattaccaaaatccttaggatctgggagcaacaccatagctgccaagggtctgatttaaatctgttctactcactggtcagcatattggactctgctactaatataatgttaaaatagcatacctggtaaaaataaaatacacgaagtgtgttgagtgtttgagatgaaagtaaaagaaaacctaaatcattgggcaacttgggaggaaaatcattttaaataaacaaatcacatcattaccg

SEQ ID NO: 1231 - DNA, 1303 bp, Rattus norvegicus
  ref <308>: DATABASE ACCESSION NUMBER: EMBL / X62951
  ref <309>: DATABASE ENTRY DATE: 1997-05-12
gtaacattacatatgttagtactcctaacacttcttgggactgtgcctcagggatcacaacctatataagtttagaagttctgaaagacagtcatgaccttggtatataggttcagatagtgtccagattggaatcctgatgctaaagacttagtaagagacaaaaaaaaggagttgagaattacttagggctagggctatctaggtgctacaagggcagcacaaggacatctgctgttgccctacaatacaaggcttatagagaattcagaactgccattgactcagatataaaaagagtaaaagactttttagctgacctccaagaatacctaacttccctctcagaggtagtccttcaaaataagaaaagattagacctgatattccttaaagaaggagtctgtgtgctatactgaaagaaaaatgttgcttctatacagaccattcaggagtaattaaagactccataaataaacttaaaaaaaggttagacaaaagacagacagacagaaaaacacatcagagatagttcgagagctagtttagtagatctccctggatgactaccctactctctgctacagctgggccattattaataattttcttggttttagtttttggctcctgcgtgacaaacaggttaattgcttttgttaaaaatcgagtgggtgctgtgcggttgatggttctgagacaacagtaccagtcagttaggacaactggtgagaccaaataatacttgatatcaaaattctaagattagaattatttaataggagaagacaggaatgaaaagaaaattatataaattctaggtttaaaaatataaaaattaaaaaaataaaccccaaaaggccacagacccagggctaagcctgcagccaagactagcaggccataaagataaaggagcacaggaaacactgttcaggcaggactgacaagccataaaaaaaggaatgcaggaaccagcctgagttaatgagactgattcatgggacgtctggcaggaagacatctcccccagctcactcagggccatatttcaactaggtgtcctccggcccctgataagcccctgacttctagcacgttactctttctgctttgttctcactgctatgtttgaatgagccaattgtatgtaaccacgccaaaacccctagccttctctatataaccctctgacttttgagtttcggggccgacacctctgtctcctgcgtgggatgcgtgtcggcccggagatctctgtaataggtctccgtaataaacctcgcctttgcttattacatcc

SEQ ID NO: 1232 - DNA, 6822 bp, Rattus norvegicus
  ref <308>: DATABASE ACCESSION NUMBER: Refseq / NM_013119
  ref <309>: DATABASE ENTRY DATE: 2003-01-14
cagtgttttgtcgtttgcgcaatggcgtgtgtctgccagtagatggcagtgacacgttgagtgccgccaaccttttcttttttctttctttttttttttttttccccttccagggccgttttctgatatatgttgggtaccatagagtgaatctcagaacaggaagcggaggcataagcagagaggattccggaaaggtctctttgttttcatgtccacagagaaagcaagggggaaaaattgaatgtaatttgcaaatccctgtggcccaaatctgaagaactacagggggtggcaccgtccattctaaccatcttggatgctgtcctttgttgagctgtgattcctaaggctctccatcaggcaattcttatgcaagaagctaaacgtaattaaatgtgcaggatgaaaagatggcccaggcactgctggtacccccgggacctgagagcttccgccttttcactcgagaatctcttgctgctatcgaaaagcgtgctgcagaagagaaagccaagaaacccaagaaagagcaagacattgacgatgagaacaaaccaaagccaaacagcgacttggaagctgggaagaaccttccatttatctatggagacattcctccagagatggtgtcagagcccctggaggacctggacccctactatgtcagtaagaaaacttttgtagtgttgaataaagggaaggcgatttttcgattcagcgccacctccgccctgtatattttaactccgctaaaccctgttaggaaaattgccattaagattttggtacactctttgttcagcatgcttatcatgtgcactattttgaccaactgtgtatttatgacgttgagtaatcctcccgactggacaaagaatgtagagtatacgttcactgggatctatacctttgagtcacttataaagatcttggcaagagggttttgcttagaagatttcactttcctccgtgacccatggaactggctggatttcagtgtcatcgtgatggcatatgtgacagagtttgtggacctgggcaatgtctcagcgctgagaacgttcagagttctccgagcattgaaaacaatatcagtcattccaggtttaaagaccatcgtgggggccctgatccagtccgtgaagaagctgtccgacgtcatgatcctcaccgtgttctgtctcagtgtctttgctctaatcgggctgcagctcttcatgggcaacctgaggaataaatgctcgcagtggcccccgagcgattcggcttttgaaaccaacactacttcctacttcaatggcacaatggattcaaatgggacatttgttaatgtaacaatgagcactttcaactggaaggattatatcgcagatgacagtcacttttatgtcttggatggacaaaaagatcctttactctgtggaaatggctccgatgcaggacaatgtccagaagggtacatctgtgtgaaggctggacgaaaccccaactacggctacacaagctttgacaccttcagctgggccttcttgtccctgtttcgactcatgactcaggactactgggagaatctttaccagttgacattgcgtgcagctgggaaaacctacatgatatttttcgtcctggtaattttcttgggctcgttttatttggtgaacttgatcctggctgtggtggccatggcctatgaggagcagaaccaggccacactggaggaggctgaacagaaggaggcagagtttcagcagatgctggagcaactgaagaagcagcaggaggaggctcaggcagtggctgcagcctccgcggcatccagagacttcagtggaataggagggttaggagaacttctggagagttcttcagaagcttccaagttgagctccaagagtgctaaggagtggaggaaccggaggaagaagaggagacagagggaacacttggagggaaaccacagagccgatggagacaggtttcccaagtcggaatcggaagacagtgtcaaacgaagaagcttcctgctctccctggatggcaacccgctgactggtgacaagaagctgtgctctccccaccagtctctcttgagtatccgtggctccctgttttccccaagacgcaatagcaaaacgagcattttcagcttcagaggtcgggcgaaggacgtggggtctgagaatgactttgcagacgatgagcacagcaccttcgaggacagcgagagcaggagagactccctgtttgtgccgcacagacctggagagcgacgcaacagtaacggtaccaccactgaaacggaagtcaggaagagaaggctaagttcttaccagatttcaatggaaatgctggaggattcctctggaagacaaagatccatgagcatagccagtatcctgaccaacaccatggaggaacttgaagaatctagacagaagtgcccaccatgctggtatagattcgccaatgtgtttttgatctgggactgctgtgatgcatggttaaaagtgaagcatcttgtgaatttaattgtgatggatccatttgttgatcttgccataacaatttgcatcgtattaaatacactgttcatggccatggagcactatcccatgacccagcagttcagcagtgtgctgactgtgggaaacctggtcttcactgggatcttcacagccgaaatggtccttaaaatcattgccatggacccctattattatttccaagagggctggaatattttcgatggaattattgttagcctgagtttaatggagctaggcctggcaaatgtggaggggctgtctgtgcttcggtccttcagactgctccgagtcttcaagttggcaaagtcctggcccacactgaacatgctcattaagatcatcggcaactcggtgggcgcactgggcaacctgaccctggtgctggccatcatcgtcttcatttttgccgtggtcggcatgcagctgtttggaaagagctacaaggagtgtgtctgcaagatcaatgtggactgcaagctgccgcgctggcacatgaacgacttcttccactccttcctgatcgtgttccgagtgctgtgtggggagtggatagagaccatgtgggactgcatggaggtcgcgggccagaccatgtgccttattgtgttcatgttggtcatggtgattgggaaccttgtggttctgaacctctttctggccttattgttgagttcctttagttcagataaccttgctgctactgacgatgataacgaaatgaacaacctccagatcgcggtgggaaggatgcaaaagggaattgattttgtgaaaaataagatacgggagtgcttccgaaaagcgtttttcagaaagccgaaagtgatagaaatccaagaaggcaacaaaatagacagctgcatgtccaataacacgggcatcgaaataagcaaagagcttaactaccttaaagacggtaatggaaccaccagcggcgtgggaaccggaagcagtgtggaaaaatacgtaatcgatgaaaatgactacatgtcattcataaacaatcccagcctcaccgtgactgtgccaattgctgtgggagagtctgactttgaaaatttaaatacggaagagttcagcagtgagtcagaattggaagaaagtaaggagaaattaaatgcaaccagctcttctgaaggaagcacagttgatgttgctccaccccgagaaggtgaacaagcagaaattgaacctgaggaggaccttaagccagaagcttgttttactgaagggtgcattaaaaaattccccttctgtcaagtaagtacagaagaaggtaaaggaaaaatatggtggaatcttaggaagacatgctacagcattgtggagcacaactggtttgagacattcattgtgttcatgattctcctcagtagtggcgctttggcctttgaggatatatacattgagcaacgaaagacgatcaagaccatgctggagtatgcagacaaggtcttcacgtacatcttcatcctggagatgctcctcaaatgggtggcctatggatttcaaacctatttcaccaatgcctggtgctggttggacttcctgatcgttgatgtttctttggttagcctggtagccaatgctcttggttactcagaacttggtgccatcaaatccctacggacactgagagctctgaggccgctccgagccttatcccgctttgaaggcatgagggtggttgtaaatgctcttgttggtgcaattccctccatcatgaatgtgttattggtgtgtctcatcttctggctgatttttagcatcatgggtgtgaatctgtttgctggaaagttctatcactgtgttaacacgacaacaggcaacatgtttgaaataaaagaagtgaacaatttcagtgactgtcaggctcttggcaagcaagcccggtggaagaatgtgaaagtcaactttgacaacgttggggctggctacctggcattgctgcaagtggccacattcaaaggctggatggacatcatgtatgcagctgttgattcgcgggacgtcaaactgcagcccatatatgaagaaaacctgtacatgtacctgtactttgtcatcttcatcatcttcggctcgttcttcactctaaatctattcatcggtgtcatcatagacaacttcaaccagcagaagaagaagtttggaggtcaagacatctttatgacagaagaacagaagaaatactacaatgcaatgaagaagctcggctcaaagaaacctcagaagcccatccctcggcctgcaaacaaatttcaagggatggtctttgattttgtaaccagacaagtgtttgacatcagcatcatgatcctcatctgcctcaacatggtgaccatgatggtggaaacggatgaccagagcaaatacatgaccctggttttgtcccgaatcaacctagtgttcattgtcctcttcactggggagtttctgctgaagctcatctccctcagatactactacttcacgatagggtggaacatctttgactttgtggtggtgattctctcgattgtaggaatgtttctcgcagagctgatagagaagtatttcgtgtcccctaccctgttccgagtcatccgcctggccaggattggacgaatcctacgcctgatcaaaggcgccaaggggatccgcactctgctctttgctttgatgatgtcccttcctgcgctgttcaacatcggcctcctgcttttcctggtcatgttcatctacgccatctttgggatgtccaactttgcctatgttaaaaaagaggctggaattgatgacatgttcaactttgagacttttggcaacagcatgatctgcttgttccaaatcaccacctctgccggctgggacggactgctggcccccatcctcaacagcgcacctcccgactgtgaccccgatgcaattcaccctggaagctcggtgaagggggactgtgggaacccatccgtggggattttcttttttgtcagctacatcatcatatccttcctggtggtggtgaacatgtacatcgctgtcatcctggagaacttcagcgtcgccaccgaagaaagtgcagagcccctgagtgaggacgactttgagatgttctacgaggtctgggagaagttcgaccctgacgccactcagttcatagagttctgcaagctttctgactttgcagctgccctggatcctcccctcctcatcgcaaagccaaacaaagtccagctcattgccatggacctgcccatggtgagtggagaccgcatccactgcctggacatcttgtttgcttttacaaagcgggtcctgggcgagagtggagagatggacgctcttcgaatccagatggaagatcgcttcatggcttccaacccctccaaggtctcttatgagcccattaccaccaccctgaaacggaaacaagaggaggtgtctgctgctatcattcagcgtaattatagatgttatcttttaaagcaacggttaaaaaacatatcgagtaaatacgacaaagagacaatcaagggaaggattgacttgcctataaaaggagatatggttattgacaaattgaatgggaattccaccccagaaaagacggatgggagttcctccacaacctctcctccttcctatgacagtgtaacaaaaccagataaggaaaagtttgagaaagacaaaccagaaaaagaaatcaaagggaaagaggtcagagagaatcaaaagtaaaaagagacaaagaaatgtctttgtaatcaattgtttacagcctctgaaggtaaagtatccgtgtcaactggactctaaggagaggtccatgccaaactgactgtttcaacaaatactcaaggtcagtgcctataccagacagtgacctctgtcactgccactctgtgagacagggtatcaacattgacaagaggttgctgcttccattaccagctgacactgctgaggagaactccattgtgcaagtgacccgtcatcatgcccccaaactccattagtacaacgctcctgtcatctatttttaacattcacatttgccatatttttacaaaatctgtcccagtgtatcttcctggtccccacttcatagtctgttcataatactatgtcactatttttgtaaatgaagtttacgttaagggaaaatatatatataagaatcccatgttgctaagtccacaagtttctccagtaatcataaaaaaatattttgcctgagagatgaaattattgctcaaaacaaaaaaaaataaattctaatgttaacagtttc

SEQ ID NO: 1233 - protein, 1951 aa, Rattus norvegicus
  ref <308>: DATABASE ACCESSION NUMBER: Refseq / NP_037251
  ref <309>: DATABASE ENTRY DATE: 2003-01-14
MAQALLVPPGPESFRLFTRESLAAIEKRAAEEKAKKPKKEQDIDDENKPKPNSDLEAGKNLPFIYGDIPPEMVSEPLEDLDPYYVSKKTFVVLNKGKAIFRFSATSALYILTPLNPVRKIAIKILVHSLFSMLIMCTILTNCVFMTLSNPPDWTKNVEYTFTGIYTFESLIKILARGFCLEDFTFLRDPWNWLDFSVIVMAYVTEFVDLGNVSALRTFRVLRALKTISVIPGLKTIVGALIQSVKKLSDVMILTVFCLSVFALIGLQLFMGNLRNKCSQWPPSDSAFETNTTSYFNGTMDSNGTFVNVTMSTFNWKDYIADDSHFYVLDGQKDPLLCGNGSDAGQCPEGYICVKAGRNPNYGYTSFDTFSWAFLSLFRLMTQDYWENLYQLTLRAAGKTYMIFFVLVIFLGSFYLVNLILAVVAMAYEEQNQATLEEAEQKEAEFQQMLEQLKKQQEEAQAVAAASAASRDFSGIGGLGELLESSSEASKLSSKSAKEWRNRRKKRRQREHLEGNHRADGDRFPKSESEDSVKRRSFLLSLDGNPLTGDKKLCSPHQSLLSIRGSLFSPRRNSKTSIFSFRGRAKDVGSENDFADDEHSTFEDSESRRDSLFVPHRPGERRNSNGTTTETEVRKRRLSSYQISMEMLEDSSGRQRSMSIASILTNTMEELEESRQKCPPCWYRFANVFLIWDCCDAWLKVKHLVNLIVMDPFVDLAITICIVLNTLFMAMEHYPMTQQFSSVLTVGNLVFTGIFTAEMVLKIIAMDPYYYFQEGWNIFDGIIVSLSLMELGLANVEGLSVLRSFRLLRVFKLAKSWPTLNMLIKIIGNSVGALGNLTLVLAIIVFIFAVVGMQLFGKSYKECVCKINVDCKLPRWHMNDFFHSFLIVFRVLCGEWIETMWDCMEVAGQTMCLIVFMLVMVIGNLVVLNLFLALLLSSFSSDNLAATDDDNEMNNLQIAVGRMQKGIDFVKNKIRECFRKAFFRKPKVIEIQEGNKIDSCMSNNTGIEISKELNYLKDGNGTTSGVGTGSSVEKYVIDENDYMSFINNPSLTVTVPIAVGESDFENLNTEEFSSESELEESKEKLNATSSSEGSTVDVAPPREGEQAEIEPEEDLKPEACFTEGCIKKFPFCQVSTEEGKGKIWWNLRKTCYSIVEHNWFETFIVFMILLSSGALAFEDIYIEQRKTIKTMLEYADKVFTYIFILEMLLKWVAYGFQTYFTNAWCWLDFLIVDVSLVSLVANALGYSELGAIKSLRTLRALRPLRALSRFEGMRVVVNALVGAIPSIMNVLLVCLIFWLIFSIMGVNLFAGKFYHCVNTTTGNMFEIKEVNNFSDCQALGKQARWKNVKVNFDNVGAGYLALLQVATFKGWMDIMYAAVDSRDVKLQPIYEENLYMYLYFVIFIIFGSFFTLNLFIGVIIDNFNQQKKKFGGQDIFMTEEQKKYYNAMKKLGSKKPQKPIPRPANKFQGMVFDFVTRQVFDISIMILICLNMVTMMVETDDQSKYMTLVLSRINLVFIVLFTGEFLLKLISLRYYYFTIGWNIFDFVVVILSIVGMFLAELIEKYFVSPTLFRVIRLARIGRILRLIKGAKGIRTLLFALMMSLPALFNIGLLLFLVMFIYAIFGMSNFAYVKKEAGIDDMFNFETFGNSMICLFQITTSAGWDGLLAPILNSAPPDCDPDAIHPGSSVKGDCGNPSVGIFFFVSYIIISFLVVVNMYIAVILENFSVATEESAEPLSEDDFEMFYEVWEKFDPDATQFIEFCKLSDFAAALDPPLLIAKPNKVQLIAMDLPMVSGDRIHCLDILFAFTKRVLGESGEMDALRIQMEDRFMASNPSKVSYEPITTTLKRKQEEVSAAIIQRNYRCYLLKQRLKNISSKYDKETIKGRIDLPIKGDMVIDKLNGNSTPEKTDGSSSTTSPPSYDSVTKPDKEKFEKDKPEKEIKGKEVRENQK

SEQ ID NO: 1234 - DNA, 527 bp, Homo sapiens
  ref <308>: DATABASE ACCESSION NUMBER: EMBL / AL079366
  ref <309>: DATABASE ENTRY DATE: 2000-02-20
tttttttttttttttttttcctttgtgggcttcttggctttctcttctgcagcacgtttttcgatagcggcaagagattctctagtaaaaaggcggaagctttcaggtcctgggggtaccaacagagcctgggccatcttttcatcctgcccatttaattacgtgtagcttcttgcataccaattaccttcttatttacttatcaagggctggaataaagaattcgaatcttggtcaaaagaaagtaaaaacgtctcgttgaaattcccatactgttgtctctaagccctcggaagataggctgggcccagactctcagcttttccccttagatagtcacagcgcctttttccggaaaagctccaggtcccttctgcgaattatctcatttattcttacaatatccctagaagagattctttgctcctttcccagcaagccactctactatgaatccttgacagggatctcatccctgacaaaccttgatgtggcttgccttcagatttcttgctccataatctctg

SEQ ID NO: 1235 - DNA, 477 bp, Rattus norvegicus
  ref <308>: DATABASE ACCESSION NUMBER: EMBL / AA859722
  ref <309>: DATABASE ENTRY DATE: 2000-03-03
tttttttttttttttttgacaggtacacaattttatttaacagcatttaaagtccacctcagaagagggacaccagagaattctttttttttttcatttaataaatacaaatgaataaaaatactttgttttgtacagagaccgcctctcctctcttcctcccccgcttgcttgccaggaagggctgaggatggcaacatgccctgtggccgctctgcatgggcatctccccacacagaccgcttctcacagagagggcttcatctcagtggcctacaatactatttcggtacaatcccctcctcctgcacctaccaacaccagactcttgcctttcaaacagaccgactcccctgggagaaggaaagcacaggcccccacaggtgcccgcctggagccccatagctggggactcgtgacaccatgggacatgcacgctggccactgacatgtgggcacgggacagaagcagacagt

SEQ ID NO: 1236 - DNA, 2153 bp, Homo sapiens
  ref <308>: DATABASE ACCESSION NUMBER: Refseq / NM_001993
  ref <309>: DATABASE ENTRY DATE: 2000-10-31
aagactgcgagctccccgcaccccctcgcactccctctggccggcccagggcgccttcagcccaacctccccagccccacgggcgccacggaacccgctcgatctcgccgccaactggtagacatggagacccctgcctggccccgggtcccgcgccccgagaccgccgtcgctcggacgctcctgctcggctgggtcttcgcccaggtggccggcgcttcaggcactacaaatactgtggcagcatataatttaacttggaaatcaactaatttcaagacaattttggagtgggaacccaaacccgtcaatcaagtctacactgttcaaataagcactaagtcaggagattggaaaagcaaatgcttttacacaacagacacagagtgtgacctcaccgacgagattgtgaaggatgtgaagcagacgtacttggcacgggtcttctcctacccggcagggaatgtggagagcaccggttctgctggggagcctctgtatgagaactccccagagttcacaccttacctggagacaaacctcggacagccaacaattcagagttttgaacaggtgggaacaaaagtgaatgtgaccgtagaagatgaacggactttagtcagaaggaacaacactttcctaagcctccgggatgtttttggcaaggacttaatttatacactttattattggaaatcttcaagttcaggaaagaaaacagccaaaacaaacactaatgagtttttgattgatgtggataaaggagaaaactactgtttcagtgttcaagcagtgattccctcccgaacagttaaccggaagagtacagacagcccggtagagtgtatgggccaggagaaaggggaattcagagaaatattctacatcattggagctgtggtatttgtggtcatcatccttgtcatcatcctggctatatctctacacaagtgtagaaaggcaggagtggggcagagctggaaggagaactccccactgaatgtttcataaaggaagcactgttggagctactgcaaatgctatattgcactgtgaccgagaacttttaagaggatagaatacatggaaacgcaaatgagtatttcggagcatgaagaccctggagttcaaaaaactcttgatatgacctgttattaccattagcattctggttttgacatcagcattagtcactttgaaatgtaacgaatggtactacaaccaattccaagttttaatttttaacaccatggcaccttttgcacataacatgctttagattatatattccgcacttaaggattaaccaggtcgtccaagcaaaaacaaatgggaaaatgtcttaaaaaatcctgggtggacttttgaaaagcttttttttttttttttttttgagacggagtcttgctctgttgcccaggctggagtgcagtagcacgatctcggctcacttgcaccctccgtctctcgggttcaagcaattgtctgcctcagcctcccgagtagctgggattacaggtgcgcactaccacgccaagctaatttttgtattttttagtagagatggggtttcaccatcttggccaggctggtcttgaattcctgacctcagtgatccacccaccttggcctcccaaagatgctagtattatgggcgtgaaccaccatgcccagccgaaaagcttttgaggggctgacttcaatccatgtaggaaagtaaaatggaaggaaattgggtgcatttctaggacttttctaacatatgtctataatatagtgtttaggttcttttttttttcaggaatacatttggaaattcaaaacaattgggcaaactttgtattaatgtgttaagtgcaggagacattggtattctgggcagcttcctaatatgctttacaatctgcactttaactgacttaagtggcattaaacatttgagagctaactatatttttataagactactatacaaactacagagtttatgatttaaggtacttaaagcttctatggttgacattgtatatataattttttaaaaaggtttttctatatggggattttctatttatgtaggtaatattgttctatttgtatatattgagataatttatttaatatactttaaataaaggtgactgggaattgtt

SEQ ID NO: 1237 - protein, 295 aa, Homo sapiens
  ref <308>: DATABASE ACCESSION NUMBER: Refseq / NP_001984
  ref <309>: DATABASE ENTRY DATE: 2000-10-31
METPAWPRVPRPETAVARTLLLGWVFAQVAGASGTTNTVAAYNLTWKSTNFKTILEWEPKPVNQVYTVQISTKSGDWKSKCFYTTDTECDLTDEIVKDVKQTYLARVFSYPAGNVESTGSAGEPLYENSPEFTPYLETNLGQPTIQSFEQVGTKVNVTVEDERTLVRRNNTFLSLRDVFGKDLIYTLYYWKSSSSGKKTAKTNTNEFLIDVDKGENYCFSVQAVIPSRTVNRKSTDSPVECMGQEKGEFREIFYIIGAVVFVVIILVIILAISLHKCRKAGVGQSWKENSPLNVS

SEQ ID NO: 1238 - DNA, 514 bp, Rattus norvegicus
  ref <308>: DATABASE ACCESSION NUMBER: EMBL / AI013993
  ref <309>: DATABASE ENTRY DATE: 2000-03-03
gtatgttgtgtggaattgtgagcggataacaatttcacacaggaaacagctatgacatgattacgaatttaatacgactcactatagggaatttggccctcgaggccaagaattcggcacgaggctgacgcccaccgtgcacatggctgagggagagccagctggttggtggtgttgctgttgccacggccccgggggttaaacctcttcctcccaggagcaggactaatgcgttgggaaggccgggtgtgtacaagcaaagggctccctcccaccagtcccatcgccttcctgcgcagccatcatcatcaaagccacaggtccggggagcacacaagctagtcaaaggcttctccttgggacagctcttaggaaaagaggcaaacccttacccaaagtaccgtgttttccttggggaagatacgtggagttgtccacagagagcctgcccagtggattgctaccgccgtgtggtgttttcatacaaacgtacgttttgagagagaagtcaaag

SEQ ID NO: 1239 - DNA, 660 bp, Rattus norvegicus
  ref <308>: DATABASE ACCESSION NUMBER: EMBL / S80345
  ref <309>: DATABASE ENTRY DATE: 2000-03-04
cgtaaacccgcacgtcgcgccgcccacgtccagctcgcgaacgagcgtccggttccaataatgccccggaaggcagctagtccagaggaggcagaaaggatgccgggctctgaagagatagaggctgggcggccgcggccggttttacgctctgtgaactcgcgcgaaccctctcaggtcatcttctgcaaccgcagcccgcgcgtcgtgctgcctttgtggctcaactttgatggtgagcctcagccctacccgaccttaccaccgggcaccggccgccgcatccacagctaccgaggtcacctttggctcttcagggatgcggggacccatgatggacttctggttaaccaaacggaactgtttgtgccatccctcaatgttgatggacagcctatttttgccaacatcacattgccagtgtataccctgaaagagcggtgccttcaggttgtacggagcctggtcaagcctgagaactacaggaggctggacatcgtcaggtcgctctatgaagacttggaagaccacccaaatgtgcggaaagacatacagcggctgacccaagagcacctcgagaatcaggccctgggagaggagcctgaaggagtccactgagattactggtcctgaatttcggcccttgatggtctgaaattg

SEQ ID NO: 1240 - DNA, 1731 bp, Rattus norvegicus
  ref <308>: DATABASE ACCESSION NUMBER: Refseq / NM_019271
  ref <309>: DATABASE ENTRY DATE: 2003-01-14
ctgatggccggagagatgacgatcttaggttccgctgtcttgactctcctgttggctggctacttggcacaacagtatttaccactgccaactccaaaagtgattggcattgacctgggcaccacctactgttccgtcggtgtattttttcctggaacagggaaagtaaaggtgatcccagatgaaaacgggcatattagcatccccagcatggtgtccttcactgatggcgatgtgtatgtgggctatgaaagcctagagctggcagactccaatcctcagaacacaatatatgatgctaaaaggttcataggtaagattttcacccctgaagagctggaggctgaaattggcagatacccatttaaggttttacacaaaaatggaatggctgagttttctgtgacaagtaacgaaaccatcattgtttctccggagtacgtcggctctcgattgttgctgaagctaaaggaaatggcagagaaataccttggaatgccggttgccaatgctgtcatttctgtgccagcagaatttgacctacaacagagaaattcaacaatccaagctgccaaccttgctggactgaagatcttgagggtaataaatgaaccgacagcagcagcgatggcctatggtctccacaaggttgatgtcttctacgtgttagtcatagacctgggtggaggaactcttgatgtgtcattactgaataaacaaggaggaatgtttctaacacgcgcaatgtctggaaacaacaaacttggaggacaagacttcaatcaaaggctgcttcagtatttgtataaagagatctatcaaacatacggctttctcccttctaggaaagaggagatccacagattaagacaagcagtggaaatggtcaagctaaacctgacgcttcatcagtctgcccaggtatcagtattactcactgtagaggaaaacgacagccagaaacctcagaatgctgactctaaacttccagaagaccagcttaccccaggggatggtcaccatgtgaacagggtgtttagacctggcctttctgacagcacgagtgcaaaaagtcaggttttgtttgagacagaagtatcacgcaagctcttcaacaccctcaatgaagatctctttcagaaaatactcgtacccattcagcaagtattaaaagaaggcctcttagacaagactgaaattgatgaggtggttctagttgggggttctacgcgcattcctcggatccgccaagttattcaggagttctttggaaaggacccgaacacgtctgtagaccctgacctggcagtggtgacgggagtggccatccaagctgggattgatggagggtgctggcctctccaagttagtgctttagaaattcccaataagcatttacagaaaaccaacttcaactgaactctgagggagtgctggtaactgattgtgtctagtggtgttaatgatttccatgtgaacctcctccagaaatgaaggccatgaagtcactcatggattcatgagaggacatttatacatgacaactttacatagtattttgttttagaattgaatatgaccagatgagtcttgattgtgtttgtaaaaaaggaaaaaaaaaaaaaaaagaagctcagtatttctaaagtaacattggggggtaaaactcctggattctggaagtaggtagccatttgtacttactagtctggaccttaatagtgtcaacta

SEQ ID NO: 1241 - protein, 471 aa, Rattus norvegicus
  ref <308>: DATABASE ACCESSION NUMBER: Refseq / NP_062144
  ref <309>: DATABASE ENTRY DATE: 2003-01-14
MAGEMTILGSAVLTLLLAGYLAQQYLPLPTPKVIGIDLGTTYCSVGVFFPGTGKVKVIPDENGHISIPSMVSFTDGDVYVGYESLELADSNPQNTIYDAKRFIGKIFTPEELEAEIGRYPFKVLHKNGMAEFSVTSNETIIVSPEYVGSRLLLKLKEMAEKYLGMPVANAVISVPAEFDLQQRNSTIQAANLAGLKILRVINEPTAAAMAYGLHKVDVFYVLVIDLGGGTLDVSLLNKQGGMFLTRAMSGNNKLGGQDFNQRLLQYLYKEIYQTYGFLPSRKEEIHRLRQAVEMVKLNLTLHQSAQVSVLLTVEENDSQKPQNADSKLPEDQLTPGDGHHVNRVFRPGLSDSTSAKSQVLFETEVSRKLFNTLNEDLFQKILVPIQQVLKEGLLDKTEIDEVVLVGGSTRIPRIRQVIQEFFGKDPNTSVDPDLAVVTGVAIQAGIDGGCWPLQVSALEIPNKHLQKTNFN

SEQ ID NO: 1242 - DNA, 430 bp, Rattus norvegicus
  ref <308>: DATABASE ACCESSION NUMBER: EMBL / AF065149
  ref <309>: DATABASE ENTRY DATE: 2001-09-11
ctagccttacgtccacagagtccttgtgagcggacggatatcaggatggcaatagtagccgatcacctgggacttagttggacagagctggcaagggaactgaatttttcagtggatgaaatcaaccaaatacgagtggaaaatcccaattctttaatttctcagagcttcatgttattaaaaaagtgggtgacgagagacgggaagaatgccacaactgatgccttaacttcggtcttaacaaaaattaaccgaatagacatagtaactctgctggaaggaccaatatttgattatgggaatatttcaggcaccagaagctttgcagatgaaaacaatgttttccatgacccagttgatggttggcagaacgagacgccaagtggaagcctagagtccccggcgcaagcgcgaagaataaccggtgggt

SEQ ID NO: 1243 - DNA, 2633 bp, Rattus norvegicus
  ref <308>: DATABASE ACCESSION NUMBER: Refseq / NM_013174
  ref <309>: DATABASE ENTRY DATE: 2003-01-14
gccaagcagcgttgggcgatatcagatatccgttctatttatttttacctaaggaaaaactccagctctcttcccactcccagctgccttgccacccctcccaaccctcggcttgccctccacctggcctgctgggagtcagagcccggcagaacctgtttagacatatggacaagaatcccagcgctacacagcacacagtccgctacttcgtcccggggttgccagcgcttcctgggagtcctgaagctcacacagcgcagtgagttcatgcaccctcttgccaagcctcagtctttgggatctggggaggacgcctggttttcctccccctttctactggggtctcctccttgccaggcctccccagtcccctggcctcgttcctgggttcacacatgaagatgcacttacaaagggctctggtggtcctggccctgctgaacttggccacagtcagcctctctctgtccacttgcaccaccttggacttcggccacatcaagaagaagagggtggaagccattaggggacagatcttgagcaagctcaggctcaccagcccccctgagccgtcggtgatgacccacgtcccctatcaggtcctggcactttacaacagcacccgggagttgctggaagagatgcacggggagagggaagaaggctgcactcaggaaacctcggagtcagagtactatgccaaagagatccataaattcgacatgatccaggggctggcggagcacaatgaactggcagtctgccccaagggaattacctctaaggttttccgtttcaatgtgtcctcagtggagaaaaatggaaccaatctgttccgggcggagttccgggtcttgcgggtgcccaaccccagctccaagcgcacagagcagagaatcgagctcttccagatacttcgacctgatgaacacatagccaagcagcgctacataggtggcaagaatctgcccacgagaggcaccgcagagtggctgtccttcgatgtcactgacactgtgcgcgagtggctgttgcggagagagtccaacttgggtctggaaatcagcatccactgtccatgtcatacctttcagcccaatggagacatactggaaaatgttcacgaggtgatggaaatcaaattcaaaggagtggacaacgaagatgaccatggccgtggagacctggggcgtctcaagaagcagaaggatcaccacaacccgcacctgatcctcatgatgattcctccacaccgactggacagcccaggccagggcgggcagaggaagaagagggccctggacaccaattactgcttccgcaacttggaggagaactgctgtgtgcgccccctctacattgacttccggcaggatctaggctggaaatgggtccacgaacctaagggttactatgccaacttctgctcaggcccttgcccttacctccgcagctcagacacaacccacagcacggtgcttggactatacaacaccctgaacccggaggcatcggcctcgccatgctgtgtgccccaagacctggagcctctgaccatcttgtactatgttggcagaacccccaaggtggagcagctgtccaacatggtggtgaagtcgtgtaagtgcagctgaggccagtctgcaacagaggaggggaaactgccaccaccgactgctgctccttggaaaaccaaagcaacagacctcaccctagagcctggagcccacaagccctggctcccgatggcgaaaggccgagagggaggcttccttctggaacatttctttctgctagctctgagaatcactgtggtaaagaaagtgtgggttggttaggggaaggcaaactggtgagaacatggatttctgtggtgcaggcagaggtggtggggtagagaagagataatgagtggacgttgtgagtggcaaggctccggctaccctagggaagatgaagggcagagtggtcaggtgaaggccagactggaaggcacttcagatatgaggtcagctttgctcatggcagtacatctgctctagggaatcgggatgttgttaaaggcaacagcatttttcttcagtttaccaagccaaagtcccctggaattgtatcttgaactgcctggaattaaggacaatctgttcttttgcaaacagtcttttcacctcgatcagcatcatgagtcattacagataatgtaattagtttctgggccagcaactagctatctcaggtccctcagagatgctggactcaaaggcagaggtcagaattggttctctcatgtattccctcgggccccctccttctgccttccttcttggccgtatttccccttggacatttggctagacaccttccgggtcagggtgcattctctggattctggatcccacacagcctggggcatcagacatcgtttccctcctaccctagaccccgtgcctccccgggtgttcctggaagcaggtgctacatgcaggagttatccggggagcctcccatgtctgacatgatgactcggccccagatgcacagactgaagtatacagacaaatacaaatattactctcagaatctttgtataaataaatatttttggggaatcaaaaaaaaaaaaaaaaaaa

SEQ ID NO: 1244 - protein, 412 aa, Rattus norvegicus
  ref <308>: DATABASE ACCESSION NUMBER: Refseq / NP_037306
  ref <309>: DATABASE ENTRY DATE: 2003-01-14
MKMHLQRALVVLALLNLATVSLSLSTCTTLDFGHIKKKRVEAIRGQILSKLRLTSPPEPSVMTHVPYQVLALYNSTRELLEEMHGEREEGCTQETSESEYYAKEIHKFDMIQGLAEHNELAVCPKGITSKVFRFNVSSVEKNGTNLFRAEFRVLRVPNPSSKRTEQRIELFQILRPDEHIAKQRYIGGKNLPTRGTAEWLSFDVTDTVREWLLRRESNLGLEISIHCPCHTFQPNGDILENVHEVMEIKFKGVDNEDDHGRGDLGRLKKQKDHHNPHLILMMIPPHRLDSPGQGGQRKKRALDTNYCFRNLEENCCVRPLYIDFRQDLGWKWVHEPKGYYANFCSGPCPYLRSSDTTHSTVLGLYNTLNPEASASPCCVPQDLEPLTILYYVGRTPKVEQLSNMVVKSCKCS

SEQ ID NO: 1245 - DNA, 2095 bp, Rattus norvegicus
  ref <308>: DATABASE ACCESSION NUMBER: Refseq / NM_019364
  ref <309>: DATABASE ENTRY DATE: 2003-01-14
agccgggcagtgaatggtgggaagcaagatggcggccagcattcgggaaaggcaaacagtggctctgaagcggatgttgaatttcaatgtgcctcatgttaaaaacagtcctggagaacccgtatggaaggtactcatctatgacagatttggccaagatatcatctctcctctgctgtctgtgaaggagctgagagacatgggcatcaccctgcatctccttttgcactcagaccgagatccaattcgagatgttcctgcggtgtactttgtgatgccaaccgaagaaaatattgacagactgtgccaggatcttcgaaatcagctctatgaatcctattatttaaattttatttctgcgatttcaagaagtaaactggaagacattgcaaatgcagcattggccgctaatgcagtcacacaggttgccaaggtttttgaccagtatctcaattttattactttggaagaggacatgtttgtattatgtaatcaaaataaggaacttgtttcatatcgggccattaataggccagatatcacagacacagagatggagactgttatggacactattgttgacagcctcttctgcttttttgttacattaggtgctgttcccatcatccgatgctcaagaggaacggcagcagaaatggtggcagtgaaactagataaaaaactgcgggagaatctaagagatgcaagaaacagcctttttactggtgatccacttgggactggccagttcagcttccaaaggcccttattagtccttgtggacagaaacattgacttggcaacgcctctgcaccatacgtggacataccaagcgctggtacacgatgtcctggatttccacttaaacagagtaaatttggaagaatctacaggagtggaaaattctccaactggtgctagaccaaagaggaaaaacaagaagtcttacgatttaactccagttgataaattttggcagaaacataaaggaagtccattcccagaagtcgcagaatcagtccaacaagaactagaatcttacagagcacaagaagatgaggtcaaacgactgaagagcattatgggcctagaaggagaggacgaaggagccatcagcatgctttctgataacactgctaagctcacatcagctgtcagttctttgccagaactccttgaaaaaaaaagacttatcgatctccatacaaatgtcgccactgctgttttagaacacataaaggcaagaaaactggatgtatattttgaatatgaagaaaaaataatgagcaagactactctggataagtcccttctcgacgtcatatctgaccctgacgcagggactccggaagacaaaatgaggctgtttcttatctactacataagcgctcagcaggcaccatctgaggttgatttggagcagtataaaaaggctttaacagatgcaggatgcaaccttagccctttacagtatatcaaacagtggaaggcttttgccaagatggcctcaactcctgccagctacggaaacactaccactaaaccaatgggtctcttgtcccgagtcatgaatacaggatcccagtttgtgatggaaggcgtcaagaacctggtattgaagcagcagaatctacctgttactcggattttagacaatctcatggagatgaagtcaaaccccgagactgatgattacagatattttgatcccaaaatgctgcggagcaatgacagctcagttcctaggaacaaaagtccattccaagaggccattgtctttgtggtaggaggaggcaactatattgagtatcagaatcttgttgactacataaagggaaagcaaggcaagcatattttgtatggctgcagtgagatttttaatgctacacagttcataaaacagctgtcacagcttggacaaaagtaacacagaagagtcataatgggtgatcagtgtggacagatgtaaaaagccagacgtgtccttctccatagcagtgccctaacagtgcaacctgcggaatcagtcatttttaaagaaattctatacttcatatactgtacaatgattaaaataataaaccatttcagaagt

SEQ ID NO: 1246 - protein, 637 aa, Rattus norvegicus
  ref <308>: DATABASE ACCESSION NUMBER: Refseq / NP_062237
  ref <309>: DATABASE ENTRY DATE: 2003-01-14
MVGSKMAASIRERQTVALKRMLNFNVPHVKNSPGEPVWKVLIYDRFGQDIISPLLSVKELRDMGITLHLLLHSDRDPIRDVPAVYFVMPTEENIDRLCQDLRNQLYESYYLNFISAISRSKLEDIANAALAANAVTQVAKVFDQYLNFITLEEDMFVLCNQNKELVSYRAINRPDITDTEMETVMDTIVDSLFCFFVTLGAVPIIRCSRGTAAEMVAVKLDKKLRENLRDARNSLFTGDPLGTGQFSFQRPLLVLVDRNIDLATPLHHTWTYQALVHDVLDFHLNRVNLEESTGVENSPTGARPKRKNKKSYDLTPVDKFWQKHKGSPFPEVAESVQQELESYRAQEDEVKRLKSIMGLEGEDEGAISMLSDNTAKLTSAVSSLPELLEKKRLIDLHTNVATAVLEHIKARKLDVYFEYEEKIMSKTTLDKSLLDVISDPDAGTPEDKMRLFLIYYISAQQAPSEVDLEQYKKALTDAGCNLSPLQYIKQWKAFAKMASTPASYGNTTTKPMGLLSRVMNTGSQFVMEGVKNLVLKQQNLPVTRILDNLMEMKSNPETDDYRYFDPKMLRSNDSSVPRNKSPFQEAIVFVVGGGNYIEYQNLVDYIKGKQGKHILYGCSEIFNATQFIKQLSQLGQK

SEQ ID NO: 1247 - DNA, 2139 bp, Homo sapiens
  ref <308>: DATABASE ACCESSION NUMBER: Refseq / NM_016163
  ref <309>: DATABASE ENTRY DATE: 2001-12-10
ccaagatggcggcggcagacacagcagcagcagccagtattcgggaaaggcagacagtggctttgaagcgtatgttgaatttcaatgtgcctcatattaaaaacagcacaggagaaccagtatggaaggtactcatttatgacagatttggccaagatataatctctcctctgctatctgtgaaggagctaagagacatgggaatcactctgcatctgcttttacactctgatcgagatcctattccagatgttcctgcagtatactttgtaatgccaactgaagaaaatattgacagaatgtgccaggatcttcgaaatcaactatatgaatcatattatttaaattttatttctgctatttcaagaagtaaactggaagatattgcaaatgcagcgttagcagctagtgcagtaacacaagtagccaaggtttttgaccaatatctcaattttattactttggaagatgatatgtttgtattatgtaatcaaaataaggagcttgtttcatatcgtgccattaacaggccagatatcacagacacggaaatggaaactgttatggacactatagttgacagcctcttctgcttttatggtactcggggtgatgttcctataatcagatgttcaagaggaacagcagcagaaatggtagcagtgaaactagacaagaaacttcgagaaaatctaagagatgcaagaaacagtctttttacaggtgatacacttggagctggccaattcagcttccagaggcccttattagtccttgttgacagaaacatagatttggcaactcctttacatcatacttggacatatcaagcattggtgcacgatgtactggatttccatttaaacagggttaatttggaagaatcttcaggagtggaaaactctccagctggtgctagaccaaagagaaaaaacaagaagtcttatgatttaactccggttgataaattttggcaaaaacataaaggaagtccattcccagaagttgcagaatcagttcagcaagaactagaatcttacagagcacaggaagatgaggtcaaacgacttaaaagcattatgggactagaaggggaagatgaaggagccataagtatgctttctgacaataccgctaagctaacatcagctgttagttctttgccagaactccttgagaaaaaaagacttattgatctccatacaaatgttgccactgctgttttagaacatataaaggcaagaaaattggatgtatattttgaatatgaagaaaaaataatgagcaaaactactctggataaatctcttctagatataatatcagaccctgatgcaggaactccagaagataacatgaggttgtttcttatctattatataagcacacagcaagcaccttctgaggctgatttggagcaatataaaaaagctttaactgatgcaggaaaccttaatcctttacaatatatcaaacagtggaaggcttttaccaagatggcctcagctccggccagctatggcagcactaccactaaaccaatgggtcttttatcacgagtcatgaatacaggatcacagtttgtgatggaaggagtgaagaacctggttttgaaacagcaaaatctacctgttactcgtattttggacaatcttatggagatgaagtcaaaccccgaaactgatgactatagatattttgatcccaaaatgctgcggggcaatgacagctcagttcccagaaataaaaatccattccaagaggccattgtttttgtggtgggaggaggcaactacattgaatatcagaatcttgttgactacataaaggggaaacaaggcaaacacattttatatggctgcagtgagctttttaatgctacacagttcataaaacagttgtcacaacttggacaaaagtaacacagaagaaccttactatgataatctacttggaatgtggataaatgtaaaaagaagaaaagttagaagagcaatatgtttccttctctgtaacagtgtcctaacagtgaaaatcagagttatttgttaatttttaaggaaattatatacttaatatgtattgattaaaagaaacatttcagaaataaaatttcaacattgaaaaaaaaaaaaaaaa

SEQ ID NO: 1248 - protein, 638 aa, Homo sapiens
  ref <308>: DATABASE ACCESSION NUMBER: Refseq / NP_057247
  ref <309>: DATABASE ENTRY DATE: 2001-12-10
MAAADTAAAASIRERQTVALKRMLNFNVPHIKNSTGEPVWKVLIYDRFGQDIISPLLSVKELRDMGITLHLLLHSDRDPIPDVPAVYFVMPTEENIDRMCQDLRNQLYESYYLNFISAISRSKLEDIANAALAASAVTQVAKVFDQYLNFITLEDDMFVLCNQNKELVSYRAINRPDITDTEMETVMDTIVDSLFCFYGTRGDVPIIRCSRGTAAEMVAVKLDKKLRENLRDARNSLFTGDTLGAGQFSFQRPLLVLVDRNIDLATPLHHTWTYQALVHDVLDFHLNRVNLEESSGVENSPAGARPKRKNKKSYDLTPVDKFWQKHKGSPFPEVAESVQQELESYRAQEDEVKRLKSIMGLEGEDEGAISMLSDNTAKLTSAVSSLPELLEKKRLIDLHTNVATAVLEHIKARKLDVYFEYEEKIMSKTTLDKSLLDIISDPDAGTPEDNMRLFLIYYISTQQAPSEADLEQYKKALTDAGNLNPLQYIKQWKAFTKMASAPASYGSTTTKPMGLLSRVMNTGSQFVMEGVKNLVLKQQNLPVTRILDNLMEMKSNPETDDYRYFDPKMLRGNDSSVPRNKNPFQEAIVFVVGGGNYIEYQNLVDYIKGKQGKHILYGCSELFNATQFIKQLSQLGQK

SEQ ID NO: 1249 - DNA, 2682 bp, Rattus norvegicus
  ref <308>: DATABASE ACCESSION NUMBER: Refseq / NM_019248
  ref <309>: DATABASE ENTRY DATE: 2003-01-14
acccccctctcctctcctcctcctcctcttttttagaagcagcgatcggagatggatgtctctctttgcccagccaagtgtagtttctggcggattttcttgctgggaagcgtctggctggactatgtgggctccgtgctggcttgccctgcaaattgtgtctgcagcaagactgagatcaattgccggcggccggacgatgggaacctctttcccctcctggaagggcaggattcagggaacagcaatgggaacgccagcatcaacatcacggacatctcaaggaatatcacttccatacacatagagaactggcggggcctgcacacactcaatgctgtggatatggagctctacacgggactccagaagctgaccatcaagaattctggactccggaatattcagcccagagcctttgctaagaatccccacttgcgttatataaacttgtcaagtaaccggctcaccacactctcctggcagctcttccagacgctgagtcttcgggaattgagactggagcagaacttcttcaactgcagctgtgacatccgctggatgcagctgtggcaggaacagggggaggcacggctggacagccagagcctctactgcatcagtgctgatggctcccaactccccctcttccgcatgaacatcagtcagtgtgatctccctgagatcagtgtgagtcacgtgaacctgactgtccgagaaggagacaatgctgtaatcacttgtaatggctctggctctcctttgcctgatgtggactggatagtcaccggactgcagtccatcaatactcatcagaccaatctgaactggaccaatgtacatgccatcaacttgaccctggtgaatgtgacgagcgaagacaatggtttcaccctgacgtgcattgcagagaacgtggtgggcatgagcaatgccagcgttgctctcactgtctactaccctccacgtgtggtgagcttggtggagcctgaggtacgcctggaacattgcattgagtttgtggtgcgtggcaacccgacacccacgctgcattggctgtacaatggacagccactgagggaatccaagatcattcatatggactactaccaggagggtgaagtctcagagggctgcctgctcttcaacaagcccacccactacaacaatggcaactacaccctcattgctaagaatgccctgggcacagccaaccagaccatcaacggccacttccttaaggagccctttccagagagcacagatttctttgactttgagtctgatgcgagccctacacctcctatcactgtgacccacaaaccagaggaagacacttttggggtgtccatagcagttggacttgctgcttttgcctgcgtccttctggtggtcctctttatcatgatcaacaagtacggtcgacggtccaaatttggaatgaagggtcctgtggctgttatcagtggggaggaggactcagccagcccactgcaccatatcaaccatggcatcactacaccttcatcgctggatgctgggccggatacagtggtcattggcatgactcgaattccagtcattgagaacccccaatatttccgtcagggacacaattgccacaagccagacacatatgttcaacacatcaagaggagagacatcgtgttgaagagagaactgggtgagggagcctttggaaaggtcttcctggctgagtgctacaatctaagccccaccaaagacaagatgcttgtggcagtgaaggccctgaaggatcccaccttggctgccaggaaggatttccagagggaggccgagctgctcactaacctgcagcatgagcatattgtcaaattctatggggtctgtggtgatggggatccactcatcatggtctttgaatacatgaagcatggagacctgaacaagttcctcagggcccatgggccagatgcgatgatccttgtggatggacagccacgccaggccaagggggagctaggactctcccagatgctccacatcgccagtcagatagcctccggcatggtgtacttggcctcccagcactttgtgcaccgggacctggccaccaggaactgcctagttggagccaaccttctagtgaagattggagattttggcatgtccagggacgtctacagtactgattactacagggtgggaggacacaccatgctccccatccgctggatgccacctgaaagcatcatgtaccggaagtttaccacagagagtgatgtgtggagctttggggttattctttgggagatctttacctatgggaagcaaccatggttccagctctctaacacagaggtcattgaatgcatcacccaaggccgtgtcttggagagaccccgagtctgcccaaaagaagtatatgatgtcatgctggggtgctggcagagggaaccacaacagcgactgaatattaaggagatctacaaaatcctccatgctttggggaaggccaccccaatctacctggacattcttggctagtggtgactggtggccaagcgtttatactctgttgcctcctctctccctgcctcatctcctctttttcctcacctcaactcctttcgtccatctttgaccgaaacgaacatcttcatataaactcaagtgcctgctacacatacaacactgaat

SEQ ID NO: 1250 - protein, 825 aa, Rattus norvegicus
  ref <308>: DATABASE ACCESSION NUMBER: Refseq / NP_062121
  ref <309>: DATABASE ENTRY DATE: 2003-01-14
MDVSLCPAKCSFWRIFLLGSVWLDYVGSVLACPANCVCSKTEINCRRPDDGNLFPLLEGQDSGNSNGNASINITDISRNITSIHIENWRGLHTLNAVDMELYTGLQKLTIKNSGLRNIQPRAFAKNPHLRYINLSSNRLTTLSWQLFQTLSLRELRLEQNFFNCSCDIRWMQLWQEQGEARLDSQSLYCISADGSQLPLFRMNISQCDLPEISVSHVNLTVREGDNAVITCNGSGSPLPDVDWIVTGLQSINTHQTNLNWTNVHAINLTLVNVTSEDNGFTLTCIAENVVGMSNASVALTVYYPPRVVSLVEPEVRLEHCIEFVVRGNPTPTLHWLYNGQPLRESKIIHMDYYQEGEVSEGCLLFNKPTHYNNGNYTLIAKNALGTANQTINGHFLKEPFPESTDFFDFESDASPTPPITVTHKPEEDTFGVSIAVGLAAFACVLLVVLFIMINKYGRRSKFGMKGPVAVISGEEDSASPLHHINHGITTPSSLDAGPDTVVIGMTRIPVIENPQYFRQGHNCHKPDTYVQHIKRRDIVLKRELGEGAFGKVFLAECYNLSPTKDKMLVAVKALKDPTLAARKDFQREAELLTNLQHEHIVKFYGVCGDGDPLIMVFEYMKHGDLNKFLRAHGPDAMILVDGQPRQAKGELGLSQMLHIASQIASGMVYLASQHFVHRDLATRNCLVGANLLVKIGDFGMSRDVYSTDYYRVGGHTMLPIRWMPPESIMYRKFTTESDVWSFGVILWEIFTYGKQPWFQLSNTEVIECITQGRVLERPRVCPKEVYDVMLGCWQREPQQRLNIKEIYKILHALGKATPIYLDILG

SEQ ID NO: 1251 - DNA, 1763 bp, Rattus norvegicus
  ref <308>: DATABASE ACCESSION NUMBER: EMBL / U36992
  ref <309>: DATABASE ENTRY DATE: 2000-05-02
gccttggagtaccagtatgtaatgaaaaacccaaaacaattaagctttgagaagttcagccgaagattatcagcgaaagccttctctgtcaagaagctgctaactaatgacgaccttagcaatgacattcacagaggctatcttcttttacaaggcaaatctctggatggtcttctggaaaccatgatccaagaagtaaaagaaatatttgagtccagactgctaaaactcacagattggaatacagcaagagtatttgatttctgtagttcactggtatttgaaatcacatttacaactatatatggaaaaattcttgctgctaacaaaaaacaaattatcagtgagctgagggatgattttttaaaatttgatgaccatttcccatacttagtatctgacatacctattcagcttctaagaaatgcagaatttatgcagaagaaaattataaaatgtctcacaccagaaaaagtagctcagatgcaaagacggtcagaaattgttcaggagaggcaggagatgctgaaaaaatactacgggcatgaagagtttgaaataggagcacatcatcttggcttgctctgggcctctctagcaaacaccattccagctatgttctgggcaatgtattatcttcttcagcatccagaagctatggaagtcctgcgtgacgaaattgacagcttcctgcagtcaacaggtcaaaagaaaggacctggaatttctgtccacttcaccagagaacaattggacagcttggtctgcctggaaagcgctattcttgaggttctgaggttgtgctcctactccagcatcatccgtgaagtgcaagaggatatggatttcagctcagagagtaggagctaccgtctgcggaaaggagactttgtagctgtctttcctccaatgatacacaatgacccagaagtcttcgatgctccaaaggactttaggtttgatcgcttcgtagaagatggtaagaagaaaacaacgtttttcaaaggaggaaaaaagctgaagagttacattataccatttggacttggaacaagcaaatgtccaggcagatactttgcaattaatgaaatgaagctactagtgattatacttttaacttattttgatttagaagtcattgacactaagcctataggactaaaccacagtcgcatgtttctgggcattcagcatccagactctgacatctcatttaggtacaaggcaaaatcttggagatcctgaaagggtggcagagaagcttagcggaataaggctgcacatgctgagctctgtgatttgctgtactccccaaatgcagccactattcttgtttgttagaaaatggcaaatttttatttgattgcgatccatccagtttgttttgggtcacaaaacctgtcataaaataaagcgctgtcatggtgtaaaaaaatgtcatggcaatcatttcaggataaggtaaaataacgttttcaagtttgtacttactatgatttttatcatttgtagtgaatgtgcttttccagtaataaatttgcgccagggtgattttttttaattactgaaatcctctaatatcggttttatgtgctgccagaaaagtgtgccatcaatggacagtataacaatttccagttttccagagaagggagaaattaagccccatgagttacgctgtataaaattgttctcttcaactataatatcaataatgtctatatcaccaggttacctttgcattaaatcgagttttgcaaaag

SEQ ID NO: 1252 - DNA, 2230 bp, Homo sapiens
  ref <308>: DATABASE ACCESSION NUMBER: Refseq / NM_004820
  ref <309>: DATABASE ENTRY DATE: 2003-01-29
ggcggggagggggcagtccacgaacttttgtcattcagcctgggagaccacggtgacattcctgtctgcgctgcgggcaggccagcctctccggccctggactagggggcgccgccgagagaagccgccgcaggctgcagagtcgccgaccgcgctgttcgcaggcagaccccgggctgcccaccgcggcctagcgcgcgccggatggcaggagaagtgtccgcggccacgggccgcttttcgctggagcggttgggcctcccgggcctggccctcgccgcggccctgctgctcctggccctctgcttgcttgtccggcgcaccaggagacccggtgagcctccattgataaaaggttggcttccttatcttggagtggtcctgaacttacgaaaagaccccttaaggttcatgaaaacacttcaaaagcaacatggtgacactttcacagttcttcttggtggaaagtacataacatttatcctggaccccttccagtaccagctagtgataaaaaatcataaacaattaagctttcgagtattttctaataaattattagagaaagcatttagcatcagtcagttgcaaaaaaatcatgacatgaatgatgagcttcacctctgctatcaatttttgcaaggcaaatctttggacatactcttggaaagcatgatgcagaatctaaaacaagtttttgaaccccagctgttaaaaaccacaagttgggacacggcagaactgtatccattctgcagctcaataatatttgagatcacatttacaactatatatggaaaagttattgtttgtgacaacaacaaatttattagtgagctaagagatgattttttaaaatttgatgacaagtttgcatatttagtatccaacatacccattgagcttctaggaaatgtcaagtctattagagagaaaattataaaatgcttctcatcagaaaagttagccaagatgcaaggatggtcagaagtttttcaaagcaggcaagatgtcctggagaaatattatgtgcacgaggaccttgaaataggagcacatcatttaggctttctctgggcctctgtggcaaacactattccaactatgttctgggcaatgtattatcttctgcggcacccagaagctatggcagcagtgcgtgacgaaattgaccgtttgctgcagtcaacaggtcaaaagaaagggtctggatttcccatccacctcaccagagaacaattggacagcctaatctgcctagaaagcagcatttttgaagctttacgactgtcctcatattcaaccaccattcgttttgttgaggaggatttgactctcagttcagagaccggggactactgtgtgcgaaagggagacttggtagccatctttcctccagtcctacatggtgaccctgaaatctttgaagctccagaggagtttagatatgatcgttttatagaagatggtaagaagaaaaccacctttttcaaaagagggaaaaagctgaagtgttacctaatgccgtttggaactggaaccagcaaatgtccaggccgattttttgcacttatggaaataaaacaattgttggttatacttttaacttattttgatttagaaataattgatgataagcccataggactaaactacagccgcttgttgtttggtattcagtatccagattctgatgttttatttagatacaaagtgaaatcttagagaagctaaaaggaaagaaaataaatctatcaaaattaccctaaacatcctaagctcatctatttctttttaatttctgcaaagtaattgatttatttgtttaaaaagcgctaatttctatttgatctgatatcagtccagtttgtccttagtcacaaagcccatataatataaaacaggatggtggcaggaaaatggacatcaaaatcaacttaagggtaggctcaaaacagggttgttgttgtttttttagtttctccttgttgtgattttcacctgttataataaatgtaccttcacaccaatagattgggcactgtggaatttaaatcactcaaattgttctctaatatgtaaaattacactttgaactactagaaaattgtgctggaaatggacacagtctaacaaattccaaattctcacagaagaaggaaattgaatttccatgagttacactggatgaaaatgtttcccttaagcatatattaataatacctatatc

SEQ ID NO: 1253 - protein, 506 aa, Homo sapiens
  ref <308>: DATABASE ACCESSION NUMBER: Refseq / NP_004811
  ref <309>: DATABASE ENTRY DATE: 2003-01-29
MAGEVSAATGRFSLERLGLPGLALAAALLLLALCLLVRRTRRPGEPPLIKGWLPYLGVVLNLRKDPLRFMKTLQKQHGDTFTVLLGGKYITFILDPFQYQLVIKNHKQLSFRVFSNKLLEKAFSISQLQKNHDMNDELHLCYQFLQGKSLDILLESMMQNLKQVFEPQLLKTTSWDTAELYPFCSSIIFEITFTTIYGKVIVCDNNKFISELRDDFLKFDDKFAYLVSNIPIELLGNVKSIREKIIKCFSSEKLAKMQGWSEVFQSRQDVLEKYYVHEDLEIGAHHLGFLWASVANTIPTMFWAMYYLLRHPEAMAAVRDEIDRLLQSTGQKKGSGFPIHLTREQLDSLICLESSIFEALRLSSYSTTIRFVEEDLTLSSETGDYCVRKGDLVAIFPPVLHGDPEIFEAPEEFRYDRFIEDGKKKTTFFKRGKKLKCYLMPFGTGTSKCPGRFFALMEIKQLLVILLTYFDLEIIDDKPIGLNYSRLLFGIQYPDSDVLFRYKVKS

SEQ ID NO: 1254 - DNA, 537 bp, Rattus norvegicus
  ref <308>: DATABASE ACCESSION NUMBER: EMBL / AI639138
  ref <309>: DATABASE ENTRY DATE: 2000-03-04
ttaagggggggggggtgggccttttggtgggaggaagctgtttttgccttcccgcttttcaaaaagtggttttttggggcaagaaactgggggggccctggtggggtgggggggttttttttttttccccaaggggggggggggggcctttttatcccccaagaagggggggggggcacggggtcctcgggggaggtggggccccccccttgtttttgggttgggaaggttcagggcccctttggtttttttcaaccgtgggggggagggggtgttttttaattccggggggggtttggggggcattccaggggggggggccctggggggcgcggttttttgggaaaaccttgggttggggggttttctccccggcggggcacaagagggctttccccgggccggggccaataggccccttgagggcgtgagagttccctgtccttggggggagggggggaactgtctccgtttgggggtggggggggctgccctgttttgaaataaaaaatgggcccccctatttgaaagacagaa

SEQ ID NO: 1255 - DNA, 1624 bp, Rattus norvegicus
  ref <308>: DATABASE ACCESSION NUMBER: Refseq / NM_017194
  ref <309>: DATABASE ENTRY DATE: 2003-01-14
gcttgtcaaagctcagaataacctgagaaccagacatcaggatgacaatggctctgcttgggaccctgcttctcctggcactctttggcagaagccaaggcaagaatgaagagctgagcctgtatcaccatctcttcgacaattatgacccagaatgccggccagttaggagacctgaggacactgtcaccatcaccctcaaggtcaccctaaccaacctcatctcactgaatgagaaagaagagactctgaccaccagtgtctggattggaattgaatggcaagactatcggctcaacttcagcaaggacgattttgcaggcgtagaaatcctgcgggtcccttccgaacatgtatggctgccagagattgttctggaaaacaatattgatgggcagtttggagtggcctacgactgcaatgttctggtctatgagggaggctctgtgagctggctgcccccagctatctaccgcagcacgtgcgcagtggaggtcacctatttcccctttgactggcagaactgctctctcatttttcgttcccagacctacaatgctgaagaggtggagttaatctttgcagtggatgacgatggcaatgccatcaacaaaattgacatcgacaccgcagcttttaccgagaatggagaatgggccattgactactgcccaggcatgattcgccattatgagggaggctccacagaagaccctggagaaactgacgtcatctacacgctcatcatccgtcgaaagccgcttttttacgtcattaacatcattgtgccttgtgtgctcatttctggcttggtgctactcgcttacttcctacctgcgcaggctggtggccagaaatgcacggtctctatcaacgtcctgctagcccagactgtcttcttgttcctaattgcccagaaaattccagagacttctctgagcgtgccgctgctgggcaggtatcttatttttgtcatggtggttgccacgctcattgtcatgaattgcgtcatcgtgctcaacgtatctttgcgaacgccaacgactcacgccacatcccctcggctgcgccagattttattagagctactgccgcgcctcctcggcttgagcccacccccagaggatcccggagctgcctcaccagcgaggcgtgcctcatctgtgggcattctgcttagagcggaggagctcatcttgaaaaagccgcggagcgaactcgtgtttgagggacagaggcatcggcatggaacttggaccgcagccgccctctgccagaacctgggtgctgcagcccctgaagtccgctgctgtgtggatgctgtgaactttgtggctgagagcacaagggaccaggaagccactggagaggaactgtctgactgggtgcgtatggggaaggccctcgacaatgtctgtttttgggcagcgttggtgctcttcagcgtcggttctacgctcatcttccttggaggttacttcaaccaagttcctgatctcccctacccaccgtgcatccaaccatgagcctgcaccaggacccacctcatccccaccccccaagaaagagattttgaaaacaggctgctgacaataaatctggtttgtgaacttgcaaaaaaaaa

SEQ ID NO: 1256 - protein, 494 aa, Rattus norvegicus
  ref <308>: DATABASE ACCESSION NUMBER: Refseq / NP_058890
  ref <309>: DATABASE ENTRY DATE: 2003-01-14
MTMALLGTLLLLALFGRSQGKNEELSLYHHLFDNYDPECRPVRRPEDTVTITLKVTLTNLISLNEKEETLTTSVWIGIEWQDYRLNFSKDDFAGVEILRVPSEHVWLPEIVLENNIDGQFGVAYDCNVLVYEGGSVSWLPPAIYRSTCAVEVTYFPFDWQNCSLIFRSQTYNAEEVELIFAVDDDGNAINKIDIDTAAFTENGEWAIDYCPGMIRHYEGGSTEDPGETDVIYTLIIRRKPLFYVINIIVPCVLISGLVLLAYFLPAQAGGQKCTVSINVLLAQTVFLFLIAQKIPETSLSVPLLGRYLIFVMVVATLIVMNCVIVLNVSLRTPTTHATSPRLRQILLELLPRLLGLSPPPEDPGAASPARRASSVGILLRAEELILKKPRSELVFEGQRHRHGTWTAAALCQNLGAAAPEVRCCVDAVNFVAESTRDQEATGEELSDWVRMGKALDNVCFWAALVLFSVGSTLIFLGGYFNQVPDLPYPPCIQP

SEQ ID NO: 1257 - DNA, 2248 bp, Rattus norvegicus
  ref <308>: DATABASE ACCESSION NUMBER: Refseq / NM_031730
  ref <309>: DATABASE ENTRY DATE: 2003-01-13
ttttaggtcactgtattttttttctctcttagtattccaaatacttgtctgtgagagaaatctggctttttgggtactgtgacttcacctgcgccaccttggaataaccgtgttcctgtgagccgtgttccccagtgttttgtctgaggtgaagaagtggggcattttgttactttcattgtgttactttgggtgacccctgatcactcttgtgacctctacttcagacaacatggcagccggtgttgcagcatggctaccctttgccagggcagccgccattgggtggatgcctgttgcctccgggcctatgccagctcccccaaggcaggagagaaaaaggactcaggacgctctaattgtgctgaacgtgagtggcacccgtttccagacatggcaagacaccctggaacgatacccagacactctgctgggcagttccgagagagactttttctaccacccagagacccaacaatatttctttgaccgtgacccagacatcttccgccacatcctcaacttctaccgcacggggaagcttcactatccccgccatgagtgcatctcggcttatgatgaagaattggccttctttggcctcatcccagaaattattggcgactgctgttatgaggagtacaaggaccgcaggcgggagaatgcagagcgcctccaggatgatgcagacactgacaatacaggagagagtgctctgcccaccatgactgctaggcagagggtctggagggcctttgagaacccccacaccagcaccatggccctggtgttctactatgtgaccgggttcttcattgccgtctcagtcatcgcgaatgtggtggaaacagttccatgtgggtctagcccaggccacataaaagaactgccttgtggggaaaggtatgcagtggccttcttctgcttggataccgcctgtgtcatgatctttacggttgagtacttgctacgcctggccgcagcgcctagtcgttaccgttttgtgcgcagtgtcatgagtatcatcgatgtggtggccatcctaccctattacattgggctggtgatgacagacaatgaggatgtcagtggcgcctttgtcacactccgagtctttcgagtcttcaggatctttaagttttcccgccactctcaaggcctgcgtatactggggtacacactgaagagctgtgcgtcagaactgggcttcttgctcttttccctcacaatggctatcatcattttcgctacggttatgttctacgcagagaagggctcttcagcaagcaagttcaccagcatccctgcagccttctggtacaccatcgtcaccatgacaacactggggtatggcgacatggtaccaaaaaccatagcagggaagattttcgggtctatctgctcactgagcggagtcttggtcatcgcgctacccgtgcctgtgatcgtgtctaacttcagtcggatctaccaccaaaaccaacgagcggacaaacgaagggcacagaagaaagcgaggctggccaggatccgggcagccaaaagtggaagtgcaaatgcctacatgcagagcaagcggaatgggttactgagcaaccaactgcagtcctcggaggatgaaccggccttcgttagcaaatctggatccagcttcgagacaacaccaccacctgcttcactgcctggagaaaaccacgaaccatgagtttgtggatgaacaagtctttgaagaaagctgcatggaagtggccactgttaatcgcccttcaagtcacagcccctccctctcttcccaacaaggagtcaccagcacttgctgctcacggagacacaaaaaaactttccgaatcccaaatgccaatgtgtcaggaagtcatagaggcagcgtgcaagaactcagtacaattcagatcagatgtgtggagagaactccactatccaacagccgatccagcttaaatgccaaaatggaagagtgtgtcaaactaaactgtgaacaaccttacgtgaccacagcaataattagcattccaacacctccagtaaccaccccagaaggcgacgacaggcccgagtctcctgagtattcgggaggaaacatcgtcagggtgtctgctttgtaagacaattggcacaggtctgagagcatgggagccctgactatggaaagaatctaaaggagaagaaagaagaaataacaacccctttttgcatattaagacagccaagcaagaaggttggcggccgc

SEQ ID NO: 1258 - protein, 490 aa, Rattus norvegicus
  ref <308>: DATABASE ACCESSION NUMBER: Refseq / NP_113918
  ref <309>: DATABASE ENTRY DATE: 2003-01-13
MAAGVAAWLPFARAAAIGWMPVASGPMPAPPRQERKRTQDALIVLNVSGTRFQTWQDTLERYPDTLLGSSERDFFYHPETQQYFFDRDPDIFRHILNFYRTGKLHYPRHECISAYDEELAFFGLIPEIIGDCCYEEYKDRRRENAERLQDDADTDNTGESALPTMTARQRVWRAFENPHTSTMALVFYYVTGFFIAVSVIANVVETVPCGSSPGHIKELPCGERYAVAFFCLDTACVMIFTVEYLLRLAAAPSRYRFVRSVMSIIDVVAILPYYIGLVMTDNEDVSGAFVTLRVFRVFRIFKFSRHSQGLRILGYTLKSCASELGFLLFSLTMAIIIFATVMFYAEKGSSASKFTSIPAAFWYTIVTMTTLGYGDMVPKTIAGKIFGSICSLSGVLVIALPVPVIVSNFSRIYHQNQRADKRRAQKKARLARIRAAKSGSANAYMQSKRNGLLSNQLQSSEDEPAFVSKSGSSFETTPPPASLPGENHEP

SEQ ID NO: 1259 - DNA, 1662 bp, Rattus norvegicus
  ref <308>: DATABASE ACCESSION NUMBER: EMBL / S98336
  ref <309>: DATABASE ENTRY DATE: 2000-03-04
atgcaggggccacacctctctctgctgctgctgctgctagcgactatgggggctgtgttacaggctgacacagttgaagaactgaccaataccaggggcctcatcttccttgaagatggggtctggcctcccagcagtccccctgagcctttgtgcctggtggcggtgagaggggaaggggacacaagcaaggcttccctgacggtggtggggggcctgcacagctatgagcatgccttcctggaggctgtccaagagtctcgctggggacctcaagacctagccaccttcggagtctgcagtactgactcccagactaccctgcctgcccttcagcgcctcggggcctggctcggagagactggggaacagcagttgctagtcctacatctggctgaagtgatatgggagcctcagctcttgctgaagttccaagagcctccacctgggggagccagccgctgggagcaagccctgttagtgctataccctggacctgggccccaggtcacagtcacaggagctggactgcagggcacacagagcctctgccctactcgggacacccgctatttggtgctgactgtgcactttccagcgggggcctggagcggctcggggctcgccctaacccttcaaccaagcaaagaaggtgccaccctgaccatcgctcagctgcaggcctttctgtttggctctgattcccgctgtttcacgcggatgactcccaccctagtgctgctgccacccaccgggccgacaccgcagccagcacatggccagctggacaccgtgcctttcccgcagcctgggctgtccctggagcctgaggacctgccacacagtgctgaccccttcctagagaccctcactcgcttggttcgtgctctgcggggacctctgacccgggcctcgaacactcgtctggccctggaccctggtgcgctggccagcttcccacagggcctggtcaacctttcagaccccgtggcgctgggacgtctgctcgatggggaggaacccctattactgctgctgtcacccgctgcggccactgtgggggaacctatgcggctgcacagccccacatctgctccctgggcagcaggcctggcacgcagggtagcggtagagctgcaggcagcggcctcggagctgcgggacctcccaggcctgccacccacagcccccccattgctgtcgcgcctactggcgctgtgccccaacgactcccgcagcgccggggacccgctgcgagcgctgctgctgctgaaggcactgcagggcctgcgtgcagagtggcgagggcgggaagggcgcgggagggcggggcgcagcaaggggacagggacagatgggctgtgcgcgctgcgcgagctgagcgtggaccttcgagcagagcgctcagtgctcatcccggagacctaccaagccaacaactgccaaggcgcctgtgcatggccacagtcggaccgtaacccacggtacgggaaccacgtggtgctgctgctaaaaatgcaggcacgcggggccgccctgggtcgcctgccctgctgtgtgcccactgcctacaccggcaagctgctcatcagcctgtcggaggagcacatcagcgcgcaccacgtgcccaacatggtggctaccgaatgcggctgccggtga

SEQ ID NO: 1260 - DNA, 568 bp, Rattus norvegicus
  ref <308>: DATABASE ACCESSION NUMBER: EMBL / AA891732
  ref <309>: DATABASE ENTRY DATE: 2000-03-03
gcagctgtcatctgcacacggacacacttgaggaccccctcccccacgccagccgtccaagaagcaggtttgtgtctccttttccagttaagccaggagagggagtcctttgccaactgatggccaacgtttccagcacagaagctgcttctgtccacagcctctggcctttgttctttttttttaactcgaatatacacgggaggtagaagatgggaaccaaaggcctttaaatctgggagagatgagaaaaactgccgctccccgtgctgcaagtgtgcctttctgttcagtcggtaaactcatctttgtgctgtgaggaagtttctctctacccttgacagtacatcacattctcctcaagatcataataacatcattaatgtgaatttaaacaacgcggcttgttagaaaacatgctaattgttatgttctcattatgtttgcatagcttttatttgttttcctatgaacggttagagagctaatttttctgaaaggtgattgtgagtcatattttatatggcattttgcttgatcgtttgctccgcactgaatttgtactccg

SEQ ID NO: 1261 - DNA, 260 bp, Homo sapiens
  ref <308>: DATABASE ACCESSION NUMBER: EMBL / BG111216
  ref <309>: DATABASE ENTRY DATE: 2001-02-02
cttgttagaaaatatgctaattgctatggtctcattatgtttgcttagcttttatttgtttttctgtgaacagttagagagctaatttttttcaaaggtgattgtaagtcatattttatatagcattttgcttgattatttgctctgtactgaatttgtactctattgccattagatcttacaataatgttccactctgcaaatttttaaggttcaaataaagtttaattgtttgcaaactgtaaaaaaaaaaaaaaaaa

SEQ ID NO: 1262 - DNA, 1373 bp, Rattus norvegicus
  ref <308>: DATABASE ACCESSION NUMBER: Refseq / NM_080783
  ref <309>: DATABASE ENTRY DATE: 2003-01-13
ctctgcaggcgccatggaggagaaggtgctcgtcacgggcggggctggctacatcggtagccacacagtgttggagctgctggaggcgggctactcgcctgtggtcatcgacaacttccacaattccattcgtggagaagactccatgcctgagagcctgcgccgggtccaggagctgacaggccgctctgtggagtttgaggagatggacatcttggaccaggcagccctacagcacctctttaagaagcacaattttaaggctgtcatccactttgctgggctcaaggctgtgggcgagtcagtgcagaagcctctggattactacagagttaacctaacagggaccatccagctcctggagatcatgagggccatgggggtgaagagtctggtcttcagcagctcagccaccgtgtatgggaaacccgtacctgcctctggacgaggcccaccccaccggggctgtaccaaaccctacggcaagtccaagttcttcattgaagagatgatccaggacctgtgccgggcagacacggcctggaacgctgtgctgcttcggtacttcatccccataggcgcccatcgctctgcgcgcatcggcgaagatcctcagggtatccccaacaacctcatgccctatgtctcccaggtggcaatcgggcgacgagaggccctgaatgtctttggtgatgactacgctacggaggatgggacaggtgtgagggattacattcatgtggtggatctggccaagggccatatagcagccttgaagaagctgaaggagcagtgtggttgccggatctacaacctgggcacgggcacaggctattcggtcctgcagatggtccaagccatggagaaggcctcagggaagaagatcccgtacaaggtggtggcacggcgggaaggcgatgtggcggcctgttatgccaaccccagcctggcccatgaggagctgggctggacagcagccttggggctggacaggatgtgtgaagatctgtggcgctggcagaagcagaacccttcaggccttggggcgcatggctgaggctctccttaccacggaccagaaaagagcagctacctgctttgcagccgccacaggaccctacaccctcatgcgctgaggccaccctacctcaaaggccagctgtctctcagccctcccggcaggagacctctggttctactgaccagaaaggagtctgggtccttccagcctattttccccagagtccagcagctcatgtgatccccagagccttgtggaggccagggggtctgggaccaaagcctccctcaggcactaacttatacagctaagattgagctttccaaagtatttaaaataaaaatgtcttctt

SEQ ID NO: 1263 - protein, 347 aa, Rattus norvegicus
  ref <308>: DATABASE ACCESSION NUMBER: Refseq / NP_542961
  ref <309>: DATABASE ENTRY DATE: 2003-01-13
MEEKVLVTGGAGYIGSHTVLELLEAGYSPVVIDNFHNSIRGEDSMPESLRRVQELTGRSVEFEEMDILDQAALQHLFKKHNFKAVIHFAGLKAVGESVQKPLDYYRVNLTGTIQLLEIMRAMGVKSLVFSSSATVYGKPVPASGRGPPHRGCTKPYGKSKFFIEEMIQDLCRADTAWNAVLLRYFIPIGAHRSARIGEDPQGIPNNLMPYVSQVAIGRREALNVFGDDYATEDGTGVRDYIHVVDLAKGHIAALKKLKEQCGCRIYNLGTGTGYSVLQMVQAMEKASGKKIPYKVVARREGDVAACYANPSLAHEELGWTAALGLDRMCEDLWRWQKQNPSGLGAHG

SEQ ID NO: 1264 - DNA, 5543 bp, Rattus norvegicus
  ref <308>: DATABASE ACCESSION NUMBER: Refseq / NM_133545
  ref <309>: DATABASE ENTRY DATE: 2003-01-13
cgggcgagcgctagcggccgcggcggccgcgcggaacccagggaggcgggacgcagagccggagcgcggccccgaccaggcgggagcccgagcagcgctggcgtggatgctccccatcgcttggtcgttggagactcggttgctttttaatggcagcagcggctgttggatgactagagtttgttttgactggagggtcgcttttgcttggcactataactgctggattggtccttcctggcccttccactgttgaagggagaagatgccactgccatttgggttgaaattgaaacgcacccggcgctacactgtgtccagcaagagctgcctggttgcacggatccagctgctcaataatgagtttgtggagttcactctgtccgtggagagcactggccaggagagcctagaagctgtggcccaacgcctggagctgagagagatcacgtacttcagcctctggtactacaacaagcagaatcagcgtcgctgggtggatttggagaaacccctgaagaagcagctggacaagcacgcgctggagcccaccgtctactttggagtggtgttttatgtgccctctgtttcccagctgcagcaggagatcaccaggtaccagtattacctgcagctgaagaaggatgttctggaaggaaaccttccctgcacattggagcaagccattcagctggctggcttagctgttcaagctgattttggcgactttgatcagtatgaatcccaagattttcttcagaaattcgccttgctccctgtggggtggctacaggatgaaaaactgctggaagaagcagcccaaaaagtggccttgctgcatcagaaatacagagggctcacagctcctgaggccgagatgctgtacatgcaggaggtagagcggatggacggctatggagaggagagctaccctgccaaggacagccaaggaagtgacatatccattggtgcttgtctcgatggcatctttgtgaagcacaagaatgggaggcctcccgtggtgttcaggtggcacgacattgctaacatgtcacacaataagtccttttttgcgttagaactggcaaataaagaggagaccatccagtttcaaactgaagacatggaaacagcaaagtacgtgtggaggctgtgtgtggcacgccacaaattttacagactgaaccagtgtaacctgcaaactcaggctgccacgttgaactccgtcaggaggggctcatcgtccaggatgtctctgcctaaaccccagccctatgcgatgcctcccccaccccagctgcattataatggacattatacagagccatttgcttcttcccaagacaatgtctttgtgcccaacaagaatggattctattgccactcccagacaagtttggacagaacccaaattgacctcagtggccgcatccgcaacggcagcgtgtacagtgcacacagtacgaactccttaaacacacctcagccctacctgcagccctcccctatgtcctccaaccccagtattccaggcagcgatgtcatgagacctgactacatcccatcccaccggcacagcgccttgattcccccatcctaccgcccgacccctgactacgagagcgtgatgaagcggctcaacagaggcatggtgcatgcagacaggcatagccactcgctcaggaacctcaacattggcagttcctatgcatacagcaggcccgacgccttggtctacagccagcctgagattcgggaacacccacacctcgcctctccccagtcagcccactacccatttaacttgaactacagtttccacagccaggctccgtatccataccctgtggagaggcggcctgtggtgggcgctgtgagtgtccctgagctgaccaatgtgcagctgcaggcccaggactacccagctccaaacattatgaggacccaggtgtaccggccgcccccgccatatccttacccaagacctgccaacagcaccccggacctatcgcggcacctctacatcagcagcagcaatccagatctcatcaccagacgcgtccatcactcggtgcagaccttccaggaggacagcttgcccgtggctcactctctgcaggaggtgagtgagcccctcacagcagctcggcatgcacacctacagaagaggaacagtattgaaatcgcagggctcacacatggtttcgaaggcctgaggctcaaggaggagacgatgtcagcctcagccgcagacgtggctcccaggaccttctcagcaggctcccagtccagcgtcttctctgacaaagtgaagcaggagggaaccgaagagcaggggagtggtgggtacagtcacaagaagtccctttctgatgccaccatgctgattcacagcagcgaggaggatgaggacttagaagacgacagcagcagagaacacgctgtgtctgagccccgccttacggctgctttctctcaggaacaacagctaaactacccctgtgcttcagtgactccggtcactggccctctgcatattttcgagcccaagtcccatgttacggagcctgagaagagggcaaaggacatcagccctgtccacctggttatggagactcatcagccccgaagacatggactgctgaccccctccatgtccgagtcagacctcacgacgtcagggaggtaccgagctaggagggactctctcaagaagaggccagtgtcagatctcctctctgggaagaagaacactgtggaaggacttccgccactagggggaatgaaaaagactcgagcagatgcaaaaaaaattggccccctcaagctggcagccctcaatggactctccctgtcccggctgcccctgcctgacgaaggcaaagaagtgtccaccagagcgacaaatgacgagaggtgtaaagttctggagcagcggttagagcaaggaacggtcttcaccgagtatgagaggattctgaaaaagcggctggttgatggcgagtgctcaacagctcggctccctgaaaatgcagagagaaaccgattccaagatgtgctcccctacgatgatgccagagtggagttggtgccaaccaaggagaacaacactggctatatcaatgcgtcacacattaaggtctctgtcagcggaattgaatgggattatattgccacacagggaccattacaaaatacctgccaggacttttggcagatggtgtgggaacagggagtcgcaattatagcaatggtgacagcggaagaggagggaggtcgggagaagagctttaggtattggccacggcttggctccaggcacaacactgtcacctatggaaggtttaagatcacaactcgcttccgcacggactcgggctgctacgccaccacaggtttgaagatgaagcaccttctcacagggcaggagaggacagtttggcatctccagtacacagactggcctgaacatggctgtcccgaagacctcaagggatttttatcataccttgaagagatccagtcagttcgacgtcatacaaacagtacaagtgaacccagaagtcccaaccccccgctgctggtgcactgcagtgctggcgtgggaagaactggggttgtcattctgtcagagatcatggtggcctgtctggaacacaatgaggtgctggacatccccagagtgctggagctgctgaggcagcagaggatgatgctggtgcagacacttagccagtacacgttcgtgtaccgggtgctcattcagttcctgaagagctctaggctcatctaagctccaccacctttctatggggacccaatcatgtgatgtgtttacagctttaaaaagaaaaaggaaagaaaagagtgcagctcccactttgttcccaggagtccatgtggagacctcaacaggaagtgtgtaagagctgaagaagctaagcatggggctgaggagtctggggacctgggagaggccgaggaggcaggtgctgccctggccacatctgcctggtttgctgcacttgcacaagttttggagattgtattttctagacagttctctgtcgtactgaagctgcctgggcagtcccagccagcacttaaggcacacagacttctatcttaaactcatatttgataatgcaattttatgactaaatagggttttttcttttttagctagaagctgaacttttctgtgggacatccacagaccgtgtggttcttgagtacctgtatttaaaaccattattagcttttgtttaagaacaaaaaccatgggggaactaagtgttttattcatgaaatccaaaactaaagaaaatctaaaagtgttattttgaaacatagaaagcatttttatattcagaatgtttttttaaaagttatatatttgtaccttctatattttccaaataagagctccattgttatgacactgagtcaatgtaaagttggggataaaggcacattatttaaaaatctaagaatcagattcactattttttcagtattattagtaagcgtaaaatgagtttgatttttttgaacatgaaagagcaattgcataggatggttttaagcacttttttgttaaaaatgagtttaatatatgtggctttatatttaagcaacagtggacactatttcaaagagaagggctctgagtacgttcgatgactaggggaagaggaagtgctctcggggctcacccggaaggtgtggtcattacacaaatgcagtattacctatgctcactcgagcgagagcgagagctgagatggcgtggaactcaaggcctgctaccgtgatgacgggctttgctgcctggggttcttcctgtctttcttccccccacagacaagtccaggcttacattaccattagagacccccgaagaggctttgtttcctttaggttgaaaggaggaaatagttaacgaggttcctttccctgaaccacagcccaaacttgtggggccaccagaaattgctgtggtgttcagggggtacttgaatttagcaccgtaatcctgtcctcccccagggtcagttctaggtactggtctccctttccatcccatttgggcacattctctattgatcagaacccaggcttgaagtggaaagtgctgttcttggaggacaagctggcacccttagctgaggtgtgtcatgttgtccagtgccctgcatcgtaggctgccgattcagtgtggacctagaatgttcgacctaggactagcttccaatactgtcctgccatcactctgatttgactttgtggtgagcgtcaccacatgacaggggtgtgccagcccatcgaagcaggacagacacaggtggattgtgccccagggtgggatttgtgtgctctatgctccatgtcaagccatgtgaaggtcaggacccttctgaagcttttcttccaatggtacgttgtttgaagatgctttcctgtcacacctaaacatttggaaatatcccactgacaagaacacattgtaaaacaaaactttaattaaagagtaatatatggca

SEQ ID NO: 1265 - protein, 1175 aa, Rattus norvegicus
  ref <308>: DATABASE ACCESSION NUMBER: Refseq / NP_598229
  ref <309>: DATABASE ENTRY DATE: 2003-01-13
MPLPFGLKLKRTRRYTVSSKSCLVARIQLLNNEFVEFTLSVESTGQESLEAVAQRLELREITYFSLWYYNKQNQRRWVDLEKPLKKQLDKHALEPTVYFGVVFYVPSVSQLQQEITRYQYYLQLKKDVLEGNLPCTLEQAIQLAGLAVQADFGDFDQYESQDFLQKFALLPVGWLQDEKLLEEAAQKVALLHQKYRGLTAPEAEMLYMQEVERMDGYGEESYPAKDSQGSDISIGACLDGIFVKHKNGRPPVVFRWHDIANMSHNKSFFALELANKEETIQFQTEDMETAKYVWRLCVARHKFYRLNQCNLQTQAATLNSVRRGSSSRMSLPKPQPYAMPPPPQLHYNGHYTEPFASSQDNVFVPNKNGFYCHSQTSLDRTQIDLSGRIRNGSVYSAHSTNSLNTPQPYLQPSPMSSNPSIPGSDVMRPDYIPSHRHSALIPPSYRPTPDYESVMKRLNRGMVHADRHSHSLRNLNIGSSYAYSRPDALVYSQPEIREHPHLASPQSAHYPFNLNYSFHSQAPYPYPVERRPVVGAVSVPELTNVQLQAQDYPAPNIMRTQVYRPPPPYPYPRPANSTPDLSRHLYISSSNPDLITRRVHHSVQTFQEDSLPVAHSLQEVSEPLTAARHAHLQKRNSIEIAGLTHGFEGLRLKEETMSASAADVAPRTFSAGSQSSVFSDKVKQEGTEEQGSGGYSHKKSLSDATMLIHSSEEDEDLEDDSSREHAVSEPRLTAAFSQEQQLNYPCASVTPVTGPLHIFEPKSHVTEPEKRAKDISPVHLVMETHQPRRHGLLTPSMSESDLTTSGRYRARRDSLKKRPVSDLLSGKKNTVEGLPPLGGMKKTRADAKKIGPLKLAALNGLSLSRLPLPDEGKEVSTRATNDERCKVLEQRLEQGTVFTEYERILKKRLVDGECSTARLPENAERNRFQDVLPYDDARVELVPTKENNTGYINASHIKVSVSGIEWDYIATQGPLQNTCQDFWQMVWEQGVAIIAMVTAEEEGGREKSFRYWPRLGSRHNTVTYGRFKITTRFRTDSGCYATTGLKMKHLLTGQERTVWHLQYTDWPEHGCPEDLKGFLSYLEEIQSVRRHTNSTSEPRSPNPPLLVHCSAGVGRTGVVILSEIMVACLEHNEVLDIPRVLELLRQQRMMLVQTLSQYTFVYRVLIQFLKSSRLI

SEQ ID NO: 1266 - DNA, 4234 bp, Homo sapiens
  ref <308>: DATABASE ACCESSION NUMBER: Refseq / NM_007039
  ref <309>: DATABASE ENTRY DATE: 2003-01-15
gcccatgagcgcgccgcggcccgggctggcgtgcgggtgcggctgcggcggccgcgcggcggggccccgggaggcgggtcgctgagcggggcgcgcggccccgaggatgcgggagcgggagcgggagcagcgctggcgtcaatgctcccttcctcgggccattggagactccgttgctttttaatggcggcagcggctgctgggtgagcagctggaggccggacagtgttcgtcccatccggagaggatcgctttctcctggcgtcaccagcgctgggttggtgggggtagcttttccctctttgctcctccattcttgaagaaagaagaagatgccactgccatttgggttgaaactgaaacgcacccggcgctacacggtgtccagcaagagttgcctggttgcccggatccaactgcttaataacgagtttgtggagttcaccctgtccgtggagagcactggccaggaaagcctcgaggccgtggcccagaggctggagctgcgggaggtcacttacttcagcctctggtactacaacaagcaaaatcagcgccggtgggtagatttggaaaaacctttgaagaagcagctggataaatatgcattggaacctaccgtctattttggagtggtgttttatgtgccttcagtttctcagctgcagcaggagattaccaggtatcagtattatctgcaactgaagaaagatatcttggaaggaagtattccttgtaccttagaacaagcaattcagctagcaggcttagctgttcaagcggattttggtgactttgatcagtatgaatcccaggactttcttcagaaatttgccttgtttcctgtgggatggttacaagatgaaaaagtattggaagaagcaacccaaaaagtggccttactacatcagaaatacagagggctcacagctcctgatgctgaaatgctgtacatgcaggaggtagagagaatggatggctatggagaagagagctaccctgctaaggatagccaaggaagtgacatatccattggagcgtgtcttgaaggtatctttgtgaaacacaagaatggaaggcatcctgtggtatttaggtggcatgacattgccaacatgtcccacaacaagtccttttttgcattagagctggcaaataaagaggagaccattcaatttcaaactgaagacatggaaacagcaaaatacatttggagactctgtgttgcgcgacacaagttttacagactaaaccagtgtaacctgcaaactcagactgtcacagtgaacccaatcaggaggaggtcttcttcaaggatgtctctgcctaaaccccagccctacgtgatgcctcccccaccgcagttgcactataatggacattatacagaaccatatgcttcttcccaagataacctctttgtgcccaaccagaacggatactactgtcactctcagacaagcttggatagagcccagattgacttcaacggtcggatccgtaatggcagtgtctacagtgcacacagcaccaactccttaaataatcctcagccctacttgcagccctcgccgatgtcgtccaaccctagcatcaccgggagtgacgtcatgaggcctgactacctcccgtcccatcggcacagcgccgtgatacccccgtcctaccgccccaccccagactatgagactgtgatgaagcagctcaacaggggcctggtgcatgcggaacggcagagccactcgctgcgaaacctcaacatcggcagctcgtacgcctacagcaggcccgcggcgctggtctacagccagcccgagatccgcgagcacgcacagctcccctcgccagcggccgcacactgcccgttcagcctgagctacagcttccacagcccgtctccctacccctaccctgccgagcggcggcccgtggtgggcgcggtcagcgtgccggagctgaccaatgcgcagctgcaggcgcaggactacccgtctcccaacatcatgcggacgcaggtgtaccggccacccccaccctacccgccccccaggcccgccaacagcacgccagacctgtcccgccacctttacatcagcagcagcaaccccgacctcatcacgcggcgcgtgcaccactcggtgcaaacgttccaggaggacagcctgcccgtggcgcactcgctgcaggaggtcagcgagcccctcaccgccgcgcgccacgcgcagctgcacaaacggaacagcatcgaggtggccgggctcagccacggcctggagggcctgcggctcaaggagcgcaccctatccgcgtcggcggcagaggtggcgccgcgagccgtctcggtgggctcccagcccagcgttttcaccgagaggacacagcgagaagggccggaggaggcggagggcttgaggtacggccataagaagtccctgtcggacgccaccatgctaatccacagcagcgaggaggaggaggacgaggacttcgaggaggagagcggggcccgggcgccccctgcacgtgcgcgcgagcctcggcccggcctggcccaggacccacctggctgccctcgcgtcctgctcgccgggcccctgcacatcctggagcccaaggcccacgtcccagacgcggagaagaggatgatggacagcagccccgtccgcacgaccgcagaggcccagcggccctggagagacgggctgctgatgccctccatgtcggagtccgacctcaccacgtcaggccgctaccgagcccggagggactctctgaagaaaaggccggtgtcggaccttctctctgggaagaagaacatcgtggaagggctcccgcctctagggggaatgaaaaagactcgagtagatgcaaaaaaaattggtcctcttaaactggctgccctaaatggactctccctatctcgagtgcctctgcctgatgaaggaaaggaagtggctaccagagcaacgaatgatgaaaggtgtaaaattctggaacaacgattagaacaaggaatggtattcacagaatatgaaagaattcttaagaaacggctagttgatggggagtgctcaacagcacgactccctgaaaatgcagaaagaaatcgattccaagatgttcttccttatgatgatgcgagagtggagttggtcccaactaaagaaaacaacactggttacatcaacgcatcacatattaaggtctctgtcagtggaatcgaatgggattatattgccacacagggaccattacagaatacctgtcaagatttttggcagatggtatgggaacagggaattgcaattatagcaatggtgacagcagaagaggagggtggaagggagaagagctttaggtactggccacgacttggttccaggcacaacactgtcacctatggaaggtttaagatcacgacccggttccgcacagactctggctgctatgccaccacaggcctgaagatgaagcacctccttaccgggcaagagaggaccgtctggcacctccaatacacagactggcctgaacatggctgtccagaagacctcaagggatttttatcatatcttgaagagatccagtctgttcgacgccatacaaatagcacaagtgatccccaaagccccaaccctccgttgttggtccactgcagtgctggggtaggaaggactggcgtggtgattttgtcggagatcatgatcgcctgcctggaacacaatgaggtgctggacatcccgagagtgctggacatgctgaggcaacagagaatgatgctggtgcagactctctgccagtacacatttgtgtacagagtcctcatccagttcctgaaaagctccaggctcatctaagctcccacaatttcttacggggccagtcatgtgaagcgtttacagcttaaaaaaaaagcgcttgcctaactcatactttcccgttgacacttgatccacgcagcgtggcactgggacgtaagtggcgcagtctgaatggcggcacgctgaaggaaacgtgcgaagcacaggctgaagaggggtttctaacctgggaaaggtgctcaaggaggacttggtttcaagggccttgccctgccccggtctgtccggtttgcagtacttgcacacattttggagattgtattttctagacaattctctattttactgaagctatgctgggcaattctggcaatcattaaagtgcatagatttctatcttaaaaaaaaaaaaa

SEQ ID NO: 1267 - protein, 1174 aa, Homo sapiens
  ref <308>: DATABASE ACCESSION NUMBER: Refseq / NP_008970
  ref <309>: DATABASE ENTRY DATE: 2003-01-15
MPLPFGLKLKRTRRYTVSSKSCLVARIQLLNNEFVEFTLSVESTGQESLEAVAQRLELREVTYFSLWYYNKQNQRRWVDLEKPLKKQLDKYALEPTVYFGVVFYVPSVSQLQQEITRYQYYLQLKKDILEGSIPCTLEQAIQLAGLAVQADFGDFDQYESQDFLQKFALFPVGWLQDEKVLEEATQKVALLHQKYRGLTAPDAEMLYMQEVERMDGYGEESYPAKDSQGSDISIGACLEGIFVKHKNGRHPVVFRWHDIANMSHNKSFFALELANKEETIQFQTEDMETAKYIWRLCVARHKFYRLNQCNLQTQTVTVNPIRRRSSSRMSLPKPQPYVMPPPPQLHYNGHYTEPYASSQDNLFVPNQNGYYCHSQTSLDRAQIDFNGRIRNGSVYSAHSTNSLNNPQPYLQPSPMSSNPSITGSDVMRPDYLPSHRHSAVIPPSYRPTPDYETVMKQLNRGLVHAERQSHSLRNLNIGSSYAYSRPAALVYSQPEIREHAQLPSPAAAHCPFSLSYSFHSPSPYPYPAERRPVVGAVSVPELTNAQLQAQDYPSPNIMRTQVYRPPPPYPPPRPANSTPDLSRHLYISSSNPDLITRRVHHSVQTFQEDSLPVAHSLQEVSEPLTAARHAQLHKRNSIEVAGLSHGLEGLRLKERTLSASAAEVAPRAVSVGSQPSVFTERTQREGPEEAEGLRYGHKKSLSDATMLIHSSEEEEDEDFEEESGARAPPARAREPRPGLAQDPPGCPRVLLAGPLHILEPKAHVPDAEKRMMDSSPVRTTAEAQRPWRDGLLMPSMSESDLTTSGRYRARRDSLKKRPVSDLLSGKKNIVEGLPPLGGMKKTRVDAKKIGPLKLAALNGLSLSRVPLPDEGKEVATRATNDERCKILEQRLEQGMVFTEYERILKKRLVDGECSTARLPENAERNRFQDVLPYDDARVELVPTKENNTGYINASHIKVSVSGIEWDYIATQGPLQNTCQDFWQMVWEQGIAIIAMVTAEEEGGREKSFRYWPRLGSRHNTVTYGRFKITTRFRTDSGCYATTGLKMKHLLTGQERTVWHLQYTDWPEHGCPEDLKGFLSYLEEIQSVRRHTNSTSDPQSPNPPLLVHCSAGVGRTGVVILSEIMIACLEHNEVLDIPRVLDMLRQQRMMLVQTLCQYTFVYRVLIQFLKSSRLI

SEQ ID NO: 1268 - DNA, 515 bp, Rattus norvegicus
  ref <308>: DATABASE ACCESSION NUMBER: EMBL / AA893607
  ref <309>: DATABASE ENTRY DATE: 2000-03-03
agctcccaggactgttttttaaactgctgtattctcaaacccttcccttactgcccaggccaacacttttcattaagaactggtccaagaatgttcagccctttggacctggaattttgaacctcatgtgtcctggaaaaggcactctggaaggttccataggctggggacctacacagtacatcagcttcctagcagaggcccagtgtgatggggtcccagacaagggtcctcagtcaggactgggctagcagcagcccagctcaaggtcagcttgggcgctgcagacgacaccgaccgacacttccacccacaggccttactgctctgtttacagtgacctacctgctccaggcccctccaagaagagactggggtacctggagggccattctctgggtcatggatatatgatcatttgattttttttttccttaccttaaacctctaacctggcttttcccatttcaactcctgtgatttatgccaataaagtttgccatgattttcacccg

SEQ ID NO: 1269 - DNA, 3595 bp, Homo sapiens
  ref <308>: DATABASE ACCESSION NUMBER: Refseq / NM_002859
  ref <309>: DATABASE ENTRY DATE: 2000-10-31
aaaagttgcggggcatagacgagcgccccgggacgcagctagcgcgaccctgagccggcgcccgtggtccggccatggacgacctcgacgccctgctggcggacttggagtctaccacctcccacatctccaaacggcctgtgttcttgtcggaggagaccccctactcatacccaactggaaaccacacataccaggagattgccgtgccaccccccgtccccccacccccgtccagcgaggccctcaatggcacaatccttgaccccttagaccagtggcagcccagcggctcccgattcatccaccagcagcctcagtcctcatcacctgtgtacggctccagtgccaaaacttccagtgtctccaaccctcaggacagtgttggctctccgtgctcccgagtgggtgaggaggagcacgtctacagcttccccaacaagcagaaatcagctgagccttcacccaccgtaatgagcacgtccctgggcagcaacctttctgaactcgaccgcctgctgctggaactgaacgctgtacagcataacccgccaggcttccctgcagatgaggccaactcaagccccccgcttcctggggccctgagccccctctatggtgtcccagagactaacagccccttgggaggcaaagctgggcccctgacgaaagagaagcctaagcggaatgggggccggggcctggaggacgtgcggcccagtgtggagagtctcttggatgaactggagagctccgtgcccagccccgtccctgccatcactgtgaaccagggcgagatgagcagcccgcagcgcgtcacctccacccaacagcagacacgcatctcggcctcctctgccaccagggagctggacgagctgatggcttcgctgtcggatttcaagttcatggcccaggggaagacagggagcagctcaccccctggggggcccccgaagcccgggagccagctggacagcatgctggggagcctgcagtctgacctgaacaagctgggggtcgccacagtcgccaaaggagtctgcggggcctgcaagaagcccatcgccgggcaggttgtgaccgccatggggaagacgtggcaccccgagcacttcgtctgcacccactgccaggaggagatcggatcccggaacttcttcgagcgggatggacagccctactgtgaaaaggactaccacaacctcttctccccgcgctgctactactgcaacggccccatcctggataaagtggtgacagcccttgaccggacgtggcaccctgaacacttcttctgtgcacagtgtggagccttctttggtcccgaagggttccacgagaaggacggcaaggcctactgtcgcaaggactacttcgacatgttcgcacccaagtgtggcggctgcgcccgggccatcctggagaactatatctcagccctcaacacgctgtggcatcctgagtgctttgtgtgccgggaatgcttcacgccattcgtgaacggcagcttcttcgagcacgacgggcagccctactgtgaggtgcactaccacgagcggcgcggctcgctgtgttctggctgccagaagcccatcaccggccgctgcatcaccgccatggccaagaagttccaccccgagcacttcgtctgtgccttctgcctcaagcagctcaacaagggcaccttcaaggagcagaacgacaagccttactgtcagaactgcttcctcaagctcttctgctaggtgccctgcccctgtctctgccccccttccccagccagcatccccaactgcgactgtgacctagagacttcacccgggggtgaaggggtaaacccgactgaaactggaacccttgtcctccgctggtgcgggatggacagagggccgtgaggggtccccctgcttgtcttcacccctgccagagcctctgggccccctcctccctcctgtagctctccctaggctgcccactctccatcctccccaggggtagaggctgggggctccaccccagcccatgtacgtccccacgaactggcctggccagcaccccacactggagccatctcttcctcatatttcagcagtgcagccggggggcagggaagggcaggcagggtctgttggggtctctttttatccttattcctcccccgacctaattgtctttgttctgtgattattgggggacacccggctccctccagacaatgccagcataaatccatccatccaaaggcagagaaccaaaggggccatggaaggttctctgtgctcctcctacccttccagtgccctaggcctggcgactgcccctgccttttagacccgcactccccttttatacctgctcttgttctactgagaaaagcctctccagcaataatgttttctagtcacttcctccgtctccgggacggcgtgcctggacactgtccgactttgatagatttctacactgaggttgaattcatatcgcctgagatgttttacttctctatacaccatgattttgtagagatattaaagacgttcccttttgtatctcttcttcatcaccgccactgggccttcactgatggtgtctggtgtgtagattgctttgtctgtggggtggggtggggaagcaatatgtattttattgtttcttagcacaagcaggtgtgctgggagcagctctgtgactccccctctttcacttcatagctcccaggactgttttataaactgctgctatttggaaaccccttctttacttcccaggccagcaagccttcactgaaactggttgaagagtgttgcacccttttgggcctagaattctgaactttatctgttctgtttctgtgggaggagaaggggaagtatgttttggggggctgcttcctgtctgagtaagccctcaggagcctcttgctcccctgtgaacccctgaaccttctgagcccccctgcttctatggggctctctcttctgccttctcaggaaagctgtgtctgattttggccatcaggactctgacgtctctttggtcttgttgatttacctctgggcatatcccttccccagatctgctcctcccctttcacaggtgggatcggcactcagggggtctggaaagaaggtcataagggagcatgataggatttggggcagagggacaggctcctctggggaaaccccccagagctctttaccaaggatgaaagaggagccaggccttgggctcctgatgaccagaaaggggccaccggggtctaatggtgacagtccaaaccactccactggcctcctggcagaagccgagtgtgctggggtctccgaagagggtccctcctttttgggggaaggtcagcccagcccctccaaaggtctgatgtctccactttcacccgcaggccttaccgctctgtttatagtgacccaccctagatcttccccaagagggactggggtttctggggtccattctctgagtcagtggttatttgaaaatttgattttgattttattttttctctgtaaacttccaagctggcttttcccatttcaattcctgtgatttatgccaataaagtttgcccatg

SEQ ID NO: 1270 - protein, 557 aa, Homo sapiens
  ref <308>: DATABASE ACCESSION NUMBER: Refseq / NP_002850
  ref <309>: DATABASE ENTRY DATE: 2000-10-31
MDDLDALLADLESTTSHISKRPVFLSEETPYSYPTGNHTYQEIAVPPPVPPPPSSEALNGTILDPLDQWQPSGSRFIHQQPQSSSPVYGSSAKTSSVSNPQDSVGSPCSRVGEEEHVYSFPNKQKSAEPSPTVMSTSLGSNLSELDRLLLELNAVQHNPPGFPADEANSSPPLPGALSPLYGVPETNSPLGGKAGPLTKEKPKRNGGRGLEDVRPSVESLLDELESSVPSPVPAITVNQGEMSSPQRVTSTQQQTRISASSATRELDELMASLSDFKFMAQGKTGSSSPPGGPPKPGSQLDSMLGSLQSDLNKLGVATVAKGVCGACKKPIAGQVVTAMGKTWHPEHFVCTHCQEEIGSRNFFERDGQPYCEKDYHNLFSPRCYYCNGPILDKVVTALDRTWHPEHFFCAQCGAFFGPEGFHEKDGKAYCRKDYFDMFAPKCGGCARAILENYISALNTLWHPECFVCRECFTPFVNGSFFEHDGQPYCEVHYHERRGSLCSGCQKPITGRCITAMAKKFHPEHFVCAFCLKQLNKGTFKEQNDKPYCQNCFLKLFC

SEQ ID NO: 1271 - DNA, 535 bp, Rattus norvegicus
  ref <308>: DATABASE ACCESSION NUMBER: EMBL / AA800712
  ref <309>: DATABASE ENTRY DATE: 2000-03-03
caaaagttgaatagttaaaatgtgaacatttccccccaaaacgaaccatcccccaccacgcggactaccactattcaactacttctcccatgctcaccacacactctgcaaacacagggatcaggacctcaactgctcatgaacacagagagcacagagccacgcacaggcacctctatctccttcgcattagcaggttctgaatggaggattaaggagcgaacatcaatcacccttaacccagagttaagacttccctaacattcctttttcttcatctaagacatgaaaactcaaagcagttttgcttacaattttaagtcttatattctgttctctgaatggctgagctgggaccaaactgaccttcacaatctcaggactagcagagagccgatcccagttgtagcttggccaatgacactgcaagttaccacacaggtgcaaataatgctttaacagttaccgacacttaaaaccaaactctagtaatgcattaatatggaacctccacatttttctgacacagcaaaag

SEQ ID NO: 1272 - DNA, 3018 bp, Homo sapiens
  ref <308>: DATABASE ACCESSION NUMBER: Refseq / NM_007271
  ref <309>: DATABASE ENTRY DATE: 2002-05-23
gaattccgggccaggcatggtagcgcatcgctgtaatcccagctactcgggaaactgaggtgggagaatcgattgaacctggaagtggaggttgcggtgagccaagatcatcctgtcgcactccagcctgggcaacaagagcgaaactccatctcaaaaagaaaaaaaaagatatatatgtgtgacttacaggtacaggtaaagttgcttctggttttctggttgttgcatggtatttcctatgcagccacaggtctttattttcttacttaagtgcctccaacttcccataacacaaattaaggcatgatgaacatcctctctgtgctgaacatcctgtgtatgtcacttcagaagcctgtgtgacggtttctttagtctttatacctaggggtgggatttctgggtcataggacagtaatttatatttatttcactaagtattctctttctctggcttttgttacatattacctgtttgtcctccagaaaacttgcaccaatttacattcctaccaatagggtaggagagtgcacaatgggtggattctaactccaaatctaacacctcttcttttctttgtttctagcagccatggcaatgacaggctcaacaccttgctcatccatgagtaaccacacaaaggaaagggtgacaatgaccaaagtgacactggagaatttttatagcaaccttatcgctcaacatgaagaacgagaaatgagacaaaagaagttagaaaaggtgatggaagaagaaggcctaaaagatgaggagaaacgactccggagatcagcacatgctcggaaggaaacagagtttcttcgtttgaagagaacaagacttggattggaagattttgagtccttaaaagtaataggcagaggagcatttggtgaggtacggcttgttcagaagaaagatacgggacatgtgtatgcaatgaaaatactccgtaaagcagatatgcttgaaaaagagcaggttggccacattcgtgcggagcgtgacattctagtggaggcagacagtttgtgggttgtgaaaatgttctatagttttcaggataagctaaacctctacctaatcatggagttcctgcctggaggggacatgatgaccttgttgatgaaaaaagacactctgacagaagaggagactcagttttatatagcagaaacagtattagccatagactctattcaccaacttggattcatccacagagacatcaaaccagacaaccttcttttggacagcaagggccatgtgaaactttctgactttggtctttgcacaggactgaaaaaagcacataggacagaattttataggaatctgaaccacagcctccccagtgatttcactttccagaacatgaattccaaaaggaaagcagaaacctggaaaagaaatagacgtcagctagccttctccacagtaggcactcctgactacattgctcctgaggtgttcatgcagaccgggtacaacaagctctgtgattggtggtcgcttggggtgatcatgtatgagatgctcatcggctacccacctttctgttctgagacccctcaagagacatataagaaggtgatgaactggaaagaaactttgacttttcctccagaagttcccatctctgagaaagccaaggatctaattttgaggttctgctgtgaatgggaacatagaattggagctcctggagttgaggaaataaaaagtaactctttttttgaaggcgttgactgggaacatatcagagagagacctgctgcaatatctattgaaatcaaaagcattgatgatacctcaaacttcgatgagtttccagaatctgatattcttaagccaacagtggccacaagtaatcatcctgagactgactacaagaacaaagactgggtcttcatcaattacacgtacaagcgctttgagggcctgactgcaaggggggcaataccttcctacatgaaagcagcaaaatagtactcttgccacggaatcctatgtggagcagagttctttgtataacatcatgcttttcctctcacactcttgaagagcttccaagaagttgatggaacccaccaatatgtcatagtaaagtctcctgaaatgtggtagtaagaggattttcttccataatgcatctgaaaaactgtaaacaaagacaaccatttctactacgtcggccataaacagctatcctgctttggaagagaagcatcatgagccaatttgataggtgttttaaaaataacttgagttttcctaagttcatcagaatgaaggggaaaaacagccatcatccaacattattgagattgtcgtgtatagtcatcgaatatcagccagttcctgtaattttgtgacacgctctctgccaagcccaccaagtatttcctttatagctaaaagttccatagtactaaggaaataaagcaataaagacagtctcagcagccaggattctggctgaaggaaatgatccgccaccctgagggtggtgatggtagtttctacccatacctcagcctcaggcgagtggcttatagcctccattcatggtgcactttatttatggtactaagataaagactgtcaatccattgatttatctcctcctgtcccccatctaaaatacccatgctgcttttctgagtgttgatgggggttaccagcttgatccactgttgctcttagaaggcccagaaagtctttgggcattgcaagaaatcccgaattatgtggaaaaccctcactttctcttcacggctgtaccagaaaatccctaagacagatcttgccgtggactagcaatacctgcaagtgctgccaatgggaactcaatttattcctgggaacctaacgaggagagcccaggcctaggcaggaggcctggaaccctcttggctaaggtgctgttcctgttcctgcaaggtctccagaacccctttggaaatggtgaaggaaccagcccaatagaagtacagagccagctgacggaattc

SEQ ID NO: 1273 - protein, 465 aa, Homo sapiens
  ref <308>: DATABASE ACCESSION NUMBER: Refseq / NP_009202
  ref <309>: DATABASE ENTRY DATE: 2002-05-23
MAMTGSTPCSSMSNHTKERVTMTKVTLENFYSNLIAQHEEREMRQKKLEKVMEEEGLKDEEKRLRRSAHARKETEFLRLKRTRLGLEDFESLKVIGRGAFGEVRLVQKKDTGHVYAMKILRKADMLEKEQVGHIRAERDILVEADSLWVVKMFYSFQDKLNLYLIMEFLPGGDMMTLLMKKDTLTEEETQFYIAETVLAIDSIHQLGFIHRDIKPDNLLLDSKGHVKLSDFGLCTGLKKAHRTEFYRNLNHSLPSDFTFQNMNSKRKAETWKRNRRQLAFSTVGTPDYIAPEVFMQTGYNKLCDWWSLGVIMYEMLIGYPPFCSETPQETYKKVMNWKETLTFPPEVPISEKAKDLILRFCCEWEHRIGAPGVEEIKSNSFFEGVDWEHIRERPAAISIEIKSIDDTSNFDEFPESDILKPTVATSNHPETDYKNKDWVFINYTYKRFEGLTARGAIPSYMKAAK

SEQ ID NO: 1274 - DNA, 309 bp, Rattus norvegicus
  ref <308>: DATABASE ACCESSION NUMBER: Refseq / NM_053555
  ref <309>: DATABASE ENTRY DATE: 2003-01-13
atggcagggaaagaattggagcgatgccagcggcaggcagaccaagtgacggaaatcatgctcaacaatttcgacaaggtcctggaacgcgatgggaagctgtcagagttgcagcagcgctcagaccagctcctggacatgagttctgccttcagcaagacaaccaagactttagcccagcagaagcgctgggagaatatccggtgccgggtctacctggggctagccgtggctggcggccttctcctcatcctggttgtgcttctggtcatctttcttccgagtggagaggacagtagtaaaccatag

SEQ ID NO: 1275 - protein, 102 aa, Rattus norvegicus
  ref <308>: DATABASE ACCESSION NUMBER: Refseq / NP_446007
  ref <309>: DATABASE ENTRY DATE: 2003-01-13
MAGKELERCQRQADQVTEIMLNNFDKVLERDGKLSELQQRSDQLLDMSSAFSKTTKTLAQQKRWENIRCRVYLGLAVAGGLLLILVVLLVIFLPSGEDSSKP

SEQ ID NO: 1276 - DNA, 503 bp, Rattus norvegicus
  ref <308>: DATABASE ACCESSION NUMBER: EMBL / AA894332
  ref <309>: DATABASE ENTRY DATE: 2000-03-03
ctccaccatctcttacctcctgcttctacactctcatggccacgggcttgtgctatgagctgaggatctctctcatggtcagatgctttccctcaggggagagtgctgtggtaagagctggaggtccatcccactctccaggccttctgctcatccttccaggcacctccacacacctcatcctatgcctctgtgtgcttcctgcacccatccacgggggtgattgtgtctatctacctcttcggtgtcttgtgaaggagtcattcccacgagtctgttgagcagagtgtcagggaggagttgaaaggccagtcagagctgtgtgtgtggcctgttctcctatgggctggacaacctcattttatctcagcctttaatctgggaggccgaaagtacaattttattttgttccctatagggtcacccaacactatgatgaggtccatcactctaaaggagcatgtatataaacacgctcacagttatatttgtaattttgtatg

SEQ ID NO: 1277 - DNA, 3997 bp, Homo sapiens
  ref <308>: DATABASE ACCESSION NUMBER: Refseq / NM_000212
  ref <309>: DATABASE ENTRY DATE: 2000-10-31
gcgggaggcggacgagatgcgagcgcggccgcggccccggccgctctgggcgactgtgctggcgctgggggcgctggcgggcgttggcgtaggagggcccaacatctgtaccacgcgaggtgtgagctcctgccagcagtgcctggctgtgagccccatgtgtgcctggtgctctgatgaggccctgcctctgggctcacctcgctgtgacctgaaggagaatctgctgaaggataactgtgccccagaatccatcgagttcccagtgagtgaggcccgagtactagaggacaggcccctcagcgacaagggctctggagacagctcccaggtcactcaagtcagtccccagaggattgcactccggctccggccagatgattcgaagaatttctccatccaagtgcggcaggtggaggattaccctgtggacatctactacttgatggacctgtcttactccatgaaggatgatctgtggagcatccagaacctgggtaccaagctggccacccagatgcgaaagctcaccagtaacctgcggattggcttcggggcatttgtggacaagcctgtgtcaccatacatgtatatctccccaccagaggccctcgaaaacccctgctatgatatgaagaccacctgcttgcccatgtttggctacaaacacgtgctgacgctaactgaccaggtgacccgcttcaatgaggaagtgaagaagcagagtgtgtcacggaaccgagatgccccagagggtggctttgatgccatcatgcaggctacagtctgtgatgaaaagattggctggaggaatgatgcatcccacttgctggtgtttaccactgatgccaagactcatatagcattggacggaaggctggcaggcattgtccagcctaatgacgggcagtgtcatgttggtagtgacaatcattactctgcctccactaccatggattatccctctttggggctgatgactgagaagctatcccagaaaaacatcaatttgatctttgcagtgactgaaaatgtagtcaatctctatcagaactatagtgagctcatcccagggaccacagttggggttctgtccatggattccagcaatgtcctccagctcattgttgatgcttatgggaaaatccgttctaaagtagagctggaagtgcgtgacctccctgaagagttgtctctatccttcaatgccacctgcctcaacaatgaggtcatccctggcctcaagtcttgtatgggactcaagattggagacacggtgagcttcagcattgaggccaaggtgcgaggctgtccccaggagaaggagaagtcctttaccataaagcccgtgggcttcaaggacagcctgatcgtccaggtcacctttgattgtgactgtgcctgccaggcccaagctgaacctaatagccatcgctgcaacaatggcaatgggacctttgagtgtggggtatgccgttgtgggcctggctggctgggatcccagtgtgagtgctcagaggaggactatcgcccttcccagcaggacgaatgcagcccccgggagggtcagcccgtctgcagccagcggggcgagtgcctctgtggtcaatgtgtctgccacagcagtgactttggcaagatcacgggcaagtactgcgagtgtgacgacttctcctgtgtccgctacaagggggagatgtgctcaggccatggccagtgcagctgtggggactgcctgtgtgactccgactggaccggctactactgcaactgtaccacgcgtactgacacctgcatgtccagcaatgggctgctgtgcagcggccgcggcaagtgtgaatgtggcagctgtgtctgtatccagccgggctcctatggggacacctgtgagaagtgccccacctgcccagatgcctgcacctttaagaaagaatgtgtggagtgtaagaagtttgaccgggagccctacatgaccgaaaatacctgcaaccgttactgccgtgacgagattgagtcagtgaaagagcttaaggacactggcaaggatgcagtgaattgtacctataagaatgaggatgactgtgtcgtcagattccagtactatgaagattctagtggaaagtccatcctgtatgtggtagaagagccagagtgtcccaagggccctgacatcctggtggtcctgctctcagtgatgggggccattctgctcattggccttgccgccctgctcatctggaaactcctcatcaccatccacgaccgaaaagaattcgctaaatttgaggaagaacgcgccagagcaaaatgggacacagccaacaacccactgtataaagaggccacgtctaccttcaccaatatcacgtaccggggcacttaatgataagcagtcatcctcagatcattatcagcctgtgccacgattgcaggagtccctgccatcatgtttacagaggacagtatttgtggggagggatttggggctcagagtggggtaggttgggagaatgtcagtatgtggaagtgtgggtctgtgtgtgtgtatgtgggggtctgtgtgtttatgtgtgtgtgttgtgtgtgggagtgtgtaatttaaaattgtgatgtgtcctgataagctgagctccttagcctttgtcccagaatgcctcctgcagggattcttcctgcttagcttgagggtgactatggagctgagcaggtgttcttcattacctcagtgagaagccagctttcctcatcaggccattgtccctgaagagaagggcagggctgaggcctctcattccagaggaagggacaccaagccttggctctaccctgagttcataaatttatggttctcaggcctgactctcagcagctatggtaggaactgctgggcttggcagcccgggtcatctgtacctctgcctcctttcccctccctcaggccgaaggaggagtcagggagagctgaactattagagctgcctgtgccttttgccatcccctcaacccagctatggttctctcgcaagggaagtccttgcaagctaattctttgacctgttgggagtgaggatgtctgggccactcaggggtcattcatggcctgggggatgtaccagcatctcccagttcataatcacaacccttcagatttgccttattggcagctctactctggaggtttgtttagaagaagtgtgtcacccttaggccagcaccatctctttacctcctaattccacaccctcactgctgtagacatttgctatgagctggggatgtctctcatgaccaaatgcttttcctcaaagggagagagtgctattgtagagccagaggtctggccctatgcttccggcctcctgtccctcatccatagcacctccacatacctggccctgagccttggtgtgctgtatccatccatggggctgattgtatttaccttctacctcttggctgccttgtgaaggaattattcccatgagttggctgggaataagtgccaggatggaatgatgggtcagttgtatcagcacgtgtggcctgttcttctatgggttggacaacctcattttaactcagtctttaatctgagaggccacagtgcaattttattttatttttctcatgatgaggttttcttaacttaaaagaacatgtatataaacatgcttgcattatatttgtaaatttatgtgtatggcaaagaaggagagcataggaaaccacacagacttgggcagggtacagacactcccacttggcatcattcacagcaagtcactggccagtggctggatctgtgaggggctctctcatgatagaaggctatggggatagatgtgtggacacattggacctttcctgaggaagagggactgttcttttgtcccagaaaagcagtggctccattggtgttgacatacatccaacattaaaagccacccccaaatgcccaagaaaaaaagaaagacttatcaacatttgttccatgagg

SEQ ID NO: 1278 - protein, 788 aa, Homo sapiens
  ref <308>: DATABASE ACCESSION NUMBER: Refseq / NP_000203
  ref <309>: DATABASE ENTRY DATE: 2000-10-31
MRARPRPRPLWATVLALGALAGVGVGGPNICTTRGVSSCQQCLAVSPMCAWCSDEALPLGSPRCDLKENLLKDNCAPESIEFPVSEARVLEDRPLSDKGSGDSSQVTQVSPQRIALRLRPDDSKNFSIQVRQVEDYPVDIYYLMDLSYSMKDDLWSIQNLGTKLATQMRKLTSNLRIGFGAFVDKPVSPYMYISPPEALENPCYDMKTTCLPMFGYKHVLTLTDQVTRFNEEVKKQSVSRNRDAPEGGFDAIMQATVCDEKIGWRNDASHLLVFTTDAKTHIALDGRLAGIVQPNDGQCHVGSDNHYSASTTMDYPSLGLMTEKLSQKNINLIFAVTENVVNLYQNYSELIPGTTVGVLSMDSSNVLQLIVDAYGKIRSKVELEVRDLPEELSLSFNATCLNNEVIPGLKSCMGLKIGDTVSFSIEAKVRGCPQEKEKSFTIKPVGFKDSLIVQVTFDCDCACQAQAEPNSHRCNNGNGTFECGVCRCGPGWLGSQCECSEEDYRPSQQDECSPREGQPVCSQRGECLCGQCVCHSSDFGKITGKYCECDDFSCVRYKGEMCSGHGQCSCGDCLCDSDWTGYYCNCTTRTDTCMSSNGLLCSGRGKCECGSCVCIQPGSYGDTCEKCPTCPDACTFKKECVECKKFDREPYMTENTCNRYCRDEIESVKELKDTGKDAVNCTYKNEDDCVVRFQYYEDSSGKSILYVVEEPECPKGPDILVVLLSVMGAILLIGLAALLIWKLLITIHDRKEFAKFEEERARAKWDTANNPLYKEATSTFTNITYRGT

SEQ ID NO: 1279 - DNA, 3132 bp, Rattus norvegicus
  ref <308>: DATABASE ACCESSION NUMBER: Refseq / NM_031020
  ref <309>: DATABASE ENTRY DATE: 2003-01-13
gccgctggaaaatgtcgcaggaaaggcccacgttctaccggcaggagctgaacaagaccgtctgggaggtgcccgagcgataccagaacctgtccccggtgggctcgggagcctacggctcggtgtgtgctgcttttgatacaaagacgggacatcgtgtggcagtgaagaagctgtcgagaccgtttcagtccatcattcacgccaaaaggacctacagggagctgcggctgctgaagcacatgaagcacgagaatgtgattggtctgttggatgtgtttacacctgcaaggtccctggaagaattcaacgatgtgtacctggtgacccatctcatgggggcagacctgaacaacatcgtgaagtgtcagaagcttaccgatgaccacgttcagtttcttatctaccagatcctgcgagggctgaagtatatacactcggctgacataatccacagggacctaaagcccagcaacctcgctgtgaatgaagactgtgagctgaagattctggattttgggctggctcggcacactgatgacgaaatgaccggctacgtggctacccggtggtacagagcccccgagattatgctgaattggatgcactacaaccagacagtggatatttggtccgtgggctgcatcatggctgagctgttgaccggaagaacgttgtttcctggtacagaccatattgatcagttgaagctcattttaagactcgttggaaccccaggggctgagcttctgaagaaaatctcctcagagtctgcaagaaactacattcagtctctggcccagatgccgaagatgaacttcgcaaatgtatttattggtgccaatcccctggctgtcgacctgctggaaaagatgctggttttggactcggataagaggatcacagcagcccaagctcttgcgcatgcctactttgctcagtaccacgaccctgatgatgagccagtggctgaaccttatgaccagtcctttgaaagcagggacttccttatagacgaatggaagagcctgacctacgatgaagtcattagctttgtgccaccgccccttgaccaagaagaaatggagtcctgagcaccttgcttctgttctgtccatcccacttcactgtgaggggaaggcctgttcatgggaactctccaaataccattcaagtgcctcttgttgaaagattccttcatggtggaagggggtgcatgtatgtgcgtagtgtttgtgtgtgtctgtctgtctgtccgtttgtccatgtatctttgtggaagtcattgtgatggcagtgacttcatgagtggtagatgctccttggcagtctgcctgctctctcagagtccgggcaggccgatgggaactgccgtctccttagggatgtgtgtgtgtatgttaagtgcaaagtaagaatattaaaatatccctgttcctagttaccttgccacttcggcttctcctgtggccctgcctttaccatatcacagtgacagagagaggctgcttcaggtctgaggctatccctcagccatgcataaagcccaagagaaccaactggctcctgggctctagcctgtgatcggcttgctcatgtcctcagaacctgtcagtctgtttgtgccttaaaaggagagaagggcgcgttgtggtagttacagaatctcagttgctggcgttctgagccaggcaaggcacagggctgttggatggccagtggggagctggacaaaacaaggcagccttcaaggaggccatgggtgcatgtttgcatgagtgtatgtgcaaccgccctccctcacctccaggagcaagctgttttctatgcttacctaagttcacctcagtgcagaggtctccagtgccaggcacaggctcctgccatcagtagcttcctatgtcatcttcacgtcatgcgggtgtttgcatgctgtgctctggagcttgtcctgtcttctggaagccctgggccgggcgtgtgaagacttcccagcagtcctatccacgcacctcagctgaggccacgggcacactgctgcttcctcactccagctacgttgtgttgaacacaactgatcctccaggtgcttgtggtgcaggaaacgggacgaacagagcacctgaacccttgccatctgacatcaccgacacaggagaacagtcctctcctctcctctcctctcctctcctaggacagtccccggctctggaatcatgttcttctcactcatggtagccagctaagaaagctgcaaaccgaacaaagggagaaccgagctcctgaagccaggagctccttttactgtccttctcaaaatagggtcattagacacagccaagtcgtcaaaggcccctttccttgtacggggcccccccgcccccggcagcttgacactgatttcagtgtctatttggggagaaagcaattttgtcttggaattttgtatgttgtaggaatccttagagagtgtggttccttctgatggggagaaagggcaaattattttaatattttgtatttcacctttataaacatgaatcctcaggggtgaagaacagtttgcataattttctgaatttcaggcactttgtgctatatgaggacccatatatttaagctttttgtgcagtaagaaagtgtaaagccaattccagtgttggacgaaacaggtctcgtatttaggtcaaggtgtctccattctctatcagtgcagggacatgcagtttctgtggggcagggtaggaccctgcatcatttggagcccagaaggaggccgactggccaggcctcaccgcctcagtatgcagtccagctccacgtcatcccctcacaatggttagtagcaacgtctgggtttgaacgccaggcgtggttatattattgaggatgcctttgcacatgtggccatgctgtgttaggactgtgccccagggcccggacttgaagctagagctggcagaagagctcctggcatccatggtgcgatgctgccgccacccagtttctccattggaagacaagggaatgagaagactgctgtgtatgtgtatttgtgaacttggttgtgatctggtatgccataggatgtcagacaatatcactggttaaagtaaagcctatttttcagat

SEQ ID NO: 1280 - protein, 360 aa, Rattus norvegicus
  ref <308>: DATABASE ACCESSION NUMBER: Refseq / NP_112282
  ref <309>: DATABASE ENTRY DATE: 2003-01-13
MSQERPTFYRQELNKTVWEVPERYQNLSPVGSGAYGSVCAAFDTKTGHRVAVKKLSRPFQSIIHAKRTYRELRLLKHMKHENVIGLLDVFTPARSLEEFNDVYLVTHLMGADLNNIVKCQKLTDDHVQFLIYQILRGLKYIHSADIIHRDLKPSNLAVNEDCELKILDFGLARHTDDEMTGYVATRWYRAPEIMLNWMHYNQTVDIWSVGCIMAELLTGRTLFPGTDHIDQLKLILRLVGTPGAELLKKISSESARNYIQSLAQMPKMNFANVFIGANPLAVDLLEKMLVLDSDKRITAAQALAHAYFAQYHDPDDEPVAEPYDQSFESRDFLIDEWKSLTYDEVISFVPPPLDQEEMES

SEQ ID NO: 1281 - DNA, 3679 bp, Homo sapiens
  ref <308>: DATABASE ACCESSION NUMBER: Refseq / NM_139014
  ref <309>: DATABASE ENTRY DATE: 2002-05-20
ggaaccgcgaccactggagccttagcgggcgcagcagctggaacgggagtactgcgacgcagcccggagtcggccttgtaggggcgaaggtgcagggagatcgcggcgggcgcagtcttgagcgccggagcgcgtccctgcccttagcggggcttgccccagtcgcaggggcacatccagccgctgcggctgacagcagccgcgcgcgcgggagtctgcggggtcgcggcagccgcacctgcgcgggcgaccagcgcaaggtccccgcccggctgggcgggcagcaagggccggggagagggtgcgggtgcaggcgggggccccacagggccaccttcttgcccggcggctgccgctggaaaatgtctcaggagaggcccacgttctaccggcaggagctgaacaagacaatctgggaggtgcccgagcgttaccagaacctgtctccagtgggctctggcgcctatggctctgtgtgtgctgcttttgacacaaaaacggggttacgtgtggcagtgaagaagctctccagaccatttcagtccatcattcatgcgaaaagaacctacagagaactgcggttacttaaacatatgaaacatgaaaatgtgattggtctgttggacgtttttacacctgcaaggtctctggaggaattcaatgatgtgtatctggtgacccatctcatgggggcagatctgaacaacattgtgaaatgtcagaagcttacagatgaccatgttcagttccttatctaccaaattctccgaggtctaaagtatatacattcagctgacataattcacagggacctaaaacctagtaatctagctgtgaatgaagactgtgagctgaagattctggattttggactggctcggcacacagatgatgaaatgacaggctacgtggccactaggtggtacagggctcctgagatcatgctgaactggatgcattacaaccagacagttgatatttggtcagtgggatgcataatggccgagctgttgactggaagaacattgtttcctggtacagaccatattgatcagttgaagctcattttaagactcgttggaaccccaggggctgagcttttgaagaaaatctcctcagagtctctgtcgacttgctggagaagatgcttgtattggactcagataagagaattacagcggcccaagcccttgcacatgcctactttgctcagtaccacgatcctgatgatgaaccagtggccgatccttatgatcagtcctttgaaagcagggacctccttatagatgagtggaaaagcctgacctatgatgaagtcatcagctttgtgccaccaccccttgaccaagaagagatggagtcctgagcacctggtttctgttctgttgatcccacttcactgtgaggggaaggccttttcacgggaacctctccaaatattattcaagtgcctcttgttgcagagatttcctccatggtggaagggggtgtgcgtgcgtgtgcgtgcgtgttagtgtgtgtgcatgtgtgtgtctgtctttgtgggagggtaagacaatatgaacaaactatgatcacagtgactttacaggaggttgtggatgctccagggcagcctccaccttgctcttctttctgagagttggctcaggcagacaagagctgctgtccttttaggaatatgttcaatgcaaagtaaaaaaatatgaattgtccccaatcccggtcatgcttttgccactttggcttctcctgtgaccccaccttgacggtggggcgtagacttgacaacatcccacagtggcacggagagaaggcccataccttctggttgcttcagacctgacaccgtccctcagtgatacgtacagccaaaaaggaccaactggcttctgtgcactagcctgtgattaacttgcttagtatggttctcagatcttgacagtatatttgaaactgtaaatatgtttgtgccttaaaaggagagaagaaagtgtagatagttaaaagactgcagctgctgaagttctgagccgggcaagtcgagagggctgttggacagctgcttgtgggcccggagtaatcaggcagccttcataggcggtcatgtgtgcatgtgagcacatgcgtatatgtgcgtctctctttctccctcacccccaggtgttgccatttctctgcttacccttcacctttggtgcagaggtttcttgaatatctgccccagtagtcagaagcaggttcttgatgtcatgtacttcctgtgtactctttatttctagcagagtgaggatgtgttttgcacgtcttgctatttgagcatgcacagctgcttgtcctgctctcttcaggaggccctggtgtcaggcaggtttgccagtgaagacttcttgggtagtttagatcccatgtcacctcagctgatattatggcaagtgatatcacctctcttcagcccctagtgctattctgtgttgaacacaattgatacttcaggtgcttttgatgtgaaaatcatgaaaagaggaacaggtggatgtatagcatttttattcatgccatctgttttcaaccaactatttttgaggaattatcatgggaaaagaccagggcttttcccaggaatatcccaaacttcggaaacaagttattctcttcactcccaataactaatgctaagaaatgctgaaaatcaaagtaaaaaattaaagcccataaggccagaaactccttttgctgtctttctctaaatatgattactttaaaataaaaaagtaacaaggtgtcttttccactcctatggaaaagggtcttcttggcagcttaacattgacttcttggtttggggagaaataaattttgtttcagaattttgtatattgtaggaatccctttgagaatgtgattccttttgatggggagaaagggcaaattattttaatattttgtattttcaactttataaagataaaatatcctcaggggtggagaagtgtcgttttcataacttgctgaatttcaggcattttgttctacatgaggactcatatatttaagccttttgtgtaataagaaagtataaagtcacttccagtgttggctgtgtgacagaatcttgtatttgggccaaggtgtttccatttctcaatcagtgcagtgatacatgtactccagagggacagggtggaccccctgagtcaactggagcaagaaggaaggaggcagactgatggcgattccctctcacccgggactctccccctttcaaggaaagtgaacctttaaagtaaaggcctcatctcctttattgcagttcaaatcctcaccatccacagcaagatgaattttatcagccatgtttggttgtaaatgctcgtgtgatttcctacagaaatactgctctgaatattttgtaataaaggtctttgcacatgtgaccacatacgtgttaggaggctgcatgctctggaagcctggactctaagctggagctcttggaagagctcttcggtttctgagcataatgctcccatctcctgatttctctgaacagaaaacaaaagagagaatgagggaaattgctattttatttgtattcatgaacttggctgtaatcagttatgccgtataggatgtcagacaataccactggttaaaataaagcctatttttcaaattt

SEQ ID NO: 1282 - protein, 307 aa, Homo sapiens
  ref <308>: DATABASE ACCESSION NUMBER: Refseq / NP_620583
  ref <309>: DATABASE ENTRY DATE: 2002-05-20
MSQERPTFYRQELNKTIWEVPERYQNLSPVGSGAYGSVCAAFDTKTGLRVAVKKLSRPFQSIIHAKRTYRELRLLKHMKHENVIGLLDVFTPARSLEEFNDVYLVTHLMGADLNNIVKCQKLTDDHVQFLIYQILRGLKYIHSADIIHRDLKPSNLAVNEDCELKILDFGLARHTDDEMTGYVATRWYRAPEIMLNWMHYNQTVDIWSVGCIMAELLTGRTLFPGTDHIDQLKLILRLVGTPGAELLKKISSESLSTCWRRCLYWTQIRELQRPKPLHMPTLLSTTILMMNQWPILMISPLKAGTSL

SEQ ID NO: 1283 - DNA, 3582 bp, Rattus norvegicus
  ref <308>: DATABASE ACCESSION NUMBER: EMBL / Y09000
  ref <309>: DATABASE ENTRY DATE: 1996-12-22
gttattctccgaggggcccgacagcccccgggagctccaggatgaggagtccggcagctgcctctgggtgcagaagtccaagctgttggtgattgaagtgaagactatttcctgtcattatagccgtcgcgctgcttctcgacagtccatggacatccaggccagctactgggcccgtgggccccagaaccgcacgtgtaggctgcgccccggatcccctgagccgccaccccgccgaccctgggcctccagggtgctgcaggaggcgaccaactggcgggcagggccccccgccgaggtccgagcccgagaacaggagaaaagaaaggcggcgtcgcaggagcgggaggccaaggagaccgagagaaaaaggcgcaaggctggcggggcccgacggagtcccctaggtcagccccgcccagagctccggaacgcccttcgggcggcccaacctacagggtttccagttttctccagaccagagcgcttcgggcaggtggggcgagcgccccgaccatccgcgctcccgcagggtgacccaggggttgcatgggcggggccatggggaggcagaaggccagggcctcctagctacgaggctcacctgctgctgagaggcgctgcaggcacagccccaagacgccgctgggaccggccgccaccctacgtggctccaccttcttatgaaggtccccacaggaccctggggactaagcgaggcccggagctctcccgggcgcccacctcatcagccccagtgccagctaccaccaggacagagggagggcgcacgaagaagaggctggatcctcgaatctaccgggatgttctaggagcttggggtctcagacagggacggggactcttaggaggagctccaggctgtgcagcagccagagctaggccagagtcttgcaaaggggctgtagagaaaagttcaggcctagctgctgctggcctaaacagtggtggtgatggtcattcccaagccaaaactactggtccagtcacggaggtcgctctctctgggtccacgatcagtagcccaccacgtcctgttcccaggtctaggcagcacctcaggggatcaaggaaagggaaagaaggaagtgaggagatgtggcttcccacgtgttggctttcctcccctaaaaagcctccagttaggcatagccagaccctccccagaccctgggctcctggaggcaccgggtggaaagagtccctgggtcaaagagaggggacagagcatgagaccctggaagtctggaaggtgacccgccgtgcccacaccctgccccgcagttcccgaggtcccgctggtagagaaggcatctttgtcattgatgccacatgcgtggtgataaagtcccagtacgttccaacccctcgaacccagcagaggcagctcgcgccctctggggagtcatgcatcgtgagcgacagcctcaggcaacccaaaccctgccttgaggaggagggcaaaggggccgctgccaacccttcagtttgccaaaagcgactgttgagcagtcgagtcttaaacccaccgagtgagggtcgcgagttcgaggctgagggcagacagcagggggattcttcattggaggagcgctcctccagcggtttggggttccctgtcggcgaagtgaacccgcgagatgcccccacgcatccaggtagcccagagcactcgaccttaggcccagcggctccgggatgcgcgggcagcgtgaagggcccagaagcagctggggtcccgcggcgcgcgggcgggggctgggcgcggactccagggccctacgccggagccttgcgggaagccgtgtcccgcatccgccgccacaccgccccagattcggactcagacgaagccgaggatctcagcgcccatagtggctcctctgatggaagcgacacagacgccccaggcgcctcctggcggaatgagaggaccctgcctgcggttgggaacacccggcccagggaaggcgggaagacagctgagctgggcgacagtatcggggagattctagatgtcatcagtcaaaccgaggaaggcctcgtccgagaggacaccaggaaaacgccacagggaaagagagagtgagagtgagcgacgcccctccttgtcctcgtgtcgctcggcccagccagccttgggctcaccgcgctcctttcctctctccaggcttcgtttgcttccttttcttctttcctacctgtacctgttcccttgagacagaggagaggggaggaacgagggaactgactcaagagtcagtttcagggaaagagagggtgggatcccacacctgctacattcggtgtggaactgttcagagaggcaaagtgaagggcagggcagggtccctggcaggagaggaaaagtaacggagaggcttttgaacctagtgacctagtgcaggagacagagggcttttagcagagaagaaatgaatgcagaatgcatacactcaaccagcaaattggcaagagggctctcctagatgttacaactcaagtttcaattccaactctgccactgacttagctggtggatctcagagtgactacttttctgcccgggcatcagggactaatgtaaatgtaaaacgagcgatttctgcctcccattcttttgtccctagaattttgtgaacgagcgagtagaatttgagggttcttacccacttctgccatcctcagttcggaagacagtcagggttttcagatttaaacgggcaaagggcttctattccaatttcccgagtttaggtgaatgctccccaaagcagggcaagataaaggtccggtccactgcctctggcctgctgtgatccaagctggagagggaaggtagccaatgaatcagcttggaacacttttaggcctgcccctttcctccatctccgtgtccttagtgatgctctacgtgttaccggacggcagacggtatggcccaccggatagaccctgactatctctgtgtctctcctggaaaacagccaggcaaggaggaaggttgatcacagcagacggtgtgggtgtgatactcgctgtagccactacggggcgcgcgcaggtcgcggattcccccccggttgctggtgctcgagtgcccctacaccagcactgccagttatctggatcccttatttcccggcgccggtttcccgccttgacacctccaaaccgcgcgcggggccgggagcaggcctccggtctcccagacttctggggcgcgccgagcccttctttgtattaatccacgcctaccggtttgagactgacattcaagtcttttttttttttttctttccttttcctttttctgttttcttttccttctttccaaaccctggggcacttcctgtgtgtctgccacttactagccatgtgaccttggccaaatcacttcacctccctgagcctcagtttcctcatctgttcaaatgggggtttataaacacctacctcgcagggttgttgtgaggatttaatgaggtaatgtatataaagcgtcttgcacagtgcctggcacatagtaggcgcccaataaatctactcgtccctttaaaa

SEQ ID NO: 1284 - DNA, 3628 bp, Homo sapiens
  ref <308>: DATABASE ACCESSION NUMBER: EMBL / AB018292
  ref <309>: DATABASE ENTRY DATE: 1999-09-02
attggtgatagaagtgaagactatttcctgtcattatagtcgccgcgccccttctcgacagcccatggacttccaggccagccactgggctcgcgggttccagaaccgcacgtgtgggccgcgcccgggatccccacagccgccgccccgccggccctgggcctccagggtgctgcaggaggcgaccaactggcgggcggggcccctggccgaggtccgagctcgggagcaagagaaaaggaaagcggcgtcgcaggagcgggaggccaaggagaccgagcgaaaaaggcgcaaggctggtggggcccgacggagccccccgggtcgaccccgcccggagccccgcaacgcccctcgggtggcccagctggcagggctccctgctcccttgcggccggagcgcctggcgcctgtggggcgagcgccccgtccatccgcgcagccgcagagcgacccagggtcggcgtgggcggggccctggggaggtcggcggcccgggcccccaagctacgaggctcacctgctgctgagaggttctgccgggaccgccccacgacgccgctgggaccggccgccaccctacgtggctccaccttcttacgaaggcccccataggaccttggggactaagagaggccccgggaactctcaggtgcccacttcatcagccccagctgcgactccagccaggacagacggagggcgcacaaagaagaggctggatcctcggatctaccgggacgtcctcggggcttggggtctccgacaggggcaaggtctcttggggggatccccaggctgtggagcggccagagcaaggccagagcccggcaagggggtcgtggagaaaagcctggggctggctgctgctgacctgaacagtggtagcgacagccatccccaagccaaagctacagggagcgcaggcaccgagatagctcctgcggggtctgcaactgcggctccctgtgccccgcatcccgctcccagatccaggcaccacctcaagggctcgagggaagggaaagaaggagaacagatctggtttcccaaatgctggattccctcccctaaaaagcagccgccccgccatagccagacactccccagaccctgggctcccggaggcaccggatggagagaatctctgggtcttggagagggggcaggaccggagaccctggagggttggaaggcgacccgccgtgcccacaccttgccccgcagttcccagggcctgtcccgtggggaaggcgtctttgtcattgacgccacgtgcgtagtgatacgatcccaatatgttccaaccccccgaacccagcaggtgcagcttttgccctctggggtgacacgcgtggtgggggattcccccagccaatcgaagcccggcaaggaggagggtgaaggggccacggtctttccttccccttgtcaaaagcggctgtcgagcagtcgccttttacaccagcccggcgggggccgcgggggcgaagctgagggcgggaggccgggggactccacactggaggagcgcactttccgcatcttggggctcccggcccccgaagtaaacctgcgggacgcccccacgcagccaggtagcccagagcaccaagccttaggcccagcagcttcgggagcccagggcagagccgaggggtcggaagtggcggtggtccagcggcgcgccggccggggctgggcgcggaccccagggccctacgccggggccctgcgagaagccgtgtcccgtatccgccgccacacagcccctgactcggacacggacgaagctgaggagctcagcgtccatagcggctcctctgatggaagcgacacagaagccccgggcgcctcctggcggaatgagaggaccctgcccgaggttggaaacagttcgccagaggaagatgggaagacagcggaactgagcgacagtgtcggggagatcctagatgtcataagccaaaccgaggaggtcctcttcggggtgagggacatcagagggacccaacagggaaataggaagaggcagtgagaggccccttcttgtatttgtgtccccaacgcatccatccttgggtccactggtccccattcttccccacagacttcctttgcttctcttttccttgtatctttacccatacctgttctcatccttgaaatataaatgaaaggaagggaagcatatgcccattaatgattttgtttcaggagaggtgagaatgagcagatttaattaatgtctgttatgttcagggcacaagggtgagctcttcgcaggggctgatgcactgggtgtggagctgagcagagaggcctaaccaggatcaggcaggagggcagggatggtggcagccataggagggcagggtagggtagggcctctgaggaggagggaaaaagtgaaggagaggctttggacctggtgacagagtgatcagatgacagaggggttcttgggagaagaggcataggtccagcaacaaccaacaaagcagaaggagggctcaccttggtgtcacaagtcttggatttcaatcccaactctgccactgagttgctggttgactgaggccagtcactttccctctccaggcctccaggcctcctggtatataaaatgatggtattctaaggtccatccttccgtctctgacattttgagatctttggaaaggactctatctcatcctcccctcgacaagccaagaatgagaattgggaataagtgaacagagtttgagggtttctgggcggcctccgtgtcacccaaagtcatgatcaattcaggagactgcccaaggcttgcagaagaggtaagggagtgaggcactcctatcccagtctcccaggtttggttgagggctccccaaggcagggcaagatagcggccctgtcactgaccctggcctgtggtggtctgagctggggagggaaggacaccaatgaatcagcttgggacctctttaggccttccccttttcctccaccccgatgctccttagtgatgctctgaggcgtggccacgatctccctcccaggtggtatcgcccacctgaaaaaatcctgagaatttctcccatcttggcctcttccagaaaccggccaggcaaggaaagaggccggtcaccagaagccagcaggcgtggggtgtgatactctctatagccactacagggcgcgcgcaggtcgcggatctccccagttgctaatcccggctctgccactcaatcctatccctagttcccgagcgcgggtcccccgccttgcagtctccagccgtgcggggccgggagcaggcctccggcctcccagacttctagagcccgccgggcccatctttgtactcatccaccccagccggcttgggactcagacaccgaagtctttttttttttctctccgatccttggacacctcctctgtctgccatttattagccatgtgaacttggccacatcacttcacctccctgagcctcagtttcctcatctgtcaaatgggggtttataaacacctacctcgcagggttgttgtgaggatttaatgcgataatgtatgtaaagcgccttgcacactgcctggcacacagtaggcgctcaataaatctaagcttcccttt

SEQ ID NO: 1285 - protein, 657 aa, Homo sapiens
MDFQASHWARGFQNRTCGPRPGSPQPPPRRPWASRVLQEATNWRAGPLAEVRAREQEKRKAASQEREAKETERKRRKAGGARRSPPGRPRPEPRNAPRVAQLAGLPAPLRPERLAPVGRAPRPSAQPQSDPGSAWAGPWGGRRPGPPSYEAHLLLRGSAGTAPRRRWDRPPPYVAPPSYEGPHRTLGTKRGPGNSQVPTSSAPAATPARTDGGRTKKRLDPRIYRDVLGAWGLRQGQGLLGGSPGCGAARARPEPGKGVVEKSLGLAAADLNSGSDSHPQAKATGSAGTEIAPAGSATAAPCAPHPAPRSRHHLKGSREGKEGEQIWFPKCWIPSPKKQPPRHSQTLPRPWAPGGTGWRESLGLGEGAGPETLEGWKATRRAHTLPRSSQGLSRGEGVFVIDATCVVIRSQYVPTPRTQQVQLLPSGVTRVVGDSPSQSKPGKEEGEGATVFPSPCQKRLSSSRLLHQPGGGRGGEAEGGRPGDSTLEERTFRILGLPAPEVNLRDAPTQPGSPEHQALGPAASGAQGRAEGSEVAVVQRRAGRGWARTPGPYAGALREAVSRIRRHTAPDSDTDEAEELSVHSGSSDGSDTEAPGASWRNERTLPEVGNSSPEEDGKTAELSDSVGEILDVISQTEEVLFGVRDIRGTQQGNRKRQ

SEQ ID NO: 1286 - DNA, 3112 bp, Rattus norvegicus
  ref <308>: DATABASE ACCESSION NUMBER: Refseq / NM_012551
  ref <309>: DATABASE ENTRY DATE: 2002-11-05
cgcagaacttggggagccgccgccgcgattcgccgccgccgccagcttccgccgccgcaagatcggcccctgccccagcctccgcggcagccctgcgtccaccacgggccgcggccaccgccagcctgggggcccacctacactccccgcagtgtgcccctgcaccccgcatgtaacccggccaacatccggcgagtgtgccctcagtagcttcggccccgggctgcgcccaccacccaacatcagctctccagctcgcacgtccgggatggcagcggccaaggccgagatgcaattgatgtctccgctgcagatctctgacccgttcggctcctttcctcactcacccaccatggacaactaccccaaactggaggagatgatgctgctgagcaacggggctccccagttcctcggtgctgccggaaccccagagggcagcggcggcaataacagcagcagcagcagcagcagcagcagcgggggcggtggtgggggcggcagcaacagcggcagcagcgctttcaatcctcaaggggagccgagcgaacaaccctacgagcacctgaccacagagtccttttctgacatcgctctgaataacgagaaggcgctggtggagacaagttatcccagccaaactacccggttgcctcccatcacctatactggccgcttctccctggagcctgcacccaacagtggcaacactttgtggcctgaaccccttttcagcctagtcagtggccttgtgagcatgaccaaccctccaacctcttcatcctcagcgccttctccagctgcttcatcgtcttcctctgcctcccagagcccacccctgagctgtgccgtgccgtccaacgacagcagtcccatttactcagctgcacccacctttcctactcccaacactgacatttttcctgagccccaaagccaggcctttcctggctctgcaggcacagccttgcagtacccgcctcctgcctaccctgccaccaagggtggtttccaggttcccatgatccctgactatctgtttccacaacaacagggagacctgagcctgggcaccccagaccagaagcccttccagggtctggagaaccgtacccagcagccttcgctcactccactatccactatcaaagccttcgccactcagtcgggctcccaggacttaaaggctcttaataacacctaccagtcccaactcatcaaacccagccgcatgcgcaagtaccccaaccggcccagcaagacacccccccatgaacgcccgtatgcttgccctgttgagtcctgcgatcgccgcttttctcgctcggatgagcttacacgccacatccgcatccatacaggccagaagcccttccagtgtcgaatctgcatgcgtaatttcagtcgtagtgaccaccttaccacccacatccgcacccacacaggcgagaagccttttgcctgtgacatttgtgggagaaagtttgccaggagtgatgaacgcaagaggcataccaaaatccacttaagacagaaggacaagaaagcagacaaaagtgtcgtggcctcctcagctgcctcttccctctcttcctacccatccccagtggctacctcctacccatcccccgccaccacctcatttccatccccagtgcccacctcttactcctctccgggctcctctacctacccgtctcctgcacacagtggcttcccatcgccctcggtggccaccacctatgcctccgtcccacctgctttccctgcccaggtcagcaccttccagtctgcaggggtcagcaactccttcagcacctcaacgggtctttcagacatgacagcaaccttttctcctaggacaattgaaatttgctaaagggaatgaaagagagcaaagggaggggagcgcgagagacaataaaggacaggagggaagaaatggcccgcaagaggggctgcctcttaggtcagatggaagatctcagagccaagtccttctagtcagtagaaggcccgttggccaccagccctttcacttagcgtccctgccctccccagtcccggtccttttgacttcagctgcctgaaacagccacgtccaagttcttcacctctatccaaaggacttgatttgcatggtattggataaaccatttcagcatcatctccaccacatgcctggcccttgctcccttcagcactagaacatcaagttggctgaaaaaaaaaatgggtctgggccctcagaaccctgccctgtatctttgtacagcatctgtgccatggattttgttttccttggggtattcttgatgtgaagataatttgcatactctattgtactatttggagttaaattctcactttgggggagggggagcaaagccaagcaaaccaatggtgatcctctattttgtgatgatcctgctgtgacattaggtttgaaacttttttttttttttgaagcagcagtcctaggtattaactggagcatgtgtcagagtgttgttccgttaattttgtaaatactgctcgactgtaactctcacatgtgacaaaatacggtttgtttggttgggttttttgttgtttttgaaaaaaaaattttttttttgcccgtccctttggtttcaaaagtttcacgtcttggtgcctttgtgtgacacaccttgccgatggctggacatgtgcaatcgtgaggggacacgctcacctctagccttaagggggtaggagtgatgtttcaggggaggctttagagcacgatgaggaagagggctgagctgagctttggttctccagaatgtaagaagaaaaatttaaaacaaaaatctgaactctcaaaagtctatttttttaactgaaaatgtagatttatccatgttcgggagttggaatgctgcggttacctactgagtaggcggtgacttttgtatgctatgaacatgaagttcattattttgtggttttattttacttcgtacttgtgtttgcttaaacaaagtgacttgtttggcttataaacacattgaatgcgctttactgcccatgggatatgtggtgtgtatccttcagaaaaattaaaaggaaaataaagaaactaactggt

SEQ ID NO: 1287 - protein, 508 aa, Rattus norvegicus
  ref <308>: DATABASE ACCESSION NUMBER: Refseq / NP_036683
  ref <309>: DATABASE ENTRY DATE: 2002-11-05
MDNYPKLEEMMLLSNGAPQFLGAAGTPEGSGGNNSSSSSSSSSGGGGGGGSNSGSSAFNPQGEPSEQPYEHLTTESFSDIALNNEKALVETSYPSQTTRLPPITYTGRFSLEPAPNSGNTLWPEPLFSLVSGLVSMTNPPTSSSSAPSPAASSSSSASQSPPLSCAVPSNDSSPIYSAAPTFPTPNTDIFPEPQSQAFPGSAGTALQYPPPAYPATKGGFQVPMIPDYLFPQQQGDLSLGTPDQKPFQGLENRTQQPSLTPLSTIKAFATQSGSQDLKALNNTYQSQLIKPSRMRKYPNRPSKTPPHERPYACPVESCDRRFSRSDELTRHIRIHTGQKPFQCRICMRNFSRSDHLTTHIRTHTGEKPFACDICGRKFARSDERKRHTKIHLRQKDKKADKSVVASSAASSLSSYPSPVATSYPSPATTSFPSPVPTSYSSPGSSTYPSPAHSGFPSPSVATTYASVPPAFPAQVSTFQSAGVSNSFSTSTGLSDMTATFSPRTIEIC

SEQ ID NO: 1288 - DNA, 848 bp, Rattus norvegicus
  ref <308>: DATABASE ACCESSION NUMBER: Refseq / NM_021598
  ref <309>: DATABASE ENTRY DATE: 2003-01-14
tcctgaagaggatgttcctgttcctgttcttcctggtggccatcctaccagtcaacactgaaggaggagagatcatatggggtacagagtccaaaccccactcccggccctacatggcatccttaatgttttattatggtaattcatatcgccattactgtggtggtttcctggtggcaaaagacatcgtaatgacagcagctcactgtaatggaagtaatataaaagtaaccttaggtgctcacaatatcaagaaacaagaaaaaacccaggtcatcgctgttgtaaaagccaaacctcacgagaactatgacagacattcacggtttaatgacatcatgctcctgaagttggaacgcaaagctcaactcaatggtgctgtgaagacgattgcccttcctaggagccaggactgggtgaaacctgggcaggtgtgcacagtggcaggttggggatgcttggccaattgtagtttgtctaacacacttcaagaagtgaatctagaagttcaggaaggccagaagtgtgaagacatgtccagaaactacaacgactccatccagctttgtgtgggaaaccccagcgaggggaaggctactggtaagggagactcagggggtccctttgtgtgcgatggagtggcccagggcattgtcagttatcgcttgtgtactgggacacttcctcgagtattcaccagaatctccagctttataccgtggattcagaaaacaatgaaactccttcaacaatcctagaacacaaaacctgtgtctgggccaatgtccagcatcctggggtatggctatctgagtcttaataaagaaatctgtctgcagtaaaaaaaa

SEQ ID NO: 1289 - protein, 248 aa, Rattus norvegicus
  ref <308>: DATABASE ACCESSION NUMBER: Refseq / NP_067609
  ref <309>: DATABASE ENTRY DATE: 2003-01-14
MFLFLFFLVAILPVNTEGGEIIWGTESKPHSRPYMASLMFYYGNSYRHYCGGFLVAKDIVMTAAHCNGSNIKVTLGAHNIKKQEKTQVIAVVKAKPHENYDRHSRFNDIMLLKLERKAQLNGAVKTIALPRSQDWVKPGQVCTVAGWGCLANCSLSNTLQEVNLEVQEGQKCEDMSRNYNDSIQLCVGNPSEGKATGKGDSGGPFVCDGVAQGIVSYRLCTGTLPRVFTRISSFIPWIQKTMKLLQQS

SEQ ID NO: 1290 - DNA, 610 bp, Rattus norvegicus
  ref <308>: DATABASE ACCESSION NUMBER: EMBL / AA800739
  ref <309>: DATABASE ENTRY DATE: 2000-03-03
tattagaggaaatatctaatggctgtcttatacaaatatcagtttcccaggggcagaacaagatttatctgtgttcgaagttccaggatagatagcaagaggcactgtgctcaaaagtatttgtagtatgaaagggccatcataaatacaaaactgttatcttcggtttctactcacagttgacttaacaattctccgtcccgatgaaaggaaaacagtgtatgaagaatccccaagtagattccaaccgaagccacctggtatttttggagctggtgctcaatgcctcagcttatgcagcacactcagggtatggcagaggcagttaagaaaatgagtcaaatttagcatctcagtactacagtgcgctttgcagaccttcggactatttttcctagccaaagtacaggggaattcagacaagagccaccgctgcagaccactatcccattagtgcaaactctggttcagatactgaagaaacatgttggccaattgaggcaggttctcattgttgggatgcattttagtgtaggaaataaactggcgacggaggcgactcaattctgccaaggtcaagggacgggtaaatcggaggtgctccgtggtg

SEQ ID NO: 1291 - DNA, 1693 bp, Homo sapiens
  ref <308>: DATABASE ACCESSION NUMBER: Refseq / NM_138417
  ref <309>: DATABASE ENTRY DATE: 2002-04-04
aatggtcgctccctgagaggatgccgctcgtggtgttttgcgggctgccgtacagcggcaagagccggcgtgctgaagagttgcgcgtggcgctggctgccgagggccgcgcggtgtacgtggtggacgacgcagctgtcctgggcgcagaggacccagcggtgtacggcgattctgcccgtgagaaggcattgcgtggagctctgcgagcctccgtggaacggcgcctgagtcgccacgacgtggtcatcctggactcgcttaactacatcaaaggtttccgttacgagctctactgcctggcacgggcggcgcgcaccccgctctgcctggtctactgcgtacggcccggcggcccgatcgcgggacctcaggtggcgggcgcgaacgagaaccctggccggaacgtcagtgtgagttggcggccacgcgctgaggaggacgggagagcccaggcggcgggcagcagcgtcctcagggaactgcatactgcggactctgtagtaaatggaagtgcccaggccgacgtacccaaggaattggagcgagaagaatccggggctgcggagtctccagctcttgtgactccggattcagagaaatctgcaaagcatgggtccggtgccttttactctcccgaactcctggaggccctaacgctgcgctttgaggctcccgattctcggaatcgctgggaccggcctttattcactttggtgggcctagaggagccgttgcccctggcggggatccgctctgccctgtttgagaaccgggccccaccaccccatcagtctacgcagtcccagcccctcgcctccggcagctttctgcaccagttggaccaggtcacgagtcaagtactggccggattgatggaagcgcagaagagcgctgtccccggggacttgctcacgcttcctggtaccacagagcacttgcggtttacccggcccttgaccatggcagaactgagtcgccttcgtcgccagtttatttcgtacactaaaatgcatcccaacaatgagaacttgccgcaactggccaacatgtttcttcagtatttgagccagagcctgcactgaccagaggaggtaggggggaagccatggcttctgatctccactccactttatttctctgggaaaaataggctgcaggtctccagagcatatcgatgcagtactgtactagagctgttgtgactgattcactcaaactttcctgcatacccctgtgccaggccttgggtttacagcataagttcagactaaagagaatggagaactattgtggtgcaacctggcaaatccctcagaggacagagctaaggtggacagggattacctagattggatcctacttgggctatcacagagcattgaccattggcttccctcatctgaggcgtgggagagcagactggatagatgagaattgttttaaaacaattgtgaacagaaactgaagatggtacagttctacatctgcacctgcccttttttcataccacaaaagtattttttgagtactgtactgactttttgctagtttctattctgggaccgagttcacagataaatccattggtttgtatccttgagaaactttgtttttgtggaagtaagaaagttatctactagattatttcctctaataaaatcttttaaaatagtcaaaaaaaaaaaaaaaa

SEQ ID NO: 1292 - protein, 354 aa, Homo sapiens
  ref <308>: DATABASE ACCESSION NUMBER: Refseq / NP_612426
  ref <309>: DATABASE ENTRY DATE: 2002-04-04
MPLVVFCGLPYSGKSRRAEELRVALAAEGRAVYVVDDAAVLGAEDPAVYGDSAREKALRGALRASVERRLSRHDVVILDSLNYIKGFRYELYCLARAARTPLCLVYCVRPGGPIAGPQVAGANENPGRNVSVSWRPRAEEDGRAQAAGSSVLRELHTADSVVNGSAQADVPKELEREESGAAESPALVTPDSEKSAKHGSGAFYSPELLEALTLRFEAPDSRNRWDRPLFTLVGLEEPLPLAGIRSALFENRAPPPHQSTQSQPLASGSFLHQLDQVTSQVLAGLMEAQKSAVPGDLLTLPGTTEHLRFTRPLTMAELSRLRRQFISYTKMHPNNENLPQLANMFLQYLSQSLH

SEQ ID NO: 1293 - DNA, 453 bp, Rattus norvegicus
  ref <308>: DATABASE ACCESSION NUMBER: EMBL / AA799494
  ref <309>: DATABASE ENTRY DATE: 2000-03-03
aagagtttatagaaattctttattattacacaaaaatagactctctcttccctctgtttatgtgaccccactctggtctctgtttagaggggaggcaggaagctcccaagcctctcccctctccctccatgatgggccctgcaagctgggtggagctggcagggtcattcccctccagggctccacttactgatgcctcctcacccctcacacctgtctctgccatccgctcacgtgccaggtcatctcaggggcccattcattagcttagcagtcaaagggcaggaaagagcagtggccccactgctgccactctttctcataggggccaggccagggtagtgagggctgtgatgctgggagggtgcagtgttgatgtggacttggagctggtggcttcattttctctggcccagtagaactttggtgatgaaggtgacaatggcacttgca

SEQ ID NO: 1294 - DNA, 5009 bp, Homo sapiens
gggggagcaaaagatcacaggctgacactcccagcagggtagatcctgggaatctgatctcctggcctcccccacatcctcccccctccacttcctggagcagcgacctgcccccttcccgcctgcacttccctccacttccagggccgggcttctcctcacaccagccagacagcctaccctccgcccaggggaagcggctgcctccgccaggccgcttccaggaagccccgggccaggccccagcattgttcaggccctggggccagcaccccagccagccgaacaccatgaagtccagcggccctgtggagaggctgctcagagccctggggaggagggacagcagccgggccgcaagcaggcctaggaaagctgagcctcatagcttccgggagaaggttttccggaagaaacctccagtctgtgcagtatgtaaggtgaccatcgatgggacaggcgtttcgtgcagagtctgcaaggtggcgacgcacagaaaatgtgaagcaaaggtgacttcagcctgtcaggccttgcctcccgtggagttgcggcgaaacacggccccagtcaggcgcatagagcacctgggatccaccaaatctctgaaccactcaaagcagcgcagcactctgcccaggagcttcagcctggacccgctcatggagcggcgctgggacttagacctcacctacgtgacggagcgcatcttggccgccgccttccccgcgcggcccgatgaacagcggcaccggggccacctgcgcgagctggcccatgtgctgcaatccaagcaccgggacaagtacctgctcttcaacctttcagagaaaaggcatgacctgacccgcttaaaccccaaggttcaagacttcggctggcctgagctgcatgctccacccctggacaagctgtgctccatctgcaaagccatggagacatggctcagtgctgacccacagcacgtggtcgtactatactgcaagggaaacaagggcaagcttggggtcatcgtttctgcctacatgcactacagcaagatctctgcaggggcggaccaggcactggccactcttaccatgcggaaattctgcgaggacaaggtggccacagaactgcagccctcccagcgtcgatatatcagctacttcagtgggctgctatctggctccatcagaatgaacagcagccctctcttcctgcactatgtgctcatccccatgctgccagcctttgaacctggcacaggcttccagcccttccttaaaatctaccagtccatgcagcttgtctacacatctggagtctatcacattgcaggccctggtccccagcagctttgcatcagcctggagccagccctcctcctcaaaggcgatgtcatggtaacatgttatcacaagggtggccggggcacagaccggaccctcgtgttccgagtccagttccacacctgcaccatccacggaccacagctcactttccccaaggaccagcttgacgaggcctggactgatgagaggttccccttccaagcctccgtggagtttgtcttctcctccagccccgagaagatcaaaggcagcactccacggaacgacccctcggtctctgtcgactacaacaccactgagccagccgtgcgctgggactcctatgagaacttcaaccagcaccacgaggacagtgtggatggctccttgacccacacccggggtcccctggatggcagtccttatgcccaggtgcagcggcctccccggcagacccccccggcaccctctccagagcctccaccaccccccatgctctctgtcagcagcgactcaggccattcctccacgctgaccacagagccggctgctgagtcccctggccggccgccccctacagctgctgaacggcaggagctggatcgcctcctaggaggctgcggagtggccagtgggggccggggagctgggcgcgagacggccatcctagatgacgaagagcagcccactgtgggcggaggcccccacctcggagtgtatccaggccataggcctggcctcagccgccactgctcctgccgccagggctaccgggagccctgcggggttcccaatgggggctactaccggccagagggaaccctggagaggaggcgactggcctacgggggctatgagggatccccccagggctacgccgaggcctcgatggagaagaggcgcctctgccgatcgctgtcagaggggctatacccctacccacctgagatggggaaaccagccactggggactttggctaccgcgccccaggctaccgggaggtggtcatcctggaggaccctgggctgcctgccctatacccatgcccagcctgcgaggagaagctggcgctgcctacagcagccttgtatggactgcggctggagagggaggctggagaagggtgggcaagtgaggctggcaagcctctcctgcacccagtgcggcctgggcacccgctgcctctgctcttgcctgcctgtgggcatcaccatgccccgatgcctgactacagctgcctgaagccacccaaggcaggcgaggaagggcacgagggctgctcctacaccatgtgccccgaaggcaggtatgggcatccagggtaccctgccctggtgacatacagctatggaggagcagttcccagttactgcccagcatatggccgtgtgcctcatagctgtggctctccaggagagggcagagggtatcccagccctggtgcccactccccacgggctggctccatttccccgggcagcccgccctatccacaatctaggaagctgagctacgagatccctacggaggagggaggggacaggtacccattgcctgggcacctggcctcagcaggacctttggcatctgcagagtcgctggagccggtgtcctggagggagggccccagtgggcacagcacactgcctcggtctccccgagatgccccatgcagtgcttcgtcagagttgtctggtccctccacgcccctgcacaccagcagtccagtccagggcaaggaaagcacccggcgacaggacaccaggtcccccacctcagcgcccactcagagactgagtcctggcgaggccttgccccctgtttcccaggcaggcaccggaaaggcccctgagctgccgtcgggaagtgggcctgagcctctggcccctagcccagtctctccgaccttccctcccagctcgcccagtgactggcctcaggaaaggagtccagggggccactcagatggcgccagtcctcggagccctgtgcccaccacacttcctggcctccgccacgccccctggcaaggccctcgaggcccccccgacagcccagatgggtctcccctcactcctgtgccttcccagatgccctggcttgtggccagcccagagccgcctcagagctcacctacacctgctttccccctggctgcctcctatgacaccaatggccttagccagcccccacttcctgagaaacgccacctgcccgggccggggcaacagccaggaccctggggcccagagcaggcatcatcgccagccagaggcatcagtcaccatgtcaccttcgcacctctgctctcagataatgtcccccaaaccccagagcctcctacacaagagagccaaagcaatgtcaagtttgtccaggatacatccaagttctggtacaagccacacctgtcccgtgaccaagccattgccctgctgaaggacaaggaccctggggccttcctgatcagggacagtcattcattccaaggagcttatgggctggccctcaaggtggccacaccgccacccagtgcccagccctggaaaggggaccccgtggaacagctggtccgccatttcctcatcgagactgggcccaaaggggtgaagatcaagggctgccccagtgagccctactttggcagcctgtccgccttggtctcccagcactccatctcccccatctccctgccctgctgcctgcgcattcccagcaaagatcctctggaagagaccccagaggctccagtgcccaccaacatgagcacagcggcagacctcctgcgtcagggtgctgcctgcagcgtgctctacttgacctcagtggagacagagtcactgacgggcccccaagctgtggcccgggccagctctgcagctctgagctgtagcccccgcccgacaccagctgttgtccacttcaaggtgtcagcccagggcattacactgacggacaaccaaaggaagctcttctttcgccgccattatccagtgaacagcatcaccttctccagcactgaccctcaagaccggagatggaccaacccagacgggaccacctccaagatctttggtttcgtggccaagaagccgggaagcccctgggagaatgtgtgtcacctctttgcagagcttgacccagatcagcctgctggcgccattgtcaccttcatcaccaaagttctactgggccagagaaaatgaaggaaggccacaagctcagagcccacatcaacactgcccccctcccagcaccccacagccctcacatcccctggcctggacccaggagacccaggagaaagcaccctcccttaggaatgaggagtgggcatcaggcctgggacactgctctccttccccgcccccagcctgctaagttaagtggacaggcccacaagatgaccttgcatgtgagcagatggcagagatgggtgtgtgaggggtgaggaggcatcagcagttgagccccgaaggagatcaggcagccccacctgcaggagaacgtcagccctccaggggatcagcccctgccagttccacccagctgcaggtgccagcacggcagggatgggagaggggtggggagcgagtcactgcctcctctgagcagagattcagagtaggatcacatgaataggggaaaaaagagagtctatttttgtctaataataaagaatttctataaacttt

SEQ ID NO: 1295 - protein, 1409 aa, Homo sapiens
MKSSGPVERLLRALGRRDSSRAASRPRKAEPHSFREKVFRKKPPVCAVCKVTIDGTGVSCRVCKVATHRKCEAKVTSACQALPPVELRRNTAPVRRIEHLGSTKSLNHSKQRSTLPRSFSLDPLMERRWDLDLTYVTERILAAAFPARPDEQRHRGHLRELAHVLQSKHRDKYLLFNLSEKRHDLTRLNPKVQDFGWPELHAPPLDKLCSICKAMETWLSADPQHVVVLYCKGNKGKLGVIVSAYMHYSKISAGADQALATLTMRKFCEDKVATELQPSQRRYISYFSGLLSGSIRMNSSPLFLHYVLIPMLPAFEPGTGFQPFLKIYQSMQLVYTSGVYHIAGPGPQQLCISLEPALLLKGDVMVTCYHKGGRGTDRTLVFRVQFHTCTIHGPQLTFPKDQLDEAWTDERFPFQASVEFVFSSSPEKIKGSTPRNDPSVSVDYNTTEPAVRWDSYENFNQHHEDSVDGSLTHTRGPLDGSPYAQVQRPPRQTPPAPSPEPPPPPMLSVSSDSGHSSTLTTEPAAESPGRPPPTAAERQELDRLLGGCGVASGGRGAGRETAILDDEEQPTVGGGPHLGVYPGHRPGLSRHCSCRQGYREPCGVPNGGYYRPEGTLERRRLAYGGYEGSPQGYAEASMEKRRLCRSLSEGLYPYPPEMGKPATGDFGYRAPGYREVVILEDPGLPALYPCPACEEKLALPTAALYGLRLEREAGEGWASEAGKPLLHPVRPGHPLPLLLPACGHHHAPMPDYSCLKPPKAGEEGHEGCSYTMCPEGRYGHPGYPALVTYSYGGAVPSYCPAYGRVPHSCGSPGEGRGYPSPGAHSPRAGSISPGSPPYPQSRKLSYEIPTEEGGDRYPLPGHLASAGPLASAESLEPVSWREGPSGHSTLPRSPRDAPCSASSELSGPSTPLHTSSPVQGKESTRRQDTRSPTSAPTQRLSPGEALPPVSQAGTGKAPELPSGSGPEPLAPSPVSPTFPPSSPSDWPQERSPGGHSDGASPRSPVPTTLPGLRHAPWQGPRGPPDSPDGSPLTPVPSQMPWLVASPEPPQSSPTPAFPLAASYDTNGLSQPPLPEKRHLPGPGQQPGPWGPEQASSPARGISHHVTFAPLLSDNVPQTPEPPTQESQSNVKFVQDTSKFWYKPHLSRDQAIALLKDKDPGAFLIRDSHSFQGAYGLALKVATPPPSAQPWKGDPVEQLVRHFLIETGPKGVKIKGCPSEPYFGSLSALVSQHSISPISLPCCLRIPSKDPLEETPEAPVPTNMSTAADLLRQGAACSVLYLTSVETESLTGPQAVARASSAALSCSPRPTPAVVHFKVSAQGITLTDNQRKLFFRRHYPVNSITFSSTDPQDRRWTNPDGTTSKIFGFVAKKPGSPWENVCHLFAELDPDQPAGAIVTFITKVLLGQRK

SEQ ID NO: 1296 - DNA, 3607 bp, Rattus norvegicus
  ref <308>: DATABASE ACCESSION NUMBER: Refseq / NM_053986
  ref <309>: DATABASE ENTRY DATE: 2003-01-13
gtcggctgagcggcgccggatccctggcaaaactgtggcacgaaccccgcatcgggtcggacccgcgttccccaggcgccggccagcgagcagcacgcgaggcgagcggcagagcggttgccgggcgagctggaaaccatggccaagaaggaggtaaaatcctcacttctggacaatatgatcggcgttggagatacggttctcttggagcctctcaacgaggagacgttcatcgacaacctgaagaagcgcttcgatcacaatgagatatatacatacatcgggagtgtggttatatctgttaacccctaccggtccttgcccatttattcaccagagaaagtggaagattacagaaatagaaacttctatgaactgagccctcacatctttgctttgtcggatgaagcatacagatccctccgtgatcaagataaagatcagtgcattctcattactggggagagtggagcgggaaaaacagaggccagcaagcttgtgatgtcctatgtcgctgcagtgtgtggaaaaggagcagaagttaatcaggtcaaggaacagcttctccagtccacccctgtcctggaagcttttggaaatgccaagactgtaaggaatgacaattcatccagattcggcaaatacatggatattgaatttgactttaaaggcgatccgctgggaggagtgataagtaactatcttttagagaaatctcgtgttgttaagcagccgagaggtgaaagaaacttccacgtgttctatcagctgctctcgggtgcctctgaggaactcctccacaagcttaaactggagcgggatttcagcagatacaactatctgagtctggactctgccaaagtgaatggtgtggacgacgctgccaatttcagaactgtcaggaatgccatgcagatcgtgggcttttcggatcctgaggccgagtctgtcctggaggttgtggcagctgtcttgaaactggggaacatcgagttcaagcctgaatcacgaatgaacggtttggatgaaagcaaaatcaaagacaaaaatgagttaaaagaaatttgtgagttgaccagcatcgatcaagtggttttagaaagagcgttcagtttccgaacggttgaggcgaagcaggagaaagtttcaaccacattgaatgtggctcaggcttattatgcccgtgatgccctggctaaaaacctctacagccggttgttttcatggttggtaaatcgaatcaacgaaagcattaaggcacaaaccaaagtgagaaagaaggtcatgggtgttctggacatttatggctttgagatatttgaggacaacagcttcgagcagttcattattaattattgtaatgaaaagcttcaacaaatcttcattgaactgaccctcaaagaagagcaagaggaatatattcgtgaggacatagaatggactcacattgactacttcaacaatgctatcatttgcgacctaatagaaaacaacacaaacggaatcttggccatgctggatgaagagtgcctgagacccggcactgttacagatgagaccttcctggaaaagctgaaccaagtctgtgccacccaccagcacttcgagagcaggatgagcaaatgttcccgcttcctcaatgacacgaccctgcctcacagctgcttcagaatccagcattatgctggcaaggtgctataccaggtggaagggtttgttgacaagaacaatgaccttctgtaccgagacctgtctcaagccatgtggaaggctggccatgccctcatcaagtctctgttccctgaagggaatcctgcaaaggtcaacctgaaaagacctcctactgcagggtcccagttcaaggcgtcggtggccaccctgatgaaaaacctgcagaccaagaacccgaactatatcaggtgcatcaagccgaacgataaaaaggccgctcacattttcagtgagagtctcgtgtgccatcagatccggtacctgggtcttctggagaacgttcgagtgagacgggcaggctatgccttcaggcaggcctatgaaccttgtctggaaagatacaagatgctttgcaaacaaacatggcctcactggaagggaccagcaaggtctggtgtggaagttctgtttaatgagctagagattcccgtggaagagtactccttcggtagatccaagatattcatccgaaacccaaggacattattccaattagaagacctaaggaagcagcggctggaggacctggccactctcattcagaagatttatcgaggatggaaatgtcgtacacattttctgctcatgaaaagaagccaagtcgtgattgccgcctggtacaggagatacgcgcaacaaaagcgatatcagcagataaagagttcagccctggtgattcagtcttacatccggggctggaaggctagaaaaatcctgcgggagctgaagcatcagaaacgctgcaaggaggcagccaccaccatcgcagcatactggcacggcacccaggcgcgaaaggagcggaggcggctgaaggacgaggctaggaataagcacgctattgcagttatttgggctttctggcttggatcgaaggcacgaagggaattgaaacgcttgaaggaggaggctaggcgtaagcatgcagttgctgtcatttgggcttactggcttggactgaaggtacgaagggagtacaggaaattctttagagcaaatgctggaaagaaaatctatgagtttacacttcaaagaattgtgcaaaaatacttgttggaaatgaaaaataaaatgccttccttgtcaccaatagataaaaattggccatcaagaccttacctattcttggattcgactcacaaggagctaaaaaggatcttccacttgtggaggtgtaaaaaatacagggatcaattcacagaccagcagaaacttatttatgaagagaagctggaggccagtgaactcttcaaagacaagaaggctttatatccttctagtgttggtcagccattccaaggagcttacctggaaatcaacaagaacccaaaatataagaaactcaaagatgccattgaagagaagatcattattgctgaggttgtgaacaaaatcaaccgggctaatgggaagagtacatctcggattttcctcttaacaaacaataaccttctccttgctgaccaaaagtcggggcagatcaagtccgaggtccccctggtggatgtgactaaggtctccatgagttcacagaatgatggtttctttgcagtacacctcaaggagggttcagaagcagctagtaagggtgactttctcttcagcagtgaccacctgattgaaatggcaaccaagttgtatcgcacgactcttagccaaactaaacagaagctcaatatcgagatttccgatgagttcctggtacagttcagacaggacaaagtatgtgtgaagtttattcaaggcaaccagaaaaacgggagcgtgccaacctgcaaacgaaagaacaacaggcttcttgaagtcgctgtcccttaagtgaggcctcctctctgttctcacggacttgtttcctcgtaacagtgcaattttactt

SEQ ID NO: 1297 - protein, 1136 aa, Rattus norvegicus
  ref <308>: DATABASE ACCESSION NUMBER: Refseq / NP_446438
  ref <309>: DATABASE ENTRY DATE: 2003-01-13
MAKKEVKSSLLDNMIGVGDTVLLEPLNEETFIDNLKKRFDHNEIYTYIGSVVISVNPYRSLPIYSPEKVEDYRNRNFYELSPHIFALSDEAYRSLRDQDKDQCILITGESGAGKTEASKLVMSYVAAVCGKGAEVNQVKEQLLQSTPVLEAFGNAKTVRNDNSSRFGKYMDIEFDFKGDPLGGVISNYLLEKSRVVKQPRGERNFHVFYQLLSGASEELLHKLKLERDFSRYNYLSLDSAKVNGVDDAANFRTVRNAMQIVGFSDPEAESVLEVVAAVLKLGNIEFKPESRMNGLDESKIKDKNELKEICELTSIDQVVLERAFSFRTVEAKQEKVSTTLNVAQAYYARDALAKNLYSRLFSWLVNRINESIKAQTKVRKKVMGVLDIYGFEIFEDNSFEQFIINYCNEKLQQIFIELTLKEEQEEYIREDIEWTHIDYFNNAIICDLIENNTNGILAMLDEECLRPGTVTDETFLEKLNQVCATHQHFESRMSKCSRFLNDTTLPHSCFRIQHYAGKVLYQVEGFVDKNNDLLYRDLSQAMWKAGHALIKSLFPEGNPAKVNLKRPPTAGSQFKASVATLMKNLQTKNPNYIRCIKPNDKKAAHIFSESLVCHQIRYLGLLENVRVRRAGYAFRQAYEPCLERYKMLCKQTWPHWKGPARSGVEVLFNELEIPVEEYSFGRSKIFIRNPRTLFQLEDLRKQRLEDLATLIQKIYRGWKCRTHFLLMKRSQVVIAAWYRRYAQQKRYQQIKSSALVIQSYIRGWKARKILRELKHQKRCKEAATTIAAYWHGTQARKERRRLKDEARNKHAIAVIWAFWLGSKARRELKRLKEEARRKHAVAVIWAYWLGLKVRREYRKFFRANAGKKIYEFTLQRIVQKYLLEMKNKMPSLSPIDKNWPSRPYLFLDSTHKELKRIFHLWRCKKYRDQFTDQQKLIYEEKLEASELFKDKKALYPSSVGQPFQGAYLEINKNPKYKKLKDAIEEKIIIAEVVNKINRANGKSTSRIFLLTNNNLLLADQKSGQIKSEVPLVDVTKVSMSSQNDGFFAVHLKEGSEAASKGDFLFSSDHLIEMATKLYRTTLSQTKQKLNIEISDEFLVQFRQDKVCVKFIQGNQKNGSVPTCKRKNNRLLEVAVP

SEQ ID NO: 1298 - DNA, 1880 bp, Homo sapiens
  ref <308>: DATABASE ACCESSION NUMBER: Refseq / NM_012223
  ref <309>: DATABASE ENTRY DATE: 2001-12-08
aggatgcaagagtcagagtgagggatctgtccctggatggggacaataaggggtcagttcagggggacttccttgagctctgaagtttcacctgagaatgggagattcagaacttggtgacagagtttgtggagctcactgtgtctttgctgatccttcagcaaaggaagtgagattgtttctagcttttctgtttggggtgcttctctgtcaactaaaagtcttcatcctttaaatattgcatcatttgtgtatacttcattcattcacttactcatgacccactcctcgagtgcctgcaatgggcaagcgtctgtcctaggagccgtgtgctgggccacagttaaatctgagagatcatgtgtggcatttctcatggattgagatgtctgagtgtcattgttttgagagagctagtggcatggtttataaagctgtttttcattttctccatacaggacaacagctttgagcagttcattattaattattgtaacgaaaagctgcaacaaatcttcattgaacttactcttaaagaagagcaggaggagtatatacgggaggatatagaatggactcacattgactacttcaataatgctatcatttgtgacctaatagaaaataacacaaatggaatcctggccatgctggatgaagagtgcctcagacctggcacagtcactgatgagaccttcttagaaaagctgaaccaagtatgtgccacccaccagcattttgaaagcaggatgagcaagtgctctcggttcctcaatgacacgtctctgcctcacagctgcttcaggatccagcattatgctggaaaggtgctgtaccaggtggaaggattcgttgacaaaaacaatgaccttctctatcgagacctgccccaagccatgtggaaggccagccatgccctcatcaagtctttgttccccgaagggaatcccgccaagatcaacctgaaaaggcctcctacagcaggctcacagttcaaggcatccgtggccactctgatgaaaaacctacagaccaagaacccaaactatattaggtatttttggcacatgaaactttcacagttcaaatgtgagagcaccccgaaggaatatcatttttccctttgcttcaatctgagtgtagcccaagcagagggtaactaaaatacttacagattaaataataccttatctgggattggcttaaaaaatgctccactatcctttcccctaaaataagaaagtaaaaaagtaaagtgtggtggagaagatagtagatatttaatgaagctcagtggttgagacctaggggttttcaactttctgtatgtttattattatttttttaacggcaagttaaaaaacaaaatgcaagtgttttttctggtcagtgttttgcagaaaactcttgttggcttcatttgggattcttgttctattagcttagagcacagcattgaagcaagtgctttagttaactgctctggcacttcttaggagacatgcacttttttcttccctgtgagaggtgtaggcctggagaaagtaatgattcctaaagcaatctgaattttttccaaggcagtagaaagaccttcttaaaaagggctgggcgtggtggctcacacctataatcccaacacttagggaggcggaggcaggtggatcacctcaggtcaggaattcgagactagcctggccaacatggcaaaaccctgtctctactaaaaatataaaaattagctgggcgtggtggcagggacctataatcccaactacttgggaggctgaggcaggagaatcgcttggaggcagaggttgcagtgagccgaggtcacgccactgcactccagcccgggtgacaatacaagactccatctc

SEQ ID NO: 1299 - protein, 267 aa, Homo sapiens
  ref <308>: DATABASE ACCESSION NUMBER: Refseq / NP_036355
  ref <309>: DATABASE ENTRY DATE: 2001-12-08
MCGISHGLRCLSVIVLRELVAWFIKLFFIFSIQDNSFEQFIINYCNEKLQQIFIELTLKEEQEEYIREDIEWTHIDYFNNAIICDLIENNTNGILAMLDEECLRPGTVTDETFLEKLNQVCATHQHFESRMSKCSRFLNDTSLPHSCFRIQHYAGKVLYQVEGFVDKNNDLLYRDLPQAMWKASHALIKSLFPEGNPAKINLKRPPTAGSQFKASVATLMKNLQTKNPNYIRYFWHMKLSQFKCESTPKEYHFSLCFNLSVAQAEGN

SEQ ID NO: 1300 - DNA, 579 bp, Rattus norvegicus
  ref <308>: DATABASE ACCESSION NUMBER: Refseq / NM_019150
  ref <309>: DATABASE ENTRY DATE: 2003-01-14
gcggccgctctccatcttgcactggatagacactccgataacctggcaggcggcaccatgaggcagaggggacgcgctacgctcctggtagcgttgctgcttctggttcagctgcgcccggagagcagccagtggagcccagcggctgcggcggcgaatgtggtccaggatccgaatctgcgatggaaccccggagtgcggaatcagggcggaggtgtccgcgcactcctcttgctgttagcggagcgcttcccgcgccgcgcgggatctgagcctgcaggcgagcggcaacgacgagacgacccgccgttgtccatcgacctcaccttccacctgctgcggaccctgctagagctagctcggacacagagccagcgcgagcgcgcagagcagaaccgcatcatattcgattcggtgggcaagtgatcggccccgtatggggtccagaaagccttgaccctttcccccacctaccccggggctggagcgcgcacaaccggagctggctcagtcccgcgttgcagcgccgcccagagttaccctgaacactctgactggatattttttaataaaactgcc

SEQ ID NO: 1301 - protein, 122 aa, Rattus norvegicus
  ref <308>: DATABASE ACCESSION NUMBER: Refseq / NP_062023
  ref <309>: DATABASE ENTRY DATE: 2003-01-14
MRQRGRATLLVALLLLVQLRPESSQWSPAAAAANVVQDPNLRWNPGVRNQGGGVRALLLLLAERFPRRAGSEPAGERQRRDDPPLSIDLTFHLLRTLLELARTQSQRERAEQNRIIFDSVGK

SEQ ID NO: 1302 - DNA, 615 bp, Homo sapiens
  ref <308>: DATABASE ACCESSION NUMBER: Refseq / NM_003353
  ref <309>: DATABASE ENTRY DATE: 2001-02-03
agccccgggacagaccctgtgttccccaaggcgtcttcagcctgccccgagggacagagactggagctcaatcttggaccgtacagacgctcgccgacaacctggccggcggcaccatgaggcaggcgggacgcgcagcgctgctggccgcgctgctgctcctggtacagctgtgccctgggagcagccagaggagccccgaggcggccggggtccaggacccgagtctgcgctggagccccggggcacggaaccagggtggcggggcccgcgcgctcctcttgctgctggcggagcgcttcccgcgccgcgcggggcccggccgattgggactcgggacggcaggcgagcggccgcggcgggacaacccttctctgtccattgacctcacctttcacctgctgcggaccctgctggagctggcgcggacgcagagccagcgggagcgcgccgagcagaaccgcatcatattcgactcggtgggcaagtgatggcccggtttggggctgcgaaaacgttgacccctttcccccaccccagagttgggatgcggggcagagccaccagggcactgtctgcgtgactattttttaataaaagtactgaagacccgtt

SEQ ID NO: 1303 - protein, 124 aa, Homo sapiens
  ref <308>: DATABASE ACCESSION NUMBER: Refseq / NP_003344
  ref <309>: DATABASE ENTRY DATE: 2001-02-03
MRQAGRAALLAALLLLVQLCPGSSQRSPEAAGVQDPSLRWSPGARNQGGGARALLLLLAERFPRRAGPGRLGLGTAGERPRRDNPSLSIDLTFHLLRTLLELARTQSQRERAEQNRIIFDSVGK

SEQ ID NO: 1304 - DNA, 1143 bp, Rattus norvegicus
  ref <308>: DATABASE ACCESSION NUMBER: EMBL / X06769
  ref <309>: DATABASE ENTRY DATE: 1993-09-12
atgatgttctcgggtttcaacgcggactacgaggcgtcatcctcccgctgcagtagcgcctccccggccggggacagcctttcctactaccattccccagccgactccttctccagcatgggctcccctgtcaacacacaggacttttgcgcagatctgtccgtctctagtgccaactttatccccacggtgacagccatctccaccagcccagacctgcagtggctggtgcagcccactctggtctcctccgtggccccatcgcagaccagagcgccccatccttacggactccccaccccgtcgaccggggcttacgccagagcgggagtggtgaagaccatgtcaggcggcagagcgcagagcatcggcagaaggggcaaagtagagcagctatctcctgaagaggaagagaaacggagaatccgaagggaaaggaataagatggctgcagccaagtgccggaatcggaggagggagctgacagatacgctccaagcggagacagatcaacttgaagacgagaagtctgcgttgcagaccgagattgccaatctactgaaagagaaggaaaaactggagtttattttggcagcccaccgacctgcctgcaagatccccaatgacctgggcttcccagaggagatgtctgtgacctccctggacttgactgggggtctgcctgaggctaccaccccagagtctgaggaggccttcaccctgcctcttctcaatgaccctgagcccaagccatccttggagccggtcaagaacattagcaacatggagctgaaggctgaaccctttgatgacttcttgtttccggcatcatctaggcccagtggctcggagactgcccgctctgtgccagatgtggacctgtctggttccttctatgcagcagactgggagcctctgcacagcagttccctggggatggggcccatggtcacagagctggagcccctgtgcactcccgttgtcacctgcactcccagctgcactacctatacgtcttcctttgtcttcacctaccccgaggctgactccttccctagctgcgcagctgcccaccgaaagggcagcagcagcaacgagccctcctctgactcactgagctcgcccacactgctagccctgtga

SEQ ID NO: 1305 - DNA, 1999 bp, Rattus norvegicus
  ref <308>: DATABASE ACCESSION NUMBER: Refseq / NM_022584
  ref <309>: DATABASE ENTRY DATE: 2002-11-05
agccctaaccgcctaagtccccgggccatggcggcgattgtggcggcgctgcgcggatccagcgggcgcttccggccgcagacacgggttttaacacgcgggacgcggggcgcggcgggcgcggcgagcgcagcgggagggcagcagaacttcgatctcttggtgatcggtgggggatccggtggcctagcttgtgccaaggaagcggctcagctgggaaggaaggtggctgtggctgactatgtggaaccctctccccgaggcaccaaatggggccttggtggcacctgtgtcaacgtgggctgcatacccaagaagctgatgcatcaggccgcactgctggggggcatgatcagagatgctcagcactacggctgggaggtggcccagcctgtccagcacaactggaaggcaatggccgaagccgtgcaaaaccatgtgaagtccttgaactggggtcatcgtgtccaactgcaggacaggaaagtcaagtactttaacatcaaagccagctttgtcaacgagcacacagttcacggtgtcgacaaagccgggaaggtgactcagctttcagccaagcacatagtcatcgctacaggaggacggccgaagtaccccacacaggtcaaaggagccctggaacacggaatcacaagtgatgacatcttctggctgaaggagtcccctgggaaaacgttggtggttggagccagttatgtggccctggagtgtgccggcttcctcactggtattggcctggataccacggtcatgatgcgcagcgtgcccctccgaggctttgaccagcaaatggcgtctttggtcacagagcacatggagtctcatggcacccggttcctgaaaggctgtgtcccctccctcatcagaaaactcccgactaaccaactgcaggtcacttgggaggatctcgcttctggcaaggaggacgtgggcacctttgacactgtcctgtgggccatagggcgagttccagagaccagaaatttgaatctggagaaggctggcgttaataccaaccctaagaatcagaagatcattgtggatgcccaggaggccacctctgtcccccacatctatgccattggagatgttgctgaggggcggcctgagctgacacccacagctatcaaggcaggaaagcttctggctcagcggctctttgggaaatcctcaaccttaatgaattacagcaacgtccccacaactgtctttacaccactggagtatggctgtgtgggactgtctgaggaggaggctgtggctctccacggccaggagcatatagaggtttaccatgcatattacaagcccctagagttcacagtggcagatcgggatgcatcacagtgctacataaagatggtatgcatgagggagcccccacaactggtactgggcctgcacttccttggccccaacgctggagaagtcacacaaggatttgctcttgggatccagtgtggggcttcatacgcacaggtgatgcagacagtagggatccaccccacctgctctgaggaggtggttaagctgcacatctccaagcgctctggcctggatcctactgtgaccggctgctgaggttaagttaccatccctgctgagctaaggatacacactgtgcctgccatgtgcccagtacaaggctctcagacacctggacctagctattgtcatgggagccactgtgccagcatgattccaggcacatggtgaagctacctagaacaggactggaaggccttgctgcctcgcagagatctgagaagatgtggatggagcattgtgtatctgaatagatggtgtgtgtcctgcagggatgactgccccctctaacctctggccagccttcacacactgccagtgtcagatgatgacggcctgtgcagaaacccccacgtgggctgccaggtttgaacccctggcatttctggagtgctaataaagagcgtgttttagtaaaaaaaaaaaaaaaaaa

SEQ ID NO: 1306 - protein, 526 aa, Rattus norvegicus
  misc_feature (1)..(526): Xaa=Unknown amino acid
  ref <308>: DATABASE ACCESSION NUMBER: Refseq / NP_072106
  ref <309>: DATABASE ENTRY DATE: 2002-11-05
MAAIVAALRGSSGRFRPQTRVLTRGTRGAAGAASAAGGQQNFDLLVIGGGSGGLACAKEAAQLGRKVAVADYVEPSPRGTKWGLGGTCVNVGCIPKKLMHQAALLGGMIRDAQHYGWEVAQPVQHNWKAMAEAVQNHVKSLNWGHRVQLQDRKVKYFNIKASFVNEHTVHGVDKAGKVTQLSAKHIVIATGGRPKYPTQVKGALEHGITSDDIFWLKESPGKTLVVGASYVALECAGFLTGIGLDTTVMMRSVPLRGFDQQMASLVTEHMESHGTRFLKGCVPSLIRKLPTNQLQVTWEDLASGKEDVGTFDTVLWAIGRVPETRNLNLEKAGVNTNPKNQKIIVDAQEATSVPHIYAIGDVAEGRPELTPTAIKAGKLLAQRLFGKSSTLMNYSNVPTTVFTPLEYGCVGLSEEEAVALHGQEHIEVYHAYYKPLEFTVADRDASQCYIKMVCMREPPQLVLGLHFLGPNAGEVTQGFALGIQCGASYAQVMQTVGIHPTCSEEVVKLHISKRSGLDPTVTGCXG

SEQ ID NO: 1307 - DNA, 2280 bp, Homo sapiens
  ref <308>: DATABASE ACCESSION NUMBER: Refseq / NM_032468
  ref <309>: DATABASE ENTRY DATE: 2001-07-03
cggcctgccagcagtacttttgagttttttttttgttttgttttactttagcatttattattcatggattgaagaaatcaaaatggctgaagataaagagacaaagcatggaggacacaagaatgggaggaaaggcggactctcaggaacttcattcttcacgtggtttatggtgattgcattgctgggcgtctggacatctgtagctgtcgtttggtttgatcttgttgactatgaggaagttctagccaaagcaaaggacttccgttataacttatcagaggtgcttcaaggaaaactaggaatctatgatgctgatggtgatggagattttgatgtggatgatgccaaagttttattaggacttaaagagagatctacttcagagccagcagtcccgccagaagaggctgagccacacactgagcccgaggagcaggttcctgtggaggcagaaccccagaatatcgaagatgaagcaaaagaacaaattcagtcccttctccatgaaatggtacacgcagaacatgttgagggagaagacttgcaacaagaagatggacccacaggagaaccacaacaagaggatgatgagtttcttatggcgactgatgtagatgatagatttgagaccctggaacctgaagtatctcatgaagaaaccgagcatagttaccacgtggaagagacagtttcacaagactgtaatcaggatatggaagagatgatgtctgagcaggaaaatccagattccagtgaaccagtagtagaagatgaaagattgcaccatgatacagatgatgtaacataccaagtctatgaggaacaagcagtatatgaacctctagaaaatgaagggatagaaatcacagaagtaactgctccccctgaggataatcctgtagaagattcacaggtaattgtagaagaagtaagcatttttcctgtggaagaacagcaggaagtaccaccagatacttaaaagcttcaaaaagactgcccctaccaccacaggaggaccagcctaaccatacgctccaaaagatggctgtgatagatcttgtgaagcaattactgagcagatcaagatctttgggaaggaacactaaagatgttttgaatgaattatagtccactggcattttagtgtatttttttttctttttagaaacacacatttctaaaaatgtcatgttacattcctgcatgtcccttttgatagcattagtggatccattggatttcttttttctttttgtgagacagcttttagtcttacctgaatttatgtgtgtttttccgacagtggttaataattatattggtgatgtagcagcaattgtgttggcagggttttcatatattattagtaattaacactaactgttggactgacttgtgtacactgtgttaaacatgatttaaaagctattaagagtacttagcactcttaaaaacgctaacagagatcatcattagctgtgaagatttgagttgtatatacctgcactgatattcttatcaaaaatttctacattagctttaagtgttcagattaacacttttgaaatttttgtagcttttagctgattaattagaaaaattaatatttcagtgaaagttttaaattatcatttatttatttttttaaatgagaggggaaagctgaaattccttgttaagacacaaggaaaaagaatggccctactattatcatgcaaaaatgcctttgttggcacctcagattaatcatataatagctatagtctcttcagcattttgtttaaattttagaaaacctgtataaattactggtgcataacttaaagattattctgcctttggctaattgagtaattcccctccagcactagagaccgctcagtgctcttactagatgaactcagtaacgccttgagctgggttgattgaggatgtgtgaaaaatggtggtttattttgggctcagaaataattgctctgttgaaaataatcctttgtcagaaaagaaggtagctaccacatcattttgaaaggaccatgagcaactataagcaaagccataagaagtggtttgatcgatatattaggggtagctcttgattttgttaacattaagataaggtgactttttccccctgcttttaggattaaaatcaaagatacttctatatttttatcactatagatcatagttattatacaatggtagtgagtcctgcatggggtactcgatgtgtaatgaaaacctggaaataataagataataagaaaagcccgg

SEQ ID NO: 1308 - protein, 299 aa, Homo sapiens
  ref <308>: DATABASE ACCESSION NUMBER: Refseq / NP_115857
  ref <309>: DATABASE ENTRY DATE: 2001-07-03
MAEDKETKHGGHKNGRKGGLSGTSFFTWFMVIALLGVWTSVAVVWFDLVDYEEVLAKAKDFRYNLSEVLQGKLGIYDADGDGDFDVDDAKVLLGLKERSTSEPAVPPEEAEPHTEPEEQVPVEAEPQNIEDEAKEQIQSLLHEMVHAEHVEGEDLQQEDGPTGEPQQEDDEFLMATDVDDRFETLEPEVSHEETEHSYHVEETVSQDCNQDMEEMMSEQENPDSSEPVVEDERLHHDTDDVTYQVYEEQAVYEPLENEGIEITEVTAPPEDNPVEDSQVIVEEVSIFPVEEQQEVPPDT

SEQ ID NO: 1309 - DNA, 524 bp, Rattus norvegicus
  ref <308>: DATABASE ACCESSION NUMBER: EMBL / AA891931
  ref <309>: DATABASE ENTRY DATE: 2000-03-03
gagctctcagagcgctgcagctgctgggaattggctgtcttaacaggaagctgaatttaccgttgaatgctttggcttggggtctgcacgagatcctttagggcagacgaggttctgtttaaactactcacatgtagagcccatctgcagaaaattctctttaacaaaacgctaagactacagaagccagtaactactgcggtggagtgtggccaccggctgctctctgagtagccgtctatcacacagattaaaactaaggcaggcttgagtgatgttggcctttcccaatttcctaagaaccgttcaatttttaaagctcaagcattaaattcaccttcttcccattgtgtctgcagatagccacaagctttagaggcctaggaatctgagcaggcgggctgttgccaaagtctagcggttcattctgcccaaaggttagacgtgtttaaaactgctctctgtggtaccatgtgtctgtttacttatgctcttgagcaacaataaaccactagtttaccttc

SEQ ID NO: 1310 - DNA, 1940 bp, Rattus norvegicus
  ref <308>: DATABASE ACCESSION NUMBER: Refseq / NM_019620
  ref <309>: DATABASE ENTRY DATE: 2003-01-14
ggaattcggcacgaggtgatttccagcttttggaagccccggtgctttacgaaatcacggtagccggagagccatggagatggaacagttgaccttccgagatgtggctgttgacttctctccggatgagtgggaatgcctggaccctcctcagcagaggctgtacagggacgtgatggtagagaactacagaaacctggtctctgtggctctttctcatcattgtacccagaacttttcaccagaacagatcctaaaatattccttcacaaaaggaactaatggaagttgtggccttaaaagtttatacttaagggaagattgtatatatatagatgagagtaaagcccaccatggtagagatatgcaatgtctaattacaagcaataccaaagatgtcattgacagcagagatcaagaacacaaaaccgctctgacaataactcctgtgaggccagatactttggatgagccaagtatctataactgtaaatatccacaggaaagttttcagcatgacttaactttgaaagaaagtttggaagatctgatagatgggttaatgtttcacccaaacagttccatagataaagaattaagaagcagaggactgatatcaacaagtgatcaaattgagactttctatactgaaagatccttactcttcagtcagcaaatagctatctcctatgacccaaagcacaattctattgattatggattgcctgctattgatccattatcacatagcccaaatggcgatacagatgtgtgggaaagccctttcatgtataaggaaactagcaaagattttagtagtgaatctttactaaataactgcaatgatattatcttagagaaatctagtcagtataacaaaatatgtaacgactttgaccattgctcaagtcccaacaaatatcagtatactcttccaaagaagcctttcaattgtgataatttctttactcaatgttcaaagctttctatccatcaatatgttcaagataattgttacaagagtatcgattgtgacacaatgtttaataaaactttaaatgttattacacataaaattcagcattcccagaaatcctacaaatgtaatgaatgtggcaaagcttttaaatattgctcaagttacagaaaacacagaataattcacacaggagaaaaacccttcaaatgtaaagtatgtggaaaatcctttacccaatgtgcaagccttaaaaaacatcagagaatccacacaggagagaaaccctacaaatgtgaagaatgtggcagaagctttaaccactactcaattcttggtcagcaccagaggattcatacaggagagaaaccctacaagtgtaaacagtgtgggaaatcctttactcaatgttcaagccttcagaaacaccaagtaatccacactggagagaagcccttcagatgtgcagaatgtggcaaatcctttacgcaaaactcaacccttagtcaacaccagagaattcatactggagaaaaaccttacaaatgtgaacagtgtggaaaggcctttacccaatgttcaagccttagaaaacaccagagaattcacactggagagaaaccctacaaatgtgaagaatgtggcagagcctttaactgccgttcatcttttactaaacacacaagagaattcacacaggagagaaaccttacaaatgtaaagactgtgacaaagctttcatccactgcacaaaccttactcaacaccggagaatccatacaggagagaaaccatacaaatgtaatgaatgtggaaagtcctttagtcagtgttccaaccttagaaaacatgagagaattcatacatgagtaaaactaacaaatgtaaagaatttagtaaatcttttatccatatgcaaaaaaaaaaaaaaaaaaaaaaaaaaaaaaaaaaaaaaaaaaaaaaa

SEQ ID NO: 1311 - protein, 591 aa, Rattus norvegicus
  ref <308>: DATABASE ACCESSION NUMBER: Refseq / NP_062566
  ref <309>: DATABASE ENTRY DATE: 2003-01-14
MEMEQLTFRDVAVDFSPDEWECLDPPQQRLYRDVMVENYRNLVSVALSHHCTQNFSPEQILKYSFTKGTNGSCGLKSLYLREDCIYIDESKAHHGRDMQCLITSNTKDVIDSRDQEHKTALTITPVRPDTLDEPSIYNCKYPQESFQHDLTLKESLEDLIDGLMFHPNSSIDKELRSRGLISTSDQIETFYTERSLLFSQQIAISYDPKHNSIDYGLPAIDPLSHSPNGDTDVWESPFMYKETSKDFSSESLLNNCNDIILEKSSQYNKICNDFDHCSSPNKYQYTLPKKPFNCDNFFTQCSKLSIHQYVQDNCYKSIDCDTMFNKTLNVITHKIQHSQKSYKCNECGKAFKYCSSYRKHRIIHTGEKPFKCKVCGKSFTQCASLKKHQRIHTGEKPYKCEECGRSFNHYSILGQHQRIHTGEKPYKCKQCGKSFTQCSSLQKHQVIHTGEKPFRCAECGKSFTQNSTLSQHQRIHTGEKPYKCEQCGKAFTQCSSLRKHQRIHTGEKPYKCEECGRAFNCRSSFTKHTREFTQERNLTNVKTVTKLSSTAQTLLNTGESIQERNHTNVMNVESPLVSVPTLENMREFIHE

SEQ ID NO: 1312 - DNA, 718 bp, Homo sapiens
  ref <308>: DATABASE ACCESSION NUMBER: EMBL / AW976399
  ref <309>: DATABASE ENTRY DATE: 2000-06-08
tgtgaaaggtgttgtgacagtcattatatttataattctttagttcaatatgaactctggtcctgagtaagacatgagcaggtattaaaggctttgccacattttttacatttgtaggatttttctcaggtatgaattttctcaggtacattgaggtctgagcagtggttaaaggttttgccacattcttcagatttgtaacatttctctcttgtatgaattctcttatggtttgaaaggcttgaacaagatataaagactttaccacattcttcacatttatagggcttctctccagtatgaattcttttatgttcagtaaggtgtgagcaccggttaaaagctttgccacattcttcacatttgtagggtttctctccagtatgaattctcttatgtttagtgaggtttgaacactggttaaaagctttgccacattcatcacatttgtagggtttctctccagtatgaattcttttatgtagagttaggtatgagaaccagttaaaggctttgccacattcttcacatttatggggtttctgtccagtgtgaattttcttatgtttggcatggtttgaactgtggttaaaagctttgccccattcttcacattaatgaagtttctttcaggatggaattttatgtggattagaaaggctcgtgaaaggtttaaagaacttttccacaattcttacatttggagggttcttcttca

SEQ ID NO: 1313 - DNA, 438 bp, Rattus norvegicus
  ref <308>: DATABASE ACCESSION NUMBER: EMBL / L37971
  ref <309>: DATABASE ENTRY DATE: 2000-03-04
tatcgaacctcgagggcccgaattcgcccagcaagtggacagggccatggagaggaacctgggagctgtgctggggattcttgtggtgcagatttgctgggtgagaggagataatgtccagcagagtccttcagccctgagtctccacgaaggagacaattctgttctgcgatgcgatttttctacctccatgaggagtgttcagtggttccgacaggttcccaggggccagcctcatcaacctgttctacgtggcttcaggaaaaaggagaacgggaggttaaagtcaacattcgatgctaaggagggctacagcaccctgcacatcagtggtgcccagctggaggactcaggcacctacttctgtgctgttgatgcctacaaccagggaaagcttatctttggacagggaaccaagttatctatcaagcccaatgt

SEQ ID NO: 1314 - DNA, 531 bp, Rattus norvegicus
  ref <308>: DATABASE ACCESSION NUMBER: EMBL / AA875261
  ref <309>: DATABASE ENTRY DATE: 2000-03-03
ttggagtagctcacagacttggattaagtgcctttgacttgctagggaacacatttggggctgagcctctttcctccagacttcttcactgtgactgtggcctcaacaagtacatacatgtgtgtggttgtgaacacacacacacacacacaccccagaatgaggccagagaaagtcacatctctggcctcccatttgtatcttccagccctcacttcagctcttcagctaggctgctcaaaaccactgcctctgtgaggccacacctagaacattcttccttttgatgactcagctggtcatcaaagaggcccttgactccaagtctgatgacccgagttccatctctgggacccacaaggaaggagagaacgaactcccacaagctgtcctctggtttacacctgcacaccaagatacacatctgtgcacacacatctaatagagataaaatgtaaagtagaaaaaaatcacgtttgtgctttgtaacttctgaggtgcacgtagaaaaattaaacctattttcctggc

SEQ ID NO: 1315 - DNA, 2152 bp, Rattus norvegicus
  ref <308>: DATABASE ACCESSION NUMBER: Refseq / NM_013165
  ref <309>: DATABASE ENTRY DATE: 2003-01-16
tgcggccgccgcttagcagagctaagtgggacttcactggagccatggagctgctcaagctgaaccgcagcgtgcagggaccaggacccgggtcggggtcttctttgtgccgcccgggtgtctcccttctcaacagcagtagtgccgggaacctcagctgtgacccccctcgtatccgcggaaccgggaccagagaattggagatggcgattagaatcaccctttatgcagtgatctttctgatgagtgttggcggaaacgtgctcatcatcgtggtcctgggactgagccgacgcctaagaacggtcaccaacgccttcctgctctccctggcagtcagcgacctcctgctggccgtggcttgcatgcccttcacactcctgcccaacctcatgggcacattcatcttcggcacagtcatctgcaaggccatttcctacctcatgggggtatcagtgagtgtatccactctaaatctcgtggccatagccctggagcgatacagcgccatctgccgaccactgcaagcacgagtatggcaaacacgctcccacgcagctcgggtgatcttagccacgtggctgctgtctggactgcttatggtaccctaccctgtgtacaccatggtacagccagtgggacctcgagtgctgcagtgcatgcatcgctggcccagtgcacgtgtccaacaaacctggtccgtgctactgctactgcttttgttcttcatcccgggtgtggttattgcggtggcctatggactcatctcccgcgaactctacctaggactccactttgatggtgaaaatgacagcgagacccaaagccgggcccgaaaccaagggggcctgccgggtggggcagcaccagggcctgtccaccagaacgggggctgccggcctgtaaccagcgtagctggggaagacagtgatggctgctgtgtgcaacttccgcgttcccgactggagatgacaacgctaaccacacccactcctgggccagtccctggccctcggcccaaccaggccaagctgctggctaagaagcgggtggtgcgaatgctgctagtgattgttttgcttttcttcctgtgttggctgccagtgtacagcgtcaacacgtggcgcgccttcgatggcccaggcgcacaacgagcactctcaggggcccctatctctttcatccacttgctgagctacgtctctgcttgtgtcaaccccctggtctactgtttcatgcaccgccgcttccgccaggcctgcctggacacatgtgcccgctgttgcccacgccctccacgagctcgcccacagcctcttccagatgaggatcctcctaccccctccatcgcttcgctgtccaggctaagctataccaccatcagcacactggggcctggctgaggggttgggagattggagaaagagacaagatacataattactatcaaatgacccatccaaacacataagaaacaaaattcagaattaatcaggtgaacacccaacaccatggacagacccctacacacagaaaatagtatctttgctgccctacctgaaacagataggagtctcataggaaaggaggctcacttctgataaggggctgagtcccttcctagacatcttgcactgaccccattacatggacagacacaaggtccgtagcagtaaactttacctataaaggggaactctgacaagggctgattggctcctcatatgaacatattactgacactattctgtagtgcccatagcctagtgcagaagtgacttaggacattgtggctgttcccgtttgacttcattattgccttcctcatccagcactgaaattatcaaccacacgcctttcacctttcggagctgccgatcgttcagcactgaaaagtcccccccccccactcctttccattggagactgtggaaagtcctcttccctcctgcctctcctccctcaccagaccacatcataaaaggataagtgacttagtgtcctcctggacttcttgaggtaggtgaacaggtgtggtttatgggaagcttcttcatttattggctcccatgactaatctaccccatatccaaccttgtgcaaaaaggccagggtatgaagatagggatgagcgtaccctctcttggttgtc

SEQ ID NO: 1316 - protein, 452 aa, Rattus norvegicus
  ref <308>: DATABASE ACCESSION NUMBER: Refseq / NP_037297
  ref <309>: DATABASE ENTRY DATE: 2003-01-16
MELLKLNRSVQGPGPGSGSSLCRPGVSLLNSSSAGNLSCDPPRIRGTGTRELEMAIRITLYAVIFLMSVGGNVLIIVVLGLSRRLRTVTNAFLLSLAVSDLLLAVACMPFTLLPNLMGTFIFGTVICKAISYLMGVSVSVSTLNLVAIALERYSAICRPLQARVWQTRSHAARVILATWLLSGLLMVPYPVYTMVQPVGPRVLQCMHRWPSARVQQTWSVLLLLLLFFIPGVVIAVAYGLISRELYLGLHFDGENDSETQSRARNQGGLPGGAAPGPVHQNGGCRPVTSVAGEDSDGCCVQLPRSRLEMTTLTTPTPGPVPGPRPNQAKLLAKKRVVRMLLVIVLLFFLCWLPVYSVNTWRAFDGPGAQRALSGAPISFIHLLSYVSACVNPLVYCFMHRRFRQACLDTCARCCPRPPRARPQPLPDEDPPTPSIASLSRLSYTTISTLGPG

SEQ ID NO: 1317 - DNA, 584 bp, Rattus norvegicus
  ref <308>: DATABASE ACCESSION NUMBER: Refseq / NM_057187
  ref <309>: DATABASE ENTRY DATE: 2003-01-13
agggtaatggcattacagttcgaagccttctgtgcagggggcctggcccctggctggagcctgactgtacagggacatgcggatgctggggaagataagtttgagatcaactttttaacggacgcgggagacatcgccttccatgtcaaacctcgattctccagcgccacggtggtgggcaatgccttccagggagggcggtggggacaggaggaggtgtccagcgtgttcccgctgaccttgggagagccctttgaggtggaggtgagtgcagacacagaacactttcacatttacgcccaggaacaaaaggtgctccagttcccacatcggcacagaccgctagctaccatcaccagagtgcgagtgctcagtgaccatcagctggcccaggtggagctggccaagcggggcctgagctggggggatgggggctactgagtggactggaccacacaacccacaagagccagccttggccatcctgtatccccttccacctggagccacattccacgcattgcagatgctgggaagctgaggctctgtatgaaccccctttaccctcaataaaaaatgagcat

SEQ ID NO: 1318 - protein, 144 aa, Rattus norvegicus
  ref <308>: DATABASE ACCESSION NUMBER: Refseq / NP_476535
  ref <309>: DATABASE ENTRY DATE: 2003-01-13
MALQFEAFCAGGLAPGWSLTVQGHADAGEDKFEINFLTDAGDIAFHVKPRFSSATVVGNAFQGGRWGQEEVSSVFPLTLGEPFEVEVSADTEHFHIYAQEQKVLQFPHRHRPLATITRVRVLSDHQLAQVELAKRGLSWGDGGY

SEQ ID NO: 1319 - DNA, 2090 bp, Rattus norvegicus
  ref <308>: DATABASE ACCESSION NUMBER: EMBL / AB012600
  ref <309>: DATABASE ENTRY DATE: 1998-09-30
ttgcaagcaccgtccttccaatggcggaccagagaatggacatttcctccacaatcagtgacttcatgtctccgggccccaccgacctgctctccggttccctgagcaccagtggtgtggactgcaaccgcaagaggaaaggcagtgccactgactaccaagaaagtatggacacagacaaagatgaccctcatggaaggttagaatatgcagaacaccaaggaaggatcaaaaatgcaagggaggcccacagtcagattgaaaagaggcgtcgggacaaaatgaacagttttattgacgaattggcttctttggtaccaacatgcaatgcgatgtcccggaagttagataaactcaccgtgctcaggatggctgttcagcacatgaaaacattgagaggtgccaccaacccatacacagaagcaaactacaagccaacatctctatccgatgacgaactgaaacacctaattctcagggcagcagatggatttttgtttgtcgtaggatgtgaccgagggaagatcctctttgtctccgaatctgtcttcaagatcctcaattatagccagaatgaccttattggccagagtttgttcgactacctgcatccaaaagatattgccaaagttaaggaacagctatcttcctcggacactgcacctcgggagcgactcatcgatgcgaagactggacttccggttaaaacggatataacccctgggccctcccgattgtgctctggagctcggcgctctttcttctgtaggatgaagtgcaacaggccttcagtaaaggtggaagataaggacttcgcctccacctgttcaaagaaaaaagcagatcgaaagagcttctgcacaatccacagcacaggctacttgaaaagctggccacccacaaagatggggctggacgaagacagtgaaccagacaatgagggctgcaatctgagctgcctcgttgcaatcgggcgactgcactcacacatggttccacagccagtgaacggggaaatacgggtgaagtctatggagtatgtgtctcgacatgcaatagatgggaaatttgtttttgtagatcagagggcgacggctattttggcatatctaccacaggaacttctaggtacatcgtgttatgagtattttcatcaagatgatataggacaccttgcggaatgtcacaggcaagttttacagacaagagaaaagatcacgactaattgctataagtttaagatcaaagatggttcctttatcacactacgaagtcgatggttcagtttcatgaacccgtggaccaaggaagtagaatacattgtctcaaccaacactgttgttttagccaatgtcctggaaggcggggacccaaccttcccacagctcacagcatccccccacagcatggacagcatgctgccctctggagaaggtggcccaaagaggactcatcccactgttccaggcattccagggggaaccagagctggagcaggaaaaataggtcgaatgattgccgaggaaatcatgggaatccacaggataagagggtcatcaccttccagctgtggctccagcccactgaacatcacaagtacgcctccccctgatgcttcctctccaggaggcaagaagattctaaatggagggactccagacattccttccgctggcctactaccagggcaggctcaggagaccccaggctatccctactctgatagttcgtctattcttggtgagaacccccacataggcatcgacatgatagacaacgaccaaggatcaagcagccccagtaacgacgaggcagcaatggctgtcaccatgagcctcttggaagcagatgcggggctgggtggtcccgttgactttagtgacttgccatggccactgtagacactacattttgctctggcaacagctacagtatcaaagtgcattactggtgaagttttacagtctgtgaagcttactggatagggagagaacagcttttatgtactgactccataaaagccatctcagagccattgagacaagtcaatcttaccatgtgtaacttcagacaaagtggaactaagcctg

SEQ ID NO: 1320 - protein, 627 aa, Rattus norvegicus
  misc_feature (1)..(627): Xaa=Unknown amino acid
MADQRMDISSTISDFMSPGPTDLLSGSLSTSGVDCNRKRKGSATDYQESMDTDKDDPHGRLEYAEHQGRIKNAREAHSQIEKRRRDKMNSFIDELASLVPTCNAMSRKLDKLTVLRMAVQHMKTLRGATNPYTEANYKPTSLSDDELKHLILRAADGFLFVVGCDRGKILFVSESVFKILNYSQNDLIGQSLFDYLHPKDIAKVKEQLSSSDTAPRERLIDAKTGLPVKTDITPGPSRLCSGARRSFFCRMKCNRPSVKVEDKDFASTCSKKKADRKSFCTIHSTGYLKSWPPTKMGLDEDSEPDNEGCNLSCLVAIGRLHSHMVPQPVNGEIRVKSMEYVSRHAIDGKFVFVDQRATAILAYLPQELLGTSCYEYFHQDDIGHLAECHRQVLQTREKITTNCYKFKIKDGSFITLRSRWFSFMNPWTKEVEYIVSTNTVVLANVLEGGDPTFPQLTASPHSMDSMLPSGEGGPKRTHPTVPGIPGGTRAGAGKIGRMIAEEIMGIHRIRGSSPSSCGSSPLNITSTPPPDASSPGGKKILNGGTPDIPSAGLLPGQAQETPGYPYSDSSSILGENPHIGIDMIDNDQGSSSPSNDEAAMAVTMSLLEADAGLGGPVDFSDLPWPLX

SEQ ID NO: 1321 - DNA, 2776 bp, Homo sapiens
  ref <308>: DATABASE ACCESSION NUMBER: Refseq / NM_001178
  ref <309>: DATABASE ENTRY DATE: 2002-04-10
gcggccgcgtcgaccggaggtgcctgtttacccgcgccggactcaccgccgccgccgccgcgggatccgagtgcgggcgcgggcgcgggcgctcccggcgagccacggtggtgctggctagagtgtttacgtttggacccaagcttaacttttccaatgtggaatcctgggccttcattggttccgatgtcataggaatctacgctagagggcttcctgtgtgccgggcactgtggtttttggaagaagctgaccgcctgaaaagaaattataaaacatgaaaatcgctttgaggtgaccaagtccagaggcccctaactcctcccaagctggatctggggtgtaagaactgtgacttcagatcatccaatggcagaccagagaatggacatttcttcaaccatcagtgatttcatgtccccgggccccaccgacctgctttccagctctcttggtaccagtggtgtggattgcaaccgcaaacggaaaggcagctccactgactaccaagaaagcatggacacagacaaagatgaccctcatggaaggttagaatatacagaacaccaaggaaggataaaaaatgcaagggaagctcacagtcagattgaaaagcggcgtcgggataaaatgaacagttttatagatgaattggcttctttggtaccaacatgcaacgcaatgtccaggaaattagataaacttactgtgctaaggatggctgttcagcacatgaaaacattaagaggtgccaccaatccatacacagaagcaaactacaaaccaacttttctatcagacgatgaattgaaacacctcattctcagggcagcagatggatttttgtttgtcgtaggatgtgaccgagggaagatactctttgtctcagagtctgtcttcaagatcctcaactacagccagaatgatctgattggtcagagtttgtttgactacctgcatcctaaagatattgccaaagtcaaggagcagctctcctcctctgacaccgcaccccgggagcggctcatagatgcaaaaactggacttccagttaaaacagatataacccctgggccatctcgattatgttctggagcacgacgttctttcttctgtaggatgaagtgtaacaggccttcagtaaaggttgaagacaaggacttcccctctacctgctcaaagaaaaaagcagatcgaaaaagcttctgcacaatccacagcacaggctatttgaaaagctggccacccacaaagatggggctggatgaagacaacgaaccagacaatgaggggtgtaacctcagctgcctcgtcgcaattggacgactgcattctcatgtagttccacaaccagtgaacggggaaatcagggtgaaatctatggaatatgtttctcggcacgcgatagatggaaagtttgtttttgtagaccagagggcaacagctattttggcatatttaccacaagaacttctaggcacatcgtgttatgaatattttcaccaagatgacataggacatcttgcagaatgtcataggcaagttttacagacgagagaaaaaattacaactaattgctataaatttaaaatcaaagatggttcttttatcacactacggagtcgatggttcagtttcatgaacccttggaccaaggaagtagaatatattgtctcaactaacactgttgttttagccaacgtcctggaaggcggggacccaaccttcccacagctcacagcatccccccacagcatggacagcatgctgccctctggagaaggtggcccaaagaggacccaccccactgttccagggattccagggggaacccgggctggggcaggaaaaataggccgaatgattgctgaggaaatcatggaaatccacaggataagagggtcatcgccttctagctgtggctccagcccattgaacatcacgagtacgcctccccctgatgcctcttctccaggaggcaagaagattttaaatggagggactccagacattccttccagtggcctactatcaggccaggctcaggagaacccaggttatccatattctgatagttcttctattcttggtgagaacccccacataggtatagacatgattgacaacgaccaaggatcaagtagtcccagtaatgatgaggcagcaatggctgtcatcatgagcctcttggaagcagatgctggactgggtggccctgttgactttagtgacttgccatggccgctgtaaacactacatgttgctttggcaacagctatagtatcaaagtgcattactggtggagttttacagtctgtgaagcttactggataaggagagaatagcttttatgtactgacttcataaaagccatctcagagccattgatacaagtcaatcttactatatgtaacttcagacaaagtggaactaagcctgctccagtgtttcctcatcattgattattgggctagctgtggatagcttgcattaattgtatattttggattctgtttgtgttgaattttttaatcattgtgcacagaagcatcattggtagcttttatatgcaaatggtcatttcagatgtatggtgtttttacactacaaagaagtcccccatgtggatatttcttatactaattgtatcataaagccgtttattcttccttgtaagaatcctttactataaatatgggttaaagtataatgtactagacagttaaatatttttaataaatgtttcccttgttctataaaaaaaaaaaaaaaaaaa

SEQ ID NO: 1322 - protein, 626 aa, Homo sapiens
  ref <308>: DATABASE ACCESSION NUMBER: Refseq / NP_001169
  ref <309>: DATABASE ENTRY DATE: 2002-04-10
MADQRMDISSTISDFMSPGPTDLLSSSLGTSGVDCNRKRKGSSTDYQESMDTDKDDPHGRLEYTEHQGRIKNAREAHSQIEKRRRDKMNSFIDELASLVPTCNAMSRKLDKLTVLRMAVQHMKTLRGATNPYTEANYKPTFLSDDELKHLILRAADGFLFVVGCDRGKILFVSESVFKILNYSQNDLIGQSLFDYLHPKDIAKVKEQLSSSDTAPRERLIDAKTGLPVKTDITPGPSRLCSGARRSFFCRMKCNRPSVKVEDKDFPSTCSKKKADRKSFCTIHSTGYLKSWPPTKMGLDEDNEPDNEGCNLSCLVAIGRLHSHVVPQPVNGEIRVKSMEYVSRHAIDGKFVFVDQRATAILAYLPQELLGTSCYEYFHQDDIGHLAECHRQVLQTREKITTNCYKFKIKDGSFITLRSRWFSFMNPWTKEVEYIVSTNTVVLANVLEGGDPTFPQLTASPHSMDSMLPSGEGGPKRTHPTVPGIPGGTRAGAGKIGRMIAEEIMEIHRIRGSSPSSCGSSPLNITSTPPPDASSPGGKKILNGGTPDIPSSGLLSGQAQENPGYPYSDSSSILGENPHIGIDMIDNDQGSSSPSNDEAAMAVIMSLLEADAGLGGPVDFSDLPWPL

SEQ ID NO: 1323 - DNA, 470 bp, Rattus norvegicus
  ref <308>: DATABASE ACCESSION NUMBER: EMBL / AA859981
  ref <309>: DATABASE ENTRY DATE: 2000-03-03
acagtcatcatcagagaagcaggtggcattgtgattgacacctcaggtggaccccttgacctcatgtcgtgcagagtggtggctgctggcaccagagagatggcagtgctcatagctcaggccctacaaaccattaactacggccgggacgatgagaagtgagccgtacagagctctaaggctgacatgagcagctccctgggaaagagctgtccgggggcttgagttccgggatagtctaccatagctgtccccggacctcggtgcttagctgatcctctctaatctcgggtagcccctttccaggtcggtacatggtctttcatcagagccaaacccaaatcttgtgaggtgtgttagtcacccatcctggttgttcggaatgcaaatctcaggtaataaagctttagaacgagctctcaggccctcccctgcccgtggtgatacagaatgcaataaatcagaacttt

SEQ ID NO: 1324 - DNA, 1500 bp, Homo sapiens
  ref <308>: DATABASE ACCESSION NUMBER: Refseq / NM_014214
  ref <309>: DATABASE ENTRY DATE: 2000-11-02
cggagggtggggagcggaaagcaggacgcacggctcccgcggcccgctggctgcccttcccgccagcgcaggtgtgggacgggcggcggactaggcacagagctgcgggagcaggcacagggagtgtggagcctggcggcgggacggcgggatccggtgggagccggagtcccgccgaggggggctggaggtggaggggcccggcgaggccgcgatgaagccgagcggcgaggaccaggcggcgctggcggccggcccctgggaggagtgcttccaggcggccgtgcagctggcgctgcgggcaggacagatcatcagaaaagcccttactgaggaaaaacgtgtctcaacaaaaacatcagctgcagatcttgtgacagaaacagatcaccttgtggaagatttaattatttctgagttgcgagagaggtttccttcacacaggttcattgcagaagaggccgcggcttctggggccaagtgtgtgctcacccacagcccgacgtggatcatcgaccccatcgacggcacctgcaattttgtgcacagattcccgactgtggcggttagcattggatttgctgttcgacaagagcttgaattcggagtgatttaccactgcacagaggagcggctgtacacgggccggcggggtcggggcgccttctgcaatggccagcggctccgggtctccggggagacagatctctcaaaggccttggttctgacagaaattggccccaaacgtgaccctgcgaccctgaagctgttcctgagtaacatggagcggctgctgcatgccaaggcgcatggggtccgagtgattggaagctccacattggcactctgccacctggcctcaggggccgcggatgcctattaccagtttggcctgcactgctgggatctggcggctgccacagtcatcatcagagaagcaggcggcatcgtgatagacacttcgggtggacccctcgacctcatggcttgcagagtggttgcggccagcacccgggagatggcgatgctcatagctcaggccttacagacgattaactatgggcgggatgatgagaagtgactgcggctgaggcaaagctgctcccaaggcctccctgggctgctgtgggctcctggggaggtggccctcgtggcccacgctccatgccagtggctcacgctctgctcctggctaccccagagggagttgtcacgctacagtgagtggctggccttttaaatcgacgtctctctcaccaggatttggtgtttagctgtttctctctttaatctcacgtagcctttttcaggttagtacgtgttcttctgtcagggccaaaactcaaatctcctgtgaaatacgtattgataatccaatcttgatttttccccccagaatataaatctcaggtaataaggctttagaactgctgataaagcggatcgttctcaggccctccccccggagtacttcagaatgcaataaatcaaaataatggc

SEQ ID NO: 1325 - protein, 288 aa, Homo sapiens
  ref <308>: DATABASE ACCESSION NUMBER: Refseq / NP_055029
  ref <309>: DATABASE ENTRY DATE: 2000-11-02
MKPSGEDQAALAAGPWEECFQAAVQLALRAGQIIRKALTEEKRVSTKTSAADLVTETDHLVEDLIISELRERFPSHRFIAEEAAASGAKCVLTHSPTWIIDPIDGTCNFVHRFPTVAVSIGFAVRQELEFGVIYHCTEERLYTGRRGRGAFCNGQRLRVSGETDLSKALVLTEIGPKRDPATLKLFLSNMERLLHAKAHGVRVIGSSTLALCHLASGAADAYYQFGLHCWDLAAATVIIREAGGIVIDTSGGPLDLMACRVVAASTREMAMLIAQALQTINYGRDDEK

SEQ ID NO: 1326 - DNA, 822 bp, Rattus norvegicus
  ref <308>: DATABASE ACCESSION NUMBER: Refseq / NM_019252
  ref <309>: DATABASE ENTRY DATE: 2002-11-05
gaaatggccaccgggacagaccaagcggtgggatttggccttgtcgccgttagcttgatcatcttcacctactacaccacttgggtgattcttttgccattcattgacagccagcatgtcatccacaagtacttcctgccccgtgcctacgctgtcctcctcccattggccgcaggcctcctgctgctcctgtttgtggggttgttcatcacctatgtgctgctgaagagccagaaggtgaccaagaaggctcagtgaaggtccagcggggatgaggctgcagaggccgcctccacatctcctccagggaagggaccaagggtcacagcctacaagacaggctggctgcactgcagccctctttgggacatggggctgcttacgactcagtttgacaaactggaaccctctctctctctctcggtcatccttttagaagccgagaagaaggtggggtgggaaacctcttgctcactcccttggggctcagaggctgagcagtgctggtcctgtccaccccacagtcaaagctccctgtcccttctacggagttgtgttctctcacctccgttctcctgctgtgctgataggccgagcaggctccaggatgtgtgcagccttctcgcctctctgtacaaatcctgtcccttcacaaggcagctcttccgagtctgacacttccaggctccatgaggacttctggacccacaaagcctggggaaagaccgataaaccccagaagcacaggggtgcgtccaggcagccgcattagaccccagctggcctgtttgggaaaacttagaaataaatgttaatcatgtg

SEQ ID NO: 1327 - protein, 84 aa, Rattus norvegicus
  ref <308>: DATABASE ACCESSION NUMBER: Refseq / NP_062125
  ref <309>: DATABASE ENTRY DATE: 2002-11-05
MATGTDQAVGFGLVAVSLIIFTYYTTWVILLPFIDSQHVIHKYFLPRAYAVLLPLAAGLLLLLFVGLFITYVLLKSQKVTKKAQ

SEQ ID NO: 1328 - DNA, 1871 bp, Rattus norvegicus
  misc_feature (1)..(1871): n=a, c, g or t
  ref <308>: DATABASE ACCESSION NUMBER: EMBL / AF023621
  ref <309>: DATABASE ENTRY DATE: 1997-11-01
gttattctcgtcctgactactttccaagtgccactggtaattgtgagttttggacagtccaagttatatcgcagtgaggattacggaaagaattttaaggacattacgaatctcatcaataacaccttcattcggacggagttcggcatggctattggtcccgagaactctggaaaggtgatattaacagcagaggtgtctgggggaagccgaggaggaagagtgttcaggtcatcagactttgccaagaactttgtacagacagacctcccctttcatcctctgactcagatgatgtacagccctcagaattctgattacctgttagctctcagcactgaaaatggcctgtgggtgtccaagaattttggggaaaaatgggaagaaatccacaaagcagtatgtttggccaaatggggaccaaacaacatcatcttctttaccacccatgtgaatggctcctgcactgatcttggtgccctggaattatggagaacatccgacttggggaaaaccttcaaaaccattggtgtgaaaatctactcatttggtcttgggggccgtttcctcttcgcctctgtgatggctgataaggatacaacaagaaggatccacgtgtcnacagaccaaggggacacatggagcatggcacagcttccctctgtgggacaggagcaattctattctattctggcagccaacgatgacatggtgttcatgcatgtagatgaacctggagatactggatttggtacaatctttacctctgatgaccgaggcattgtctactctaagtctctggacagacatctctataccaccacaggcggggagaccgactttaccaacgtgacttccctccgtggagtctatataacaagcacactctcagaagataattccattcagagcatgatcacttttgaccagggaagaaggtgggagcatctgcagaagccggagaacagcaagtgcgatgctaccgcaaagaacaagaatgagtgcagccttcatatccatgcttcttacagcatctcccagaagctaaatgttccaatggccccactctccgagcccaatgccgtgggcatagtcatcgctcacggtagtgtgggagacgccatctcggtgatggtcccagacgtgtacatctcagatgatgggggttactcttgggcaaagatgctagaaggaccgcattattataccatcctggactctggaggcatcatcgtggccattgaacacagcaaccgtcctatcaatgtgattaagttctccacagacgaaggccagtgctggcagagctatgtgttcagtcaggagcccgtctacttcaccgggctggcttccgagccgggagccaggtccatgaacatcagcatctggggattcacggagtctttccttacccgccagtgggtctcctacacaattgatttcaaagacatccttgagcgcaactgtgaagagaatgactataccacatggctggcacactccactgaccccggagattacaaagatggctgcattttgggctataaagagcagttcctacggctacggaagtcatccgtctgtcagaatggtcgagactatgttgtggccaagcagccatccatctgtccctgttccctggaggactttctctgtgactttggctacttccgtccagagaatgcctcagagtgtgtggagcagccggaactgaagggtcatgagttagagttctgtctgtatggcaaagaggagcacctgaccacaaatgggtaccggaaaatcccaggagacagatgccaagggggaatgaatccggcccgagaagtaaaagacttgcagaagaaatgcacaagcaacttcttaaaccc

SEQ ID NO: 1329 - DNA, 2847 bp, Rattus norvegicus
  ref <308>: DATABASE ACCESSION NUMBER: Refseq / NM_053527
  ref <309>: DATABASE ENTRY DATE: 2003-01-13
ggtcgctcttggaggaagtggcctctttgcgtcccgtgaccgaagcgccgttactactttctcgaagctccactcggccgcttgccggacactccgccgccaagatgccccggattatgatcaaagggggcgtgtggaggaatacggaggatgaaattcttaaagcagcggtaatgaaatatgggaaaaaccagtggtctaggattgcctcattgctgcataggaaatcggcaaagcagtgcaaagccagatggtacgaatggctggacccaagtattaagaaaactgaatggtccagagaagaggaagaaaagctcttgcacttggccaagctgatgccaacgcagtggaggaccattgctccaatcataggaaggacagcagcccagtgcttggagcactatgaattcctcctggacaaaactgcccaaagggacaatgaagaggaaacaacagatgacccccgaaaacttaagcctggagagatagatccaaatccagaaaccaaaccagcccggcctgatccaattgacatggatgaggatgaacttgagatgctttctgaggctcgagcccgtttggccaatactcaaggaaagaaggctaagaggaaagcaagagaaaagcagttggaagaagcaaggcgccttgctgccctccagaaaagacgggaacttcgagcagctggcatagagattcagaagaaaaggaaaaagaagagaggagttgattataatgctgaaatcccatttgaaaaaaagcctgctcttggtttttatgatacttctgaggagaattaccaggcccttgatgctgatttcaggaaattacgacagcaggatcttgacggggagctaagatctgaaaaagaaggaagagatagaaaaaaagacaaacagcatttaaaaaggaaaaaagaatctgatttaccatctgctatccttcaaactagtggtgtctctgagtttactaaaaagagaagcaaacttgtgctgcctgcccctcagatttcagatgctgaactccaggaagttgtcaaggtaggccaggccagtgaagttgcacggcagactgcggaggagtctgggatcacaaactctgcttctagcactctcctgtctgagtacaatgtcacaaacaacagcattgctctgagaacaccacggactccagcctcccaagacaggattctacaggaagctcagaacctcatggccttgaccaatgtggacactccactgaaaggtgggcttaacaccccactgcacgagagtgacttctctggtgtgacgccacagcggcaggttgtgcagactccaaatacggttctgtctacccctttcaggactccttctaatggagctgaagggctgactccccggagtggaacaaccccgaaaccagtcactaacgccaccccaggtagaacaccacttagagacaaattaaacattaatccagaggatggaatggcagactacagtgacccctcttacgtgaagcagatggaaagagaatctcgtgaacatctccgtctagggttgttaggcctccctgcaccgaagaatgattttgaaattgttctgccagaaaatgcggagaaggaactggaagaacgtgaaatggatgacacgtacatcgaggatgctgctgatgtggatgctcgaaagcaggccatacgagatgctgagcgtgtaaaggaaatgaaacgaatgcacaaagctgttcagaaggatctacccagaccgtctgaagtaaatgaaactattttaagacctttaaatgtagaaccacctctaacagatttgcagaaaagtgaggaactgatcaaaaaagagatgattacgatgcttcattatgacctgctgcatcacccctacgagccgtctgggaataagaaagggaaaaacgtcgggtttgctaccaacaattcagagcacattacctatcttgagcatagcccttatgagaagttctccaaagaggatctaaaaaaggcccaggatgttctggtgcaagagatggaagtggtaaaacaaggaatgagccacggagaactctccagtgaagcttacaaccaggtgtgggaggaatgctacagtcaagtcctctatcttcctgctcagagccgctacacacgggctaatcttgctagcaaaaaggacagaattgaatcacttgaaaagagacttgagataaacaggggtcacatgacaacagaagccaagagagctgcaaagatggaaaaaaagatgaagattttgctgggtggttaccagtcccgcgccatggggctcctgaagcagctgaacgacctgtgggaccaaatcgagcaggcgcacctggagctgcgcacctttgaggaactcaagaaacacgaagactctgctattccccgtaggctagagtgtctaaaggaagatgtgcagcggcaacaggaaagagagaaagagcttcagcaaagatatgcggatttgctgatggagaaagagactttacaggcaaagttctgaagcacagaggacgctctgcctcagaagaactagttgctggtttcgtactcagcaaggccgagactgacctttctcctcattgacaaagtcacccagcacctgtgggctctcggttgcttgttttgaatgatactgatcttgcgtgttctgtgttacaaacttggactccaggataataagggtttaaattatccagatgctcattctttgccagtgtcatatttacaaaatttcgtagtttaggcctttaatttaaaaagcctgattttaaatactgcctgcaagtaaacccttgaataaaaagaacatgtgaagaaaaaaaaaaaaaaaaaaa

SEQ ID NO: 1330 - protein, 802 aa, Rattus norvegicus
  ref <308>: DATABASE ACCESSION NUMBER: Refseq / NP_445979
  ref <309>: DATABASE ENTRY DATE: 2003-01-13
MPRIMIKGGVWRNTEDEILKAAVMKYGKNQWSRIASLLHRKSAKQCKARWYEWLDPSIKKTEWSREEEEKLLHLAKLMPTQWRTIAPIIGRTAAQCLEHYEFLLDKTAQRDNEEETTDDPRKLKPGEIDPNPETKPARPDPIDMDEDELEMLSEARARLANTQGKKAKRKAREKQLEEARRLAALQKRRELRAAGIEIQKKRKKKRGVDYNAEIPFEKKPALGFYDTSEENYQALDADFRKLRQQDLDGELRSEKEGRDRKKDKQHLKRKKESDLPSAILQTSGVSEFTKKRSKLVLPAPQISDAELQEVVKVGQASEVARQTAEESGITNSASSTLLSEYNVTNNSIALRTPRTPASQDRILQEAQNLMALTNVDTPLKGGLNTPLHESDFSGVTPQRQVVQTPNTVLSTPFRTPSNGAEGLTPRSGTTPKPVTNATPGRTPLRDKLNINPEDGMADYSDPSYVKQMERESREHLRLGLLGLPAPKNDFEIVLPENAEKELEEREMDDTYIEDAADVDARKQAIRDAERVKEMKRMHKAVQKDLPRPSEVNETILRPLNVEPPLTDLQKSEELIKKEMITMLHYDLLHHPYEPSGNKKGKNVGFATNNSEHITYLEHSPYEKFSKEDLKKAQDVLVQEMEVVKQGMSHGELSSEAYNQVWEECYSQVLYLPAQSRYTRANLASKKDRIESLEKRLEINRGHMTTEAKRAAKMEKKMKILLGGYQSRAMGLLKQLNDLWDQIEQAHLELRTFEELKKHEDSAIPRRLECLKEDVQRQQEREKELQQRYADLLMEKETLQAKF

SEQ ID NO: 1331 - DNA, 3012 bp, Homo sapiens
  ref <308>: DATABASE ACCESSION NUMBER: Refseq / NM_001253
  ref <309>: DATABASE ENTRY DATE: 2003-01-15
gctttggccagagtggtttgatggttttgtgttagtcttcctgcagctgagcttccacaagacactttttccctttcagccacccaatatctcgcgagacttgctattctgcgccccctcctaccttgcgcttgcgcagatcttcaaagcagaaggtcgcgcttggaggaagtggcggctttgagtccggtggcccaatcgctgttactacttctctgaagctcctctcggctgcttgccgagacaccctgccgccaagatgcctcgaattatgatcaaggggggcgtatggaggaataccgaggatgaaattctgaaagcagcggtaatgaaatatgggaaaaatcagtggtctaggattgcctcattgctgcatagaaaatcagcaaagcagtgcaaagccagatggtatgaatggctggatccaagcattaagaagacagaatggtccagagaagaagaggaaaaactcttgcacttggccaagttgatgccaactcagtggaggaccattgctccaatcattggaagaacagcggcccagtgcttagaacactatgaatttcttctggataaagctgcccaaagagacaatgaagaggaaacaacagatgatccacgaaaacttaaacctggagaaatagatccaaatccagaaacaaaaccagcgcggcctgatccaattgatatggatgaggatgaacttgagatgctttctgaagccagagcccgcttggctaatactcagggaaagaaggccaagaggaaagcaagagagaaacaattggaagaagcaagacgtcttgctgccctccaaaaaagaagagaacttcgagcagctggcatagaaattcagaagaaaagaaaaaggaagagaggagttgattataatgccgaaatcccatttgaaaaaaagcctgcccttggtttttatgatacttctgaggaaaactaccaagctcttgacgcagatttcaggaaattaagacaacaggatcttgatggggagctaagatctgaaaaagaaggaagagatagaaaaaaagacaaacagcatttgaaaaggaaaaaagaatctgatttaccatcagctattcttcaaactagtggtgtttctgaatttactaaaaagagaagcaaactagtacttcctgcccctcagatttcagatgcagaactccaggaagttgtaaaagtaggccaagcgagtgaaattgcacgtcaaactgccgaggaatctggcataacaaattctgcttccagtacacttttgtctgagtacaatgtcaccaacaacagcgttgctcttagaacaccacgaacaccagcttcccaggacagaattctgcaggaagcccagaacctcatggccctcaccaatgtggacaccccattgaaaggtggacttaataccccattgcatgagagtgacttctcaggtgtaactccacagcgacaagttgtacagactccaaacacagttctctctactccattcaggactccttctaatggagctgaagggctgactccccggagtggaacaactcccaaaccagttattaactctactccgggtagaactcctcttcgagacaagttaaacattaatcccgaggatggaatggcagactatagtgatccctcttacgtgaagcagatggaaagagaatcccgagaacatctccgtttagggttgttgggccttcctgcccctaagaatgattttgaaattgttctaccagaaaatgccgagaaggagctggaagaacgtgaaatagatgatacttacattgaagatgctgctgatgtggatgctcgaaagcaggccatacgagatgcagagcgtgtaaaggaaatgaaacgaatgcataaagctgtccagaaagatctgccaagaccatcagaagtaaatgaaactattctaagacccttaaatgtagaaccgcctttaacagatttacagaaaagtgaagaactaatcaaaaaagaaatgatcacaatgcttcattatgaccttctacatcacccttatgaaccatctggaaataaaaaaggcaaaactgtagggtttggtaccaataattcagagcacattacctatctggaacataatccttatgaaaagttctccaaagaagagctgaaaaaggcccaggatgttttggtgcaggagatggaagtggttaaacaaggaatgagccatggagagctctcaagtgaagcttataaccaggtgtgggaagaatgctacagtcaagttttatatcttcctgggcagagccgctacacacgggccaatctggctagtaaaaaggacagaattgaatcacttgaaaagaggctcgagataaacaggggtcacatgacgacagaagccaagagggctgcaaagatggaaaagaagatgaaaattttgcttgggggttaccagtctcgtgctatggggctcatgaaacagttgaatgacttatgggaccaaattgaacaggctcacttggagttacgcacttttgaagaactcaagaaacatgaagattctgctattccccggaggctagagtgtctaaaagaagacgttcagcgacaacaagaaagagaaaaggaacttcaacatagatatgctgatttgctgctggagaaagagactttaaagtcaaaattctgaagtacagtttatattctgtcacaggattaattaattgccggttttcatactctagaaggctgaaactgatgtttatcttcattgacaaatttacccaccatctgtggtttttcagttgtttattttaaatgatatcgatcttacacattctgtgtataaagaccttaactccacaggacggacattttagagtttaaattattaaggctatcattcttttagtaatgtcatatttgcaaacttttttagttttggcctttaatttaaaaagcctaattttaaagtgctgcctttgagtaactcttgaataaaaacaaaatataaaaaattgaaaaaaaaaaaaa

SEQ ID NO: 1332 - protein, 802 aa, Homo sapiens
  ref <308>: DATABASE ACCESSION NUMBER: Refseq / NP_001244
  ref <309>: DATABASE ENTRY DATE: 2003-01-15
MPRIMIKGGVWRNTEDEILKAAVMKYGKNQWSRIASLLHRKSAKQCKARWYEWLDPSIKKTEWSREEEEKLLHLAKLMPTQWRTIAPIIGRTAAQCLEHYEFLLDKAAQRDNEEETTDDPRKLKPGEIDPNPETKPARPDPIDMDEDELEMLSEARARLANTQGKKAKRKAREKQLEEARRLAALQKRRELRAAGIEIQKKRKRKRGVDYNAEIPFEKKPALGFYDTSEENYQALDADFRKLRQQDLDGELRSEKEGRDRKKDKQHLKRKKESDLPSAILQTSGVSEFTKKRSKLVLPAPQISDAELQEVVKVGQASEIARQTAEESGITNSASSTLLSEYNVTNNSVALRTPRTPASQDRILQEAQNLMALTNVDTPLKGGLNTPLHESDFSGVTPQRQVVQTPNTVLSTPFRTPSNGAEGLTPRSGTTPKPVINSTPGRTPLRDKLNINPEDGMADYSDPSYVKQMERESREHLRLGLLGLPAPKNDFEIVLPENAEKELEEREIDDTYIEDAADVDARKQAIRDAERVKEMKRMHKAVQKDLPRPSEVNETILRPLNVEPPLTDLQKSEELIKKEMITMLHYDLLHHPYEPSGNKKGKTVGFGTNNSEHITYLEHNPYEKFSKEELKKAQDVLVQEMEVVKQGMSHGELSSEAYNQVWEECYSQVLYLPGQSRYTRANLASKKDRIESLEKRLEINRGHMTTEAKRAAKMEKKMKILLGGYQSRAMGLMKQLNDLWDQIEQAHLELRTFEELKKHEDSAIPRRLECLKEDVQRQQEREKELQHRYADLLLEKETLKSKF

SEQ ID NO: 1333 - DNA, 1772 bp, Rattus norvegicus
  ref <308>: DATABASE ACCESSION NUMBER: Refseq / NM_053619
  ref <309>: DATABASE ENTRY DATE: 2003-01-13
ccgttgctgtcgggtcaccacagagcccaggagaagccaggacatggaccccataagtaacgacagcagtgaaatcacctatgattactctgatggaaccccaaatcctgacatgcctgcagatggcgtttacattccgaagatggaacctggggacattgcagcccttattatctacttggccgtgttcctggtaggagttaccggaaatgccctggtggtgtgggtgacagcctttgaggccaaacgtactgtcaacgccatttggtttctgaatctggcggtggccgacctcctctcgtgcttggcactgcctatcctgtttacgtccattgtaaagcataaccactggcccttcggtgaccaggcctgtatagtcctgccctcgctcattctgctcaacatgtactccagcatcctgctgctggccactattagtgccgaccgtttcctgctggtgttcaaacccatctggtgtcagaagttccgccggcctggcctggcctggatggcttgcggagtaacctgggtcttagcattgctcctcaccattccgtccttcgtgttccggcggatacataaggacccctactcagatagcattctatgtaatattgactatagtaagggtccgttcttcatagagaaggctatagccatcctgcggctgatggtgggtttcgtgttgcctctgctcactcttaacatctgctacaccttcctcctgatccggacctggagtcgcaaggccacgcgctccaccaagacgctcaaagtggtgatggcggtggtcacatgtttctttgtcttctggctaccctaccaggtaacaggggtgatattagcttggctgccccggtcctcatccacttttcagtcagtggagaggctgaactccttgtgcgtttccctggcctacatcaactgctgtgttaaccctatcatctacgtcatggctggccagggtttccatgggagactccgaaggtcactccccagcatcatacgaaacgtgctctctgaggactccttgggcagggacagcaagagtttcactcggtccacgatggatacctccacccagaagagtcaggcagtgtagaggagatgccacaactgcctagctgctccttttccagtcctcctccccttcctccttcctcctctcacccctcctcccttcctcccatctctttgcatgtttaattttatgtgattctctttaaattgccctgactagccttgagcccaggatgctcacggatgctgagattataggtaaaaattcctttggagagaaacattacattaagatattactgggctttttttctgaggcaggccttggcctcgttgcccatctgcagtgtctaggcagatacacctagtgatgacgtctaggggtcaggtaacagagaacccaggtctcgagggaacccggggctcacggatacactacgtgagtaagctatagccctagactccaggcaacaaataagcacccaccctttatttcttttctatgtctgatttttttgtttatttgagacaaagtccatgtaggctagtctagccatggactcctcctgtgatcatcctccagaggtcgagactgtagacctgtgctaccatgcccgacctatcctttatttctgcaattttgtcttttcaaaaatggtattcgacagaacccaacatatccaagttttgtaaaaacaactgtgcacggcttacacgataaaaaatttttgtttttttaaaaaggcaaaaaa

SEQ ID NO: 1334 - protein, 352 aa, Rattus norvegicus
  ref <308>: DATABASE ACCESSION NUMBER: Refseq / NP_446071
  ref <309>: DATABASE ENTRY DATE: 2003-01-13
MDPISNDSSEITYDYSDGTPNPDMPADGVYIPKMEPGDIAALIIYLAVFLVGVTGNALVVWVTAFEAKRTVNAIWFLNLAVADLLSCLALPILFTSIVKHNHWPFGDQACIVLPSLILLNMYSSILLLATISADRFLLVFKPIWCQKFRRPGLAWMACGVTWVLALLLTIPSFVFRRIHKDPYSDSILCNIDYSKGPFFIEKAIAILRLMVGFVLPLLTLNICYTFLLIRTWSRKATRSTKTLKVVMAVVTCFFVFWLPYQVTGVILAWLPRSSSTFQSVERLNSLCVSLAYINCCVNPIIYVMAGQGFHGRLRRSLPSIIRNVLSEDSLGRDSKSFTRSTMDTSTQKSQAV

SEQ ID NO: 1335 - DNA, 2328 bp, Homo sapiens
  ref <308>: DATABASE ACCESSION NUMBER: Refseq / NM_001736
  ref <309>: DATABASE ENTRY DATE: 2000-10-31
agggggagcccaggagaccagaacatgaactccttcaattataccacccctgattatgggcactatgatgacaaggataccctggacctcaacacccctgtggataaaacttctaacacgctgcgtgttccagacatcctggccttggtcatctttgcagtcgtcttcctggtgggagtgctgggcaatgccctggtggtctgggtgacggcattcgaggccaagcggaccatcaatgccatctggttcctcaacttggcggtagccgacttcctctcctgcctggcgctgcccatcttgttcacgtccattgtacagcatcaccactggccctttggcggggccgcctgcagcatcctgccctccctcatcctgctcaacatgtacgccagcatcctgctcctggccaccatcagcgccgaccgctttctgctggtgtttaaacccatctggtgccagaacttccgaggggccggcttggcctggatcgcctgtgccgtggcttggggtttagccctgctgctgaccataccctccttcctgtaccgggtggtccgggaggagtactttccaccaaaggtgttgtgtggcgtggactacagccacgacaaacggcgggagcgagccgtggccatcgtccggctggtcctgggcttcctgtggcctctactcacgctcacgatttgttacactttcatcctgctccggacgtggagccgcagggccacgcggtccaccaagacactcaaggtggtggtggcagtggtggccagtttctttatcttctggttgccctaccaggtgacggggataatgatgtccttcctggagccatcgtcacccaccttcctgctgctgaataagctggactccctgtgtgtctcctttgcctacatcaactgctgcatcaaccccatcatctacgtggtggccggccagggcttccagggccgactgcggaaatccctccccagcctcctccggaacgtgttgactgaagagtccgtggttagggagagcaagtcattcacgcgctccacagtggacactatggcccagaagacccaggcagtgtaggcgacagcctcatgggccactgtggcccgatgtccccttccttcccggccattctccctcttgttttcacttcacttttcgtgggatggtgttaccttagctaactaactctcctccatgttgcctgtctttcccagacttgtccctccttttccagcgggactcttctcatccttcctcatttgcaaggtgaacacttccttctagggagcaccctcccaccccccacccccccccacacaccatctttccatcccaggcttttgaaaaacaaacagaaacccgtgtatctgggatatttccatatggcaataggtgtgaacagggaactcagaatacagacaagtagaaagattctcgcttaaaaaaatgtatttattttatggcaagttggaaaatatgtaactggaatctcaaaagttctttgggacaaaacagaagtccatggagttatctaagctcttgtaagtgagttaatttaaaaaagaaaattaggctgagagcagtggctcacgcctgtaatcccagaactttgggaggctaaggtgggtggatcacctgaggtcaagagttccagaccaggctggccagcatggtgaaaccccgtctgtactaaaaatacaaaaaattaactgggcatggtagtgggtgcctgtaatcccagctacttgggaggctgaggtgggagaattgctcgaaccttggaggtggaggttgtggtgagccatgatcgcaccactgcactctagcctgggtgaccgagggaggctctgtctcaaaagcaaagcaaaaacaaaaacaaaaacacctaaaaaacctgcagttttgtttgtactttgtttttaaattatgctttctattttgagatcattgcaaactcaacacaattgtaagtaatgatacagagggatcttgtgtacccttcacccagcctcccccaatggcaacatcttgcaaaactacaatgtagtctcataaccaggatattgacattgatacagtgaagatacaggacattctcatcaccacagggatccccaggatgcccacttccctccacccccacaccccagccgtgtccctaacccctggcaaccaggaatccactctccatttctataatgttgtcatttcaagaatgttattcaatggaatcatatagtatgtaacctgttttgagcttaaaaaaaaaagtatacatgactttaatgaggaaaataaaaatgaatattgaaaaaaaaaactttagag

SEQ ID NO: 1336 - protein, 350 aa, Homo sapiens
  ref <308>: DATABASE ACCESSION NUMBER: Refseq / NP_001727
  ref <309>: DATABASE ENTRY DATE: 2000-10-31
MNSFNYTTPDYGHYDDKDTLDLNTPVDKTSNTLRVPDILALVIFAVVFLVGVLGNALVVWVTAFEAKRTINAIWFLNLAVADFLSCLALPILFTSIVQHHHWPFGGAACSILPSLILLNMYASILLLATISADRFLLVFKPIWCQNFRGAGLAWIACAVAWGLALLLTIPSFLYRVVREEYFPPKVLCGVDYSHDKRRERAVAIVRLVLGFLWPLLTLTICYTFILLRTWSRRATRSTKTLKVVVAVVASFFIFWLPYQVTGIMMSFLEPSSPTFLLLNKLDSLCVSFAYINCCINPIIYVVAGQGFQGRLRKSLPSLLRNVLTEESVVRESKSFTRSTVDTMAQKTQAV

SEQ ID NO: 1337 - DNA, 1195 bp, Rattus norvegicus
  ref <308>: DATABASE ACCESSION NUMBER: EMBL / J01878
  ref <309>: DATABASE ENTRY DATE: 2000-03-04
attcttagtatatgactatataagtacacattcagatctttatttccataacctaagtttttatttttttttgttgcagcgcttggcagttttatatacattcatacatacatacatacatacatataatatttgcaataacagaataataaagaattatacaatcaagtatatagttgatgtttgatgtctgtagcaaatatgaccaattctgtaacgactcagatgaaactggaaattatttttcctgtactttctgagtacaagaaggtttacattcatcaacattctgttagtaatgatgcaggaaactacatgaataccaaataaaactgttgaataaacgattcgtatcatgctgtatttaaaacaaatacttcagaaattgccagttttaggctgctggtgtagtgtgttctggatattttaaatgtgtagtcgctgactcacttggcctcctgagatggtttataaatataacaagtgtggaggagagagcgattctagagcacagtttagaaagccttgtgtcaggggcttgttgctcacgcactggttgctttcccatagtcacttccggctagtacagagattaacttccattcaggattccacgaatctactggctgtgttttcagacagtgcccttttcatgataagatcttcttcctccaactcccaccccctacatacgcctctgctttcttcatttcaaatcaaagtattttttcctcttcgacatcgtgaagccgtgctgccttcagagctctgagtcatgggcagagagtggctcccccagcattctgcgttgggtcccacatacttccaaatgtgcacatttgcggggtgaatcaatgctgtggaggaggattccagtaactctggcccttcccactgcctgcacaggctgcccatgatttcctcccaccccatctgtcaagcattgaaagtgaagagaaattctgtccaatatgttgtttgaagggataccaaagggaggaaaaagctcccacccaaaataatgggctttttctttcacataatgtaaacatgtaaaatattgatgggtatcaaatcttcatttaaagatctggtacagggggctggggatttagctcagtggtagagcgcttacctaggaagcgcaaggccctgggttcggtccccagctccgaaaaaaagaaccaaaaaaaaa

SEQ ID NO: 1338 - DNA, 4358 bp, Rattus norvegicus
  ref <308>: DATABASE ACCESSION NUMBER: Refseq / NM_031027
  ref <309>: DATABASE ENTRY DATE: 2003-01-13
aattcccgcagtggagggagggtcagtgtgcgggagactgaggccagaaagcgttgccatggcgggtgtgctgagcagggacgcgccggacatcgagagtatcctggctttaaatcctcgaatacaagctcatgcgactcttcgttccaccatggccaagaaactagacaagaaacattggaaaaggaacactgataagaactgctttatctgtgagaagctggagaataattttgatgacatcaagcacacgactcttggtgagcgaggggctctccgagaagcagtgagatgcttgaaatgtgcagatgctccctgccagaagagttgtcccacgtctcttgacattaagtcattcatcacaagtatcgccaacaagaactactatggtgcagctaagctgattttttccgataatcctcttggtcttacttgcggaatggtttgtccaacatctgacctctgtgtcggaggatgcaacttacatgctactgaagaggggccaattaatattggtggactgcagcagtttgctaccgaggtgttcaaagcgatgaacatcccacagatcagaagcccgttgctgcctcctccggaacatatgccggaagcttactcagcaaaaattgcgctgtttggagctgggcctgcgagtataagctgtgcctcctttctggctcgactgggctattccgacatcaccatatttgaaaagcaagaatacgttggtggcttaagcacttctgaaatccctcagtttcggctcccatatgatgtcgtgaattttgagattgagctcatgaaggaccttggtgtcaagataatttgtggtaaaagcatttccacagatgaaatgactcttagtactttgaaagaaaatggctacaaagctgcttttattggaataggtttgccagaacccaaaaaggaccatattttccaaggcttgacacaagtccagggattttacacatccaaagactttttgccacttgtcgccaaaggtagcaaaccaggaatgtgcgcctgtcactctccattgccatccgtgaggggagccgtgattgtactcggagctggggacactgcgtttgactgtgcaacatccgctctgcgctgcggagcacgtcgcgtgttcatcgtcttcagaaagggctttgctaatattcgagctgttccagaggagatggagcttgctaaggaagagaaatgtgaatttttgcctttcctttccccacggaaggttatagtcaaagatggaaagattgtaggaatgcagtttgttcgaactgagcaggatgaaaccggaaactgggtcgaagatgaagagcagatagtgcgtttgaaggctgatgtggttattagcccctttggatctgtcttggatgatcccaaagtgatagaagcattgagtcccatcaagtttaacagatggggtctccctgaagtaaacccagaaaccatgcaaaccagtgagccatgggtatttgcaggtggtgatgttgtgggtatggctaacaccacagtggaatctgtcaacgatggaaaacaggcttcatggtacattcacgagtacatacaggcacaatatggagccttggtgccttcccagcctacactgcccctgttttacactcctgttgacctcgtggacatcagtgtggaaatggcagggttgaggttccccaatccctttggccttgccagtgcgacaccagccactagcacaccaatgattcgaagggcctttgaagcaggatggggttttgctttgaccaaaactttctctcttgataaggacatcgtgacaaacgtctcacccagaatcatccgagggaccacttctggccccttgtatggccctggacaaagctctttcctcaacattgagctcatcagtgagaaaacagctgcatattggtgtcacagtgtcaccgaactaaaggctgacttcccggacaacatcctgatcgccagcatcatgtgcagttacaacaaaaatgactggatggaactctccaaaatggctgaggcttctggagcagatgccctggagttaaatttatcctgtccacatggcatgggggagagaggaatgggtctggcttgtgggcaggatccagagctggtgaggaacatctgtcgctgggtgagacaatctgttcgggttccattttttgccaagttgaccccaaatgtcactgatattgtaagcatcgcaagagcagcaaaggaaggtggtgcagatggcgttacagccaccaacactgtctcaggcctgatgggactgaaagctgatggttcaccctggccttcggtgggcagtggaaagaggactacatatggaggagtatcaggaactaccatcaggcctattgctttgagagctgtgaccgccattgcccgcgctttgcctgggtttcctatactggccacaggtggaattgactcagctgaaagtggacttcagtttcttcatagtggtgcttcagttctccaggtatgcagtgctattcagaatcaggacttcactgtgattgaagattactgcactggcctcaaagctctgctttatctgaagagtattgaagagttatcagactgggatgggcagagtccacccactatgagtcatcagaaagggaaaccagttccacacattgctgagctcatgggacagaaacttccaagctttggaccgtaccttgaacggcgcaagaaaatcctagcagcaagtaaaatcagagagaatgatcaaaacagagcttgctcacctctccagagaaagcactttaactcccaaaagccgattcctgccatcaaggatgtaattggaaaatcactgcaatacctggggacgtttggtgagctgaacatcatggagcaagttgtggccctgatcgatgaggaaatgtgtatcaattgcggcaaatgttacatgacctgtaatgactctggctaccaggctatacagttcgatccagaaactcacctgcctactgttagcgacacatgtacaggctgcactctctgcctcagcgtctgccctattatggactgtatcaggatggtttccagggcaacaccttatgaaccaaagagaggcctaccattagccgtgaagccggtgtgttaaggtgatttgtaagacagctgctgtgaactttgatgttaccaacacaggctgatctttaaaacaataacaattgtaatcattatgatcagttctttccaaatttgatagctatgcatatataatttctaaataagcgtctaaattggaaaacaatgtctaatgccagtgaccaattaatggtcataaaatggaataattcttctctgaagtagctggtgagtaactgtggaccagttaattggatatgctcggtcagttgtctgctgtgaaaaattaactttttcatggcaattagtgtgacaatttctaaattgccctatgccgtgctcactctttgatttctaattgtaagcgaaatgaactattttggaacggagtgcgctttcatatacaggaaactgtttccaaggaaacactttgtaattaaaaattacctgtaattttaacactgcttctaaggacatgcaattagccccattaagaacaattgaagagagtcacgtcattatttactatgacaaggggaacacaacctggcagagggttttctagagttttcttacatccccctttgctgaagtaactcactctttggtgctggacactggaagggagattatttcctgactaaaatactgttcaccactcatccctgaaacaggtgtcagactgcccaggaatggagcacaggtcatttttatttgaatagcaaagctgtgctcctgatgaaataagatataaagatggatatctagtgaaggccacactgtcactgggcacagaccactcggtctgcttctcatagtcaccttcattatgagagcaattaacgttcaaacaagggctagattacacagcactgagccataggcttcacgctacaacagcaaaaacatcgtatctgaaatttatacataatgagacaaatgggtctgacgacgcttgaatgctcgtatgatttcaaaattgttgaaatcgacgtgtacttttaaatattgataaatattttctgtctctttatttttataatcaataaatagcatcatatgaactcatttattccttctttatgacatactttaaaatgaatctataggaaataagtgagaaataacagtctgtggcatatttctatgataaatgcacgatatctgcaagtgcactttaaaaatgtgtatgactaaataatcacaaataaaattttatgatttattgtggaatt

SEQ ID NO: 1339 - protein, 1025 aa, Rattus norvegicus
  ref <308>: DATABASE ACCESSION NUMBER: Refseq / NP_112289
  ref <309>: DATABASE ENTRY DATE: 2003-01-13
MAGVLSRDAPDIESILALNPRIQAHATLRSTMAKKLDKKHWKRNTDKNCFICEKLENNFDDIKHTTLGERGALREAVRCLKCADAPCQKSCPTSLDIKSFITSIANKNYYGAAKLIFSDNPLGLTCGMVCPTSDLCVGGCNLHATEEGPINIGGLQQFATEVFKAMNIPQIRSPLLPPPEHMPEAYSAKIALFGAGPASISCASFLARLGYSDITIFEKQEYVGGLSTSEIPQFRLPYDVVNFEIELMKDLGVKIICGKSISTDEMTLSTLKENGYKAAFIGIGLPEPKKDHIFQGLTQVQGFYTSKDFLPLVAKGSKPGMCACHSPLPSVRGAVIVLGAGDTAFDCATSALRCGARRVFIVFRKGFANIRAVPEEMELAKEEKCEFLPFLSPRKVIVKDGKIVGMQFVRTEQDETGNWVEDEEQIVRLKADVVISPFGSVLDDPKVIEALSPIKFNRWGLPEVNPETMQTSEPWVFAGGDVVGMANTTVESVNDGKQASWYIHEYIQAQYGALVPSQPTLPLFYTPVDLVDISVEMAGLRFPNPFGLASATPATSTPMIRRAFEAGWGFALTKTFSLDKDIVTNVSPRIIRGTTSGPLYGPGQSSFLNIELISEKTAAYWCHSVTELKADFPDNILIASIMCSYNKNDWMELSKMAEASGADALELNLSCPHGMGERGMGLACGQDPELVRNICRWVRQSVRVPFFAKLTPNVTDIVSIARAAKEGGADGVTATNTVSGLMGLKADGSPWPSVGSGKRTTYGGVSGTTIRPIALRAVTAIARALPGFPILATGGIDSAESGLQFLHSGASVLQVCSAIQNQDFTVIEDYCTGLKALLYLKSIEELSDWDGQSPPTMSHQKGKPVPHIAELMGQKLPSFGPYLERRKKILAASKIRENDQNRACSPLQRKHFNSQKPIPAIKDVIGKSLQYLGTFGELNIMEQVVALIDEEMCINCGKCYMTCNDSGYQAIQFDPETHLPTVSDTCTGCTLCLSVCPIMDCIRMVSRATPYEPKRGLPLAVKPVC

SEQ ID NO: 1340 - DNA, 4407 bp, Homo sapiens
  ref <308>: DATABASE ACCESSION NUMBER: Refseq / NM_000110
  ref <309>: DATABASE ENTRY DATE: 2000-10-31
tttcgactcgcgctccggctgctgtcacttggctctctggctggagcttgaggacgcaaggagggtttgtcactggcagactcgagactgtaggcactgccatggcccctgtgctcagtaaggactcggcggacatcgagagtatcctggctttaaatcctcgaacacaaactcatgcaactctgtgttccacttcggccaagaaattagacaagaaacattggaaaagaaatcctgataagaactgctttaattgtgagaagctggagaataattttgatgacatcaagcacacgactcttggtgagcgaggagctctccgagaagcaatgagatgcctgaaatgtgcagatgccccgtgtcagaagagctgtccaactaatcttgatattaaatcattcatcacaagtattgcaaacaagaactattatggagctgctaagatgatattttctgacaacccacttggtctgacttgtggaatggtatgtccaacctctgatctatgtgtaggtggatgcaatttatatgccactgaagagggacccattaatattggtggattgcagcaatttgctactgaggtattcaaagcaatgagtatcccacagatcagaaatccttcgctgcctcccccagaaaaaatgtctgaagcctattctgcaaagattgctctttttggtgctgggcctgcaagtataagttgtgcttcctttttggctcgattggggtactctgacatcactatatttgaaaaacaagaatatgttggtggtttaagtacttctgaaattcctcagttccggctgccgtatgatgtagtgaattttgagattgagctaatgaaggaccttggtgtaaagataatttgcggtaaaagcctttcagtgaatgaaatgactcttagcactttgaaagaaaaaggctacaaagctgctttcattggaataggtttgccagaacccaataaagatgccatcttccaaggcctgacgcaggaccaggggttttatacatccaaagactttttgccacttgtagccaaaggcagtaaagcaggaatgtgcgcctgtcactctccattgccatcgatacggggagtcgtgattgtacttggagctggagacactgccttcgactgtgcaacatctgctctacgttgtggagctcgccgagtgttcatcgtcttcagaaaaggctttgttaatataagagctgtccctgaggagatggagcttgctaaggaagaaaagtgtgaatttctgccattcctgtccccacggaaggttatagtaaaaggtgggagaattgttgctatgcagtttgttcggacagagcaagatgaaactggaaaatggaatgaagatgaagatcagatggtccatctgaaagccgatgtggtcatcagtgcctttggttcagttctgagtgatcctaaagtaaaagaagccttgagccctataaaatttaacagatggggtctcccagaagtagatccagaaactatgcaaactagtgaagcatgggtatttgcaggtggtgatgtcgttggtttggctaacactacagtggaatcggtgaatgatggaaagcaagcttcttggtacattcacaaatacgtacagtcacaatatggagcttccgtttctgccaagcctgaactacccctcttttacactcctattgatctggtggacattagtgtagaaatggccggattgaagtttataaatccttttggtcttgctagcgcaactccagccaccagcacatcaatgattcgaagagcttttgaagctggatggggttttgccctcaccaaaactttctctcttgataaggacattgtgacaaatgtttcccccagaatcatccggggaaccacctctggccccatgtatggccctggacaaagctcctttctgaatattgagctcatcagtgagaaaacggctgcatattggtgtcaaagtgtcactgaactaaaggctgacttcccagacaacattgtgattgctagcattatgtgcagttacaataaaaatgactggacggaacttgccaagaagtctgaggattctggagcagatgccctggagttaaatttatcatgtccacatggcatgggagaaagaggaatgggcctggcctgtgggcaggatccagagctggtgcggaacatctgccgctgggttaggcaagctgttcagattcctttttttgccaagctgaccccaaatgtcactgatattgtgagcatcgcaagagctgcaaaggaaggtggtgccaatggcgttacagccaccaacactgtctcaggtctgatgggattaaaatctgatggcacaccttggccagcagtggggattgcaaagcgaactacatatggaggagtgtctgggacagcaatcagacctattgctttgagagctgtgacctccattgctcgtgctctgcctggatttcccattttggctactggtggaattgactctgctgaaagtggtcttcagtttctccatagtggtgcttccgtcctccaggtatgcagtgccattcagaatcaggatttcactgtgatcgaagactactgcactggcctcaaagccctgctttatctgaaaagcattgaagaactacaagactgggatggacagagtccagctactgtgagtcaccagaaagggaaaccagttccacgtatagctgaactcatggacaagaaactgccaagttttggaccttatctggaacagcgcaagaaaatcatagcagaaaacaagattagactgaaagaacaaaatgtagctttttcaccacttaagagaagctgttttatccccaaaaggcctattcctaccatcaaggatgtaataggaaaagcactgcagtaccttggaacatttggtgaattgagcaacgtagagcaagttgtggctatgattgatgaagaaatgtgtatcaactgtggtaaatgctacatgacctgtaatgattctggctaccaggctatacagtttgatccagaaacccacctgcccaccataaccgacacttgtacaggctgtactctgtgtctcagtgtttgccctattgtcgactgcatcaaaatggtttccaggacaacaccttatgaaccaaagagaggcgtacccttatctgtgaatccggtgtgttaaggtgatttgtgaaacagttgctgtgaactttcatgtcacctacatatgctgatctcttaaaatcatgatccttgtgttcagctctttccaaattaaaacaaatatacattttctaaataaaaatatgtaatttcaaaatacatttgtaagtgtaaaaaatgtctcatgtcaatgaccattcaattagtggcataaaatagaataattcttttctgaggatagtagttaaataactgtgtggcagttaattggatgttcactgccagttgtcttatgtgaaaaattaactttttgtgtggcaattagtgtgacagtttccaaattgccctatgctgtgctccatatttgatttctaattgtaagtgaaattaagcattttgaaacaaagtactctttaacatacaagaaaatgtatccaaggaaacattttatcaataaaaattacctttaattttaatgctgtttctaagaaaatgtagttagctccataaagtacaaatgaagaaagtcaaaaattatttgctatggcaggataagaaagcctaaaattgagtttgtggactttattaagtaaaatccccttcgctgaaattgcttatttttggtgttggatagaggatagggagaatatttactaactaaataccattcactactcatgcgtgagatgggtgtacaaactcatcctcttttaatggcatttctctttaaactatgttcctaaccaaatgagatgataggatagatcctggttaccactcttttactgtgcacatatgggccccggaattctttaatagtcaccttcatgattatagcaactaatgtttgaacaaagctcaaagtatgcaatgcttcattattcaagaatgaaaaatataatgttgataatatatattaagtgtgccaaatcagtttgactactctctgttttagtgtttatgtttaaaagaaatatattttttgttattattagataatatttttgtatttctctattttcataatcagtaaatagtgtcatataaactcatttatctcctcttcatggcatcttcaatatgaatctataagtagtaaatcagaaagtaacaatctatggcttatttctatgacaaattcaagagctagaaaaataaaatgtttcattatgcacttttagaaatgcatatttgccacaaaacctgtattactgaataatatcaaataaaatatcataaagcatttt

SEQ ID NO: 1341 - protein, 1025 aa, Homo sapiens
  ref <308>: DATABASE ACCESSION NUMBER: Refseq / NP_000101
  ref <309>: DATABASE ENTRY DATE: 2000-10-31
MAPVLSKDSADIESILALNPRTQTHATLCSTSAKKLDKKHWKRNPDKNCFNCEKLENNFDDIKHTTLGERGALREAMRCLKCADAPCQKSCPTNLDIKSFITSIANKNYYGAAKMIFSDNPLGLTCGMVCPTSDLCVGGCNLYATEEGPINIGGLQQFATEVFKAMSIPQIRNPSLPPPEKMSEAYSAKIALFGAGPASISCASFLARLGYSDITIFEKQEYVGGLSTSEIPQFRLPYDVVNFEIELMKDLGVKIICGKSLSVNEMTLSTLKEKGYKAAFIGIGLPEPNKDAIFQGLTQDQGFYTSKDFLPLVAKGSKAGMCACHSPLPSIRGVVIVLGAGDTAFDCATSALRCGARRVFIVFRKGFVNIRAVPEEMELAKEEKCEFLPFLSPRKVIVKGGRIVAMQFVRTEQDETGKWNEDEDQMVHLKADVVISAFGSVLSDPKVKEALSPIKFNRWGLPEVDPETMQTSEAWVFAGGDVVGLANTTVESVNDGKQASWYIHKYVQSQYGASVSAKPELPLFYTPIDLVDISVEMAGLKFINPFGLASATPATSTSMIRRAFEAGWGFALTKTFSLDKDIVTNVSPRIIRGTTSGPMYGPGQSSFLNIELISEKTAAYWCQSVTELKADFPDNIVIASIMCSYNKNDWTELAKKSEDSGADALELNLSCPHGMGERGMGLACGQDPELVRNICRWVRQAVQIPFFAKLTPNVTDIVSIARAAKEGGANGVTATNTVSGLMGLKSDGTPWPAVGIAKRTTYGGVSGTAIRPIALRAVTSIARALPGFPILATGGIDSAESGLQFLHSGASVLQVCSAIQNQDFTVIEDYCTGLKALLYLKSIEELQDWDGQSPATVSHQKGKPVPRIAELMDKKLPSFGPYLEQRKKIIAENKIRLKEQNVAFSPLKRSCFIPKRPIPTIKDVIGKALQYLGTFGELSNVEQVVAMIDEEMCINCGKCYMTCNDSGYQAIQFDPETHLPTITDTCTGCTLCLSVCPIVDCIKMVSRTTPYEPKRGVPLSVNPVC

SEQ ID NO: 1342 - DNA, 3189 bp, Rattus norvegicus
  ref <308>: DATABASE ACCESSION NUMBER: Refseq / NM_138884
  ref <309>: DATABASE ENTRY DATE: 2003-01-13
ttcagaatcactacttgaagcttcagatcccttctctacaatgaacctcagcactgcaaaccaccacatacccctaaatgatggtaacagcattccgatcatcgggcttggaacctactcagaccctagaccggtacctggcaagacctttatagcagtgaagacagctattgacgaggggtaccggcatattgatggggcctacgtctaccgaaatgaacatgaagtcggtgaggccatcagagaaaaggtggcagaagggaaggtaaagagggaagagattttctactgtggaaagttatggagtacagaccatgatccagagatggtccgcccagccctggaaaggaccctgcagaccctcaagctagattacatagacctttatatcattgagatgcccatggcctttaagcctggagaggaattttatcctaaagatgagaatggccgagtgatataccacaaatcaaatctgtgtgccacgtgggaggcactggaagcttgcaaagacgctggcttggtgaaatcccttggggtgtctaattttaaccgcaggcagctggaggtcatcttgaacaagccaggactcaagtacaagcctgtcaccaaccaggtggagtgccacccgtatttcacccagacaaaactccttgaagtttctgccagcagcatgacatcgttcattgtcgcatacagccccttagggacctgtcgcaacccgttatgggtgaatgtatcttctccacccttgttaaaggatgaactcctaacctcgctggggaaaaagtacaataagacacaagctcaaattgtgttgcgtttcgacatccagcgagggttggttgtcatccctaaaagtactacccctgaaaggatcaaagaaaactttcagatctttgacttctctctcaccaaagaagaaatgaaggacattgaagccttgaataaaaacgtgcgctttgtggagatgctcatgtggagtgatcatcctgaatacccatttcatgacgaatactgaacatggaaatttcttcagtggagttttttttttgtctttcattcgggatcttgagctgattaatcccctccagtcgtagaaataaatggggtcttgctatcttcagattaagttgagcagaatacaccatgcttaacttgtgtatagtattaattcaacttagctctgatgaagagaagatttaaatatatctaaatagtttgttggaaaatgctttactagtatctttagctcaatgtgttctagattgttgatggaaattaccgaactttaattcaaaaataacaaaatatataaaatacaagatacaatataaaatataaaatacaaaaatataaaaacaggttctaacccaggagtctgagactaccatagggagtttgatttgtttagcatttagcaggacaacaaaagaggttggcatgcttccaggtgctgaccataaccatgacccaaacaaggtcatggacacaagatggacacagccaagacacaaatccacataccaatattaatgcaccttgagtatagacagaactgaaagtctagaaagtctaaagaagaacataaagcaggatgtcccggggctagaggttctcactggaggacttgcctggcagactggagacccagggtgagggtgtgggtgaggactatcagcaaagccataacgattctgtttttaccctttgtttccatccagtgtgcccattcagcttttaatgtgcttgaaggacagacagttaccgattccttcttaaattgtttttgttcagggcagtggggaattgagacagggtctcaggtagtctgctcatgtagctgcttacaaacttgctgtgcagctgagaccagttttgaattctgaacccctggtctctcttccatttttcatggcctgagcttccacctgactggtaagtccccacttgtactgtgctgtaatcattcttgcccacttcatcaaggaaaccaccatgtaaagtggcaagaaacaatcaatatatacaaccaagatttgtatacaatatggtctgaagatggtgatttttaaaagaatgatatttaaatagccatttctttctttctttctgaatctttaaaaattattttatttatgtgcattggtgttagctgcatgtgtatctatgaggaattgtttgaactcatggaactggagttacagacagtggtgagctgtaggtaggtgctgggaattgaacccaagtcattgggaagagctgcaagtgctcttaactgctgagccatctccccagcccccaaatgaatttgggaaatactagaagataaagctttgtaaagtagtttttaagatcttaagaatatttgaggtacgtatctgaattttgacaaagctgcaagttcttttttttaaattggatttttaaaaatttatttacatttcaaatgttatcccctctcctgggttcccatccacagacctccctatctcatcccccctctcccttcttctatgagagtgttcacccacctacccactccttccctcctccctgccctgacattcccctacactagggggtcgagtcttggcaggaccaagggcctctcctcccattggtgcccaacaaggccatcctctgctacataggcagctggagccatgggtctgtccatgtgtctctctggatggtggtttagtccctgggagctctggttggttggttctgttgttatggggttgcaaacccttcagctcctttaatcctttctctaattcctccattggggaccctgttctcagttctatggttggctgtgagcatccacctgtgtatttgtcatgctctggcagagcctctcaggagaatcaggctcctgtcagcagagcacaagtaattttagcgtatataaatttttaaaaagtgataaatgattacaactgtatctatttttaattcatctgaaatacagtacatttgtttatattagatcacttccaaagggtgagagatctctaatatatttaattcatagagaatcaatggccgaagagaataagttttgagaattatcacttaaaaatgtgatcaacatgaaccatttttgttcaatactgttcaatattgttaacaatgctgttctctggaaaatattttattcacatgaattaataaaatataatg

SEQ ID NO: 1343 - protein, 326 aa, Rattus norvegicus
  ref <308>: DATABASE ACCESSION NUMBER: Refseq / NP_620239
  ref <309>: DATABASE ENTRY DATE: 2003-01-13
MNLSTANHHIPLNDGNSIPIIGLGTYSDPRPVPGKTFIAVKTAIDEGYRHIDGAYVYRNEHEVGEAIREKVAEGKVKREEIFYCGKLWSTDHDPEMVRPALERTLQTLKLDYIDLYIIEMPMAFKPGEEFYPKDENGRVIYHKSNLCATWEALEACKDAGLVKSLGVSNFNRRQLEVILNKPGLKYKPVTNQVECHPYFTQTKLLEVSASSMTSFIVAYSPLGTCRNPLWVNVSSPPLLKDELLTSLGKKYNKTQAQIVLRFDIQRGLVVIPKSTTPERIKENFQIFDFSLTKEEMKDIEALNKNVRFVEMLMWSDHPEYPFHDEY

SEQ ID NO: 1344 - DNA, 2694 bp, Homo sapiens
  ref <308>: DATABASE ACCESSION NUMBER: Refseq / NM_005989
  ref <309>: DATABASE ENTRY DATE: 2000-11-01
ccctaggacacctttctaaaaagactccctgtggtgttcagaatcactcctacagtcaggttctccacaatggatctcagtgctgcaagtcaccgcatacctctaagtgatggaaacagcattcccatcatcggacttggtacctactcagaacctaaatcgacccctaagggagcctgtgcaacatcggtgaaggttgctattgacacagggtaccgacatattgatggggcctacatctaccaaaatgaacacgaagttggggaggccatcagggagaagatagcagaaggaaaggtgcggagggaagatatcttctactgtggaaagctatgggctacaaatcatgtcccagagatggtccgcccaaccctggagaggacactcagggtcctccagctagattatgtggatctttacatcattgaagtacccatggcctttaagccaggagatgaaatataccctagagatgagaatggcaaatggttatatcacaagtcaaatctgtgtgccacttgggaggcgatggaagcttgcaaagacgctggcttggtgaaatccctgggagtgtccaattttaaccgcaggcagctggagctcatcctgaacaagccaggactcaaacacaagccagtcagcaaccaggttgagtgccatccgtatttcacccagccaaaactcttgaaattttgccaacaacatgacattgtcattactgcatatagccctttggggaccagtaggaatccaatctgggtgaatgtttcttctccacctttgttaaaggatgcacttctaaactcattggggaaaaggtacaataagacagcagctcaaattgttttgcgtttcaacatccagcgaggggtggttgtcattcctaaaagctttaatcttgaaaggatcaaagaaaattttcagatctttgacttttctctcactgaagaagaaatgaaggacattgaagccttgaataaaaatgtccgctttgtagaattgctcatgtggcgcgatcatcctgaatacccatttcatgatgaatactgactgccgggagttcctgaacagatttttcactcccatgagtgccaagacggtgcaatgggtagtcccctagatgtgaaaatgaagagagagggttttaccatcctgagaagaaataatgatggaaacatgtttaatgtttgtgcagtgtaaatgactttgactcagtcacattgaagtaaaaatattaaaatctgttgaaataactcttaggaaattatcaactaattttttcagatcagtatcttctagattccagacagaaaaaaattacacttcagaaaagacatcaaaggcaacatatgacaacaagtaatttatgaatctgggtagtagcgttggtaatctgagttctttaagggttcacaggacaacgaagtgcatgtggcagtgtgctggcagtggccttgaggctttggaccattggttacaaaacagacacagccaagataagatccacacacacattattaacaaggaagtgatttgctgcaccttgagttgagaggactacatgtagaaaagtcttaaaatagagctaaacaccacagtggtcaacaaagccatcataatgttggtgtttgtttccctccaatgtatgtatgtttagtttttatccaacctgaggaatgaaaacttaactggatctctcttgcatccttaaagggcctgagtctcaacatggctgctgatccatacttacacatcttactgtcaatcttgcctacattgattatagaaccactattacgtgaaaaggcttgaaacaaccaacatatacaaataaaaccctgccttgtaaaatagtaaaagagaagccatatattggcttttcttcttaacttgggagatatattgaaacaaggtgctttataagattattgtacttaagactttaatagtgttacttggatagcttatatgaattttgagaattttatatgaattttgagaaagcaagttcaaaagaactctggtaattttcctgtatgtacaatttaaagagtgaataagattattagaattcagcaatagagatatatctattttcaattcaactacagaaatatattttattggccgggtgcggtggctcatgcctataatcccagcactttgggaggccaaggtgggcagatcaggaggtcaggagatcgagaccatcttggctaacaaggtgaaaccccgtctctactaaaaatacaaaaaattagccaggcgcggtggcgggggcctgtaatcccagctactcaggaggctgaggcagaagaatggcatgaacccgggaggaggagcttgcagtgagccgagatagcgccactgcagtccggcctgggtgaaagagcgagactccgtctcaaaaacaaaaaaaaaaaagaaaagaaatatattttattcattcacattaggtcactgtcatactgtcataggctgagagagttcttcaaaaattatgttttcccaagatcagttgcttatagataatgttcaatgacctcaagacatatatttttgagaaattatcattttaaaaaatttggtctatactgattgttttcactgattccaatattattacttataacactgacctctggaaaatattttgttcacaagaaataataaagtataatgatttgttgcatc

SEQ ID NO: 1345 - protein, 326 aa, Homo sapiens
  ref <308>: DATABASE ACCESSION NUMBER: Refseq / NP_005980
  ref <309>: DATABASE ENTRY DATE: 2000-11-01
MDLSAASHRIPLSDGNSIPIIGLGTYSEPKSTPKGACATSVKVAIDTGYRHIDGAYIYQNEHEVGEAIREKIAEGKVRREDIFYCGKLWATNHVPEMVRPTLERTLRVLQLDYVDLYIIEVPMAFKPGDEIYPRDENGKWLYHKSNLCATWEAMEACKDAGLVKSLGVSNFNRRQLELILNKPGLKHKPVSNQVECHPYFTQPKLLKFCQQHDIVITAYSPLGTSRNPIWVNVSSPPLLKDALLNSLGKRYNKTAAQIVLRFNIQRGVVVIPKSFNLERIKENFQIFDFSLTEEEMKDIEALNKNVRFVELLMWRDHPEYPFHDEY

SEQ ID NO: 1346 - DNA, 5253 bp, Rattus norvegicus
  ref <308>: DATABASE ACCESSION NUMBER: EMBL / AB012214
  ref <309>: DATABASE ENTRY DATE: 1999-01-19
ggaattcgcggccggtcgacccggggtctcgttcagagctgtcctgtcgtctgcaacctgcaagatgccagcacgaacagctccagcccgagtgcctgcacttgcctccccggcaggctcgctccccgaccatgtccgcaggcggctcaaagacttggaaagagatggcttaacagaaaaggagtgtgtgaaagagaaattgaacttactgcatgaattcctgcaaacagaaataaaaagccagctatgcgacttggaaaccaaactacataaagaggaattgtctgaggaaggctacctggctaaagtcaagacccttctaaataaggatttgtgcctggagaacggaacactctctctcactcagaaagccaacggttgtcctgccaacgggagtcggccaacctggaaagcagaaatggcagactcaaaccgatccccaagatccaggcccaagcctcggggacccaggaggagcaagtcggacagtgagaccatgattgaagcttcatctagttcggtggctacgaggagaaccaccaggcagaccaccatcacgtctcacttcaagggtcccgctaaacggaaacccaaggaagactctgaaaagggaaacgcaaatgaatctgctgcagaggagagagaccaggataagaaacgcagagtcgcaggcacagagagtcgtgccagtcgtgccggagagtctgtggagaaacctgaacgagtaaggccaggaacccagctgtgtcaggaagagcaaggtgaacaggaagatgacaggagacctcgacgtcaaaccagagagctagcatcaaggcggaaatcaagggaggacccagacagagaagcaaggccaggaactcacttggatgtggacgatgacgatgaaaaggacaaaagaagttccaggcccagaagccagcccagagatctagccaccaaacggagacccaaggaagaagtagagcagatcactccagagcctcccgagggcaaagatgaggacgaaagggaggagaagagacgaaaaacgacacgtaaaaagccggaaccactcagcattcccgtacagagcagagtggagagaaaagcctctcagggcaaagcaagtgcaatcccaaagctcaacccgccacagtgccctgagtgtggccagtacctagatgaccctgacctgaagtaccagcagcaccctgtggatgctgtggatgaaccccagatgctgaccaatgaggcactgtccgtctttgactccaactcgtcttggtttgagacctatgattcctctcccatgcataagttcactttcttcagtgtgtattgcagtcgcggtcacttgtgtcctgtcgacactggtctcattgagaagaacgttgaactctacttttctggtgttgccaaagcaattcatgaagaaaatccgtctgtggaaggtggtgttaatggcaagaacctggggccaatcaatcagtggtggatcagtggctttgacggtggcgagaaggcgctcattggcttttctaccgcatttgctgaatactttctgatggagcccagcccagagtatgcaccaatatttgggctgatgcaggagaaaatttacatcagcaagattgtggtcgagttcctgcagagcaatcctgacgctgtctatgaagacttgatcaataagatcgagaccactgttcctccttctgccatcaatgtgaaccggttcaccgaggactccctcctacgccatgcccagtttgtggtgagccaggtagaaagttacgacgacgctaaggacgatgatgagacgcccatcttcttgtctccctgtatgaggtccctgatccatttggctggtgtctcgctgggacagaggcgagcaacaaggcgcacggtcatcaattctgccaaagtgaagcgcaaggggcccacaaaagccaccaccaccaagctggtctatcagatcttcgacactttcttctcggagcagatcgagaaggatgacaaggaggacaaagagaacaccatgaagcgccgccggtgtggtgtctgtgaggtctgtcaacagcctgagtgtgggaagtgcaaggcgtgcaaagacatggttaagtttggtggcaccggacggagtaaacaggcttgcctcaagaggaggtgtcctaacttggccgtaaaggaggcagatgaagacgaagaagctgatgatgatataccagagttgccgtcacccaaaaagttgcaccaagggaagaagaagaaacagaataaggatcgcatctcctggctcggggagcctgtgaagatcgaagagaacagaacttactattggaaggtgagcatcgacgaagagactctggaggtgggcgactgcgtctcggtcattccggatgatccctccaaaccactgtatctagccagggtcacagcactgtgggaagacaagaacgggcagatgttccatgcacactggttctgcgcggggacagacacggtcctcggagccacctctgaccctctggagctgttccttgtaggcgagtgtgaaaacatgcaactttcctacatccacagcaaggtcaaggtcatctacagagggccttccccaaactgggccatggagggaggcatggaccctgaggccatgttgccgggggctgaggatgggaagacctacttctaccagttctggtacagccaggactacgcaaggtttgagtccccacccaagacccagccggcggaggacaataagcacaagttctgcctatcttgtatccggctggctgagctgagacaaaaagaaatgcccaaagtcctggaacaacttgaggaggtggacggccgggtctactgcagttctatcaccaagaacggtgttgtctaccgactgggtgacagtgtgtacctgcctcctgaggcctttactttcaacatcaaaatggccagccccatgaaacgctctaagagggaccctgtgaatgagaaccctgtaccccgagacacttaccgcaagtattccgactacatcaaaggaagcaacctggacgcccctgaaccctatcggattggtcggataaaagagatctactgtggcaagaagaaaggtggcaaggtcaatgaggcagacatcaagatcaggctctacaagttctataggcctgagaacacccacaagtccatccaggcaacctaccacgccgacatcaacctgctctactggagcgatgaggaagccgtggtggacttcagcgacgtgcaaggccgctgcaccgtggagtacggagaggacctgcttgagagcatccaggattactcacagggcggccccgaccgcttctactttctcgaggcctacaattcaaagactaaaagctttgaagaccctccgaaccatgcccgcagccctgggaacaaaggcaaaggaaaggggaaagggaaagggaagggaaaacctcaggtatcagagcccaaagagcccgaggcagccatcaaactgcctaagctgcggaccctggatgtgttttctggctgtggaggattaacagaaggattccaccaagcaggcatctcggagacgctgtgggccatcgagatgtgggaaccagcagcccaggcatttcggttgaacaaccctggcaccacggtgttcacagaggactgcaacgtgcttctcaagctggtcatggctggtgaggtgaccaactctctgggccagaggctgccacagaagggcgatgtggagatgctgtgtggtgggccgccctgccagggcttcagtggcatgaaccgtttcaactctcgtacttactccaagttcaaaaactccctcgtggtctccttcctcagctactgtgactactaccggcctcggttcttcctcttggagaatgtcaggaactccgtgtccttcaggcgctccatggtgctgaagctcacactgcgctgcctggtccgcatgggctaccagtgcaccttcggtgtgctccaggctggacagtatggtgtggcccagacacgaaggagggccatcatcttggctgcagcccctggagagaagctgcctctgttcccagaacctctacacgtgtttgccccccgtgcctgccagctgagtgttgtggtggacgacaagaagttcgttagcaacattacaaggctaagctcgggtcccttccgaaccatcacggtgcgagataccatgtctgacctccctgagatccagaatggagcctcagcccccgagatctcctacaatggagagccacagtcctggttccagaggcagctgcgagggtctcactaccagcccatcctcagggaccatatctgcaaggacatgagcgcgctggtggctgcccgtatgcggcacatcccgctgtccccaggatcggattggcgtgacctgcccaacatacaagtgcggctgagagatggcgtcataaccaataaacttcgctacactttccacgacacgaagaacggctgcagcagcaccggggccctccgtggggtctgctcctgtgcggaaggcaagacctgcgaccctgcttccagacaattcaacacgctcatcccctggtgcctgccgcacactgggaaccggcacaaccactgggctggcctctacgggcgtctggagtgggatggcttcttcagtaccaccgtcaccaaccctgagcccatgggcaagcaaggccgggtgctccatcccgagcagcaccgggtcgtgagtgtgcgggaatgtgctcgctcccaaggctttccagatacctaccggttattcggcaacatcctggacagacaccggcaggtggggaacgctgtgccaccaccactggccaaagccatcggcctggagattaagctctgtctgctggccagcgctcaggagagtgcctcagctgcagttaaaggaaaggaggagactactaccgaggactagtgctctcacccagagccccacgtgcactgatgtttttaacccgtcgagccccatcatttgaagtgttctgctcagtgtctgtgaccatggctgacactaagctgtttggaggtttgttttgtgaccaagccgtgtagtctttgtgcattctgaattttaaggttttgtttttttgtttttttgttttgtttttttattctgtattctatcagatctgccactgtgtgggtggcaagtgagacttgatgtagttttatatgttgtaatatttcttcaaaataaagcgcttctataaagcaaaaaaaaaaaaaaaaaaaaaa

SEQ ID NO: 1347 - protein, 1623 aa, Rattus norvegicus
  misc_feature (1)..(1623): Xaa=Unknown amino acid
MPARTAPARVPALASPAGSLPDHVRRRLKDLERDGLTEKECVKEKLNLLHEFLQTEIKSQLCDLETKLHKEELSEEGYLAKVKTLLNKDLCLENGTLSLTQKANGCPANGSRPTWKAEMADSNRSPRSRPKPRGPRRSKSDSETMIEASSSSVATRRTTRQTTITSHFKGPAKRKPKEDSEKGNANESAAEERDQDKKRRVAGTESRASRAGESVEKPERVRPGTQLCQEEQGEQEDDRRPRRQTRELASRRKSREDPDREARPGTHLDVDDDDEKDKRSSRPRSQPRDLATKRRPKEEVEQITPEPPEGKDEDEREEKRRKTTRKKPEPLSIPVQSRVERKASQGKASAIPKLNPPQCPECGQYLDDPDLKYQQHPVDAVDEPQMLTNEALSVFDSNSSWFETYDSSPMHKFTFFSVYCSRGHLCPVDTGLIEKNVELYFSGVAKAIHEENPSVEGGVNGKNLGPINQWWISGFDGGEKALIGFSTAFAEYFLMEPSPEYAPIFGLMQEKIYISKIVVEFLQSNPDAVYEDLINKIETTVPPSAINVNRFTEDSLLRHAQFVVSQVESYDDAKDDDETPIFLSPCMRSLIHLAGVSLGQRRATRRTVINSAKVKRKGPTKATTTKLVYQIFDTFFSEQIEKDDKEDKENTMKRRRCGVCEVCQQPECGKCKACKDMVKFGGTGRSKQACLKRRCPNLAVKEADEDEEADDDIPELPSPKKLHQGKKKKQNKDRISWLGEPVKIEENRTYYWKVSIDEETLEVGDCVSVIPDDPSKPLYLARVTALWEDKNGQMFHAHWFCAGTDTVLGATSDPLELFLVGECENMQLSYIHSKVKVIYRGPSPNWAMEGGMDPEAMLPGAEDGKTYFYQFWYSQDYARFESPPKTQPAEDNKHKFCLSCIRLAELRQKEMPKVLEQLEEVDGRVYCSSITKNGVVYRLGDSVYLPPEAFTFNIKMASPMKRSKRDPVNENPVPRDTYRKYSDYIKGSNLDAPEPYRIGRIKEIYCGKKKGGKVNEADIKIRLYKFYRPENTHKSIQATYHADINLLYWSDEEAVVDFSDVQGRCTVEYGEDLLESIQDYSQGGPDRFYFLEAYNSKTKSFEDPPNHARSPGNKGKGKGKGKGKGKPQVSEPKEPEAAIKLPKLRTLDVFSGCGGLTEGFHQAGISETLWAIEMWEPAAQAFRLNNPGTTVFTEDCNVLLKLVMAGEVTNSLGQRLPQKGDVEMLCGGPPCQGFSGMNRFNSRTYSKFKNSLVVSFLSYCDYYRPRFFLLENVRNSVSFRRSMVLKLTLRCLVRMGYQCTFGVLQAGQYGVAQTRRRAIILAAAPGEKLPLFPEPLHVFAPRACQLSVVVDDKKFVSNITRLSSGPFRTITVRDTMSDLPEIQNGASAPEISYNGEPQSWFQRQLRGSHYQPILRDHICKDMSALVAARMRHIPLSPGSDWRDLPNIQVRLRDGVITNKLRYTFHDTKNGCSSTGALRGVCSCAEGKTCDPASRQFNTLIPWCLPHTGNRHNHWAGLYGRLEWDGFFSTTVTNPEPMGKQGRVLHPEQHRVVSVRECARSQGFPDTYRLFGNILDRHRQVGNAVPPPLAKAIGLEIKLCLLASAQESASAAVKGKEETTTEDX

SEQ ID NO: 1348 - DNA, 2171 bp, Rattus norvegicus
  ref <308>: DATABASE ACCESSION NUMBER: Refseq / NM_031139
  ref <309>: DATABASE ENTRY DATE: 2003-01-15
tagaaagcggcggcagctgcagccacgatccgccgccgaaccgggccaggccgggcggcggacgcgagaaccgaggatctgggaaacagggcggccgccatccgggcagggccgagttataaaaaaaaattaaaaaaaaaggaaggctcaagtctcggcggcggcggcggcaagcactcagggaagcaggccccaggcgtgcggcggcggggcggcgggcggcgagccggccggcgggcgggcggggggcatctgaactgtggcccggagcctcgcgccgcccggaactggcggcgggcggagcggatggaagaggcggcagctgcaggagtagcggcggcggcggcggcggcatctcctcctcacatgacccactgtttgtccccgtgatcagcgcgaggctcccgtgtctcctccgtcccctcctgccgagcgggtgagcgccgggctcgggcccccccggccgccctctccctcccctccctcccctcccctcccccccgccccccccatggacatgctggacccgggtctggatcccgcttcctcggccaccgctgctgccgccgccagccacgacaagggacccgaggccgaggagggcgttgagctgcaggaaggcggggacggcccgggggctgaggagcagacggcggtggccatcgccagcgtccagcaggcggcgttcggcgaccataatatccagtaccagttccgcacagagagtaatggaggccaggtgacataccgcgtagtccaggtgactgatggtcagctggacggccagggcgacgcggctggcgccgtcagcgtcgtgtccaccgctgccttcgcaggggggcagcaggctgtgacccaggtgggtgtggacggggcagcccagcgccccggccctgccgctgcctctgtacccacaggtcccgcagcacccttcccgctggctgtaattcaaaatccattcagcaatggtggcagcccagcagccgaagctgtcagcggggaggcacggtttgcttattttccagcatccagtgtcggcgataccacagctgtgtctgttcaaactacagaccagagcctacaggccggaggccagttctatgtcatgatgacaccccaggatgtgcttcaaacaggaacacagaggacaattgcaccccggacacacccctattctccgaaaattgatggaaccagaactcctcgagatgagagaagaagagctcagcacaatgaagtggagcggagaaggagggacaagatcaacaactggattgtccagctttcaaaaatcattccagattgtcatgcagacaacagcaagacaggggcgagtaaagggggcatcctgtccaaggcttgcgattacatccgggagctacgccagaccaaccagcgtatgcaggagaccttcaaggaggcagagcggctgcaaatggacaatgagctcctgaggcagcagatcgaggagctgaagaacgagaacgccctgcttcgagcccaactgcagcagcacaacctggaaatggtgggcgagagcacccggcagtgatgcccgctggctcacccttcagctgctgccggcctttgctgcccctcccccagcccttagcacagagagggagatgcccctccccaagctgcgttttttatagtagatttttaacaaaaacaaggagacataatgcatttctgttgatacattgcccactaccctcccccatgcggaaatgatgtccacctgcccatctgtccgtcagcctcccttctcggccctcaccagcccatcacttatagtgggctcatcgggaggagcgagggaggaggacagaggccccgctgcccgctgcctccttggtctctagaggtattgagacagggtgcttatgggaaggagggagctttggggatgggggccttccctggggcctggacctatgcagggaggccaagcccccccacccctcttgtttctggatccctgctcccctctgggtgtgtgggtgtgtatgtgtgtgtgtgtgtgcgcgtgtgtatgtgtgcgtgtgtgtgtgtgtgtgtgtgtgtgtgtgtgtgtgttttaattttctttatggaaaatggacaaaaaatagagagagaggtatttaactgcaataaactggccagtgtggccccgcctaaaaaaaaaa

SEQ ID NO: 1349 - protein, 346 aa, Rattus norvegicus
  ref <308>: DATABASE ACCESSION NUMBER: Refseq / NP_112401
  ref <309>: DATABASE ENTRY DATE: 2003-01-15
MDMLDPGLDPASSATAAAAASHDKGPEAEEGVELQEGGDGPGAEEQTAVAIASVQQAAFGDHNIQYQFRTESNGGQVTYRVVQVTDGQLDGQGDAAGAVSVVSTAAFAGGQQAVTQVGVDGAAQRPGPAAASVPTGPAAPFPLAVIQNPFSNGGSPAAEAVSGEARFAYFPASSVGDTTAVSVQTTDQSLQAGGQFYVMMTPQDVLQTGTQRTIAPRTHPYSPKIDGTRTPRDERRRAQHNEVERRRRDKINNWIVQLSKIIPDCHADNSKTGASKGGILSKACDYIRELRQTNQRMQETFKEAERLQMDNELLRQQIEELKNENALLRAQLQQHNLEMVGESTRQ

SEQ ID NO: 1350 - DNA, 5333 bp, Rattus norvegicus
  ref <308>: DATABASE ACCESSION NUMBER: Refseq / NM_053620
  ref <309>: DATABASE ENTRY DATE: 2003-01-14
cacgggcagcgagaggccggcgcgtggggagcgggccggcgcggcaccatgtcggccaaggtgcggctcaagaagctggagcagctgctcctggacgggccgtggcgcaatgagagctccctgagcgtggagacgctgctggacgtgctggtgtgcctttacaccgagtgcagccactcggcgctgcgccgcgacaagtatgtggcggagttcctcgagtgggctaagccattcacccagctcgtgaaggacatgcagcttcatcgggaggactttgagatcatcaaagtgattggaagaggagcttttggtgaggttgctgttgtcaaaatgaagaacactgaacgaatttatgcaatgaaaattctcaacaaatgggagatgctaaagagagcagagacagcttgctttcgagaagagagggatgtgctggtgaacggtgactgccagtggatcactgcgctacactacgcctttcaagatgagaactacctgtacttggttatggattactatgtgggtggtgacttgctgaccctgctgagtaagtttgaagacaaacttccagaagacatggcgaggttctacattggcgagatggtgttggccatcgactcgatccaccagctccactatgtgcacagagacattaaacccgacaacgtccttctggatgtcaacggtcacatccgcctggctgactttggctcgtgcttgaagatgaacgatgacggcactgttcagtcttccgtggctgtgggcacacctgactacatctcaccagagatcctgcaggccatggaggatggcatgggcaaatacgggcccgagtgcgactggtggtccctgggcgtctgcatgtatgagatgctgtatggagaaacgccattttatgcagagtctctggtggagacatatggaaagatcatgaaccacgaggagcggtttcagttcccatcccacgtcactgacgtctctgaagaagcgaaagacctcatccagagactaatatgcagcagagagcgccggctcgggcagaacgggatagaggactttaagaaacatgcattctttgaaggtctaaattgggaaaatatacggaacctggaagcaccctacattcccgatgtgagcagcccttctgacacgtccaacttcgatgtggacgatgacgtgctgagaaacatcgaaatcttacctcccggctctcacacgggcttctcgggactgcacctacccttcattggctttacatttacgacagaaagctgcttttctgaccgaggctctctgaagagcatgatacagtctaacacgctaaccaaagatgaggatgtgcagcgggatttggagaacagcttgcagatcgaagcttacgagcgaaggatacgaaggctggaacaggagaagctagagctgagccggaagctgcaagagtccacccagactgtgcagtcccttcacggttccacacgggccctgggcaactcaaaccgtgacaaggaaatcaagaggctgaatgaagagcttgaacgcatgaagagtaaaatggcagattcaaacaggctcgaacgacagctcgaggataccgtgacccttcgccaggagcatgaagactccacacaacggctgaagggcctggagaagcagtaccgcctggcacggcaggagaaggaagaattgcacaagcaattggttgaagcttcagagcgattgaaatcccagaccaaagaactcaaagatgctcatcagcagcgaaaacgggccctgcaggagttttcagagctcaatgagcgcatggcagagctgaggtcacagaagcagaaggtgtcccggcagctccgtgacaaggaggaggagatggaggtggccatgcagaagattgactccatgaggcaggatatccgcaagtctgagaagtctaggaaagagctggaagctcggcttgaggacgcagtcgctgaggcctccaaggagaggaagcttcgagagcacagtgagagcttctctaagcagatggagcgcgagctcgagaccctcaaggtgaagcaaggaggccgggggccgggtgccacgttagaacatcagcaggagatctccaaaatcaggtcagagcttgagaagaaagtcttgttctatgaggaggagttggtccgccgagagcgctcccatgtgctagaagtaaagaatgtgaagaaggaggtgcacgaatctgaaagccaccagttggccctgcagaaagaggtcctgatgctgaaagataagttagaaaagtcaaaacgagaacggcacagtgagatggaggaggccataggtgccatgaaagacaagtacgaacgggagagggccatgctgttcgacgagaacaagaagttaacagcagaaaacgaaaagctctgttcctttgtggataaactaacagcccaaaacagacagctggaggacgagctgcaggacctggcctccaagaaggagtcggtcgctcactgggaggcgcagattgcagagattattcagtgggtcagcgatgagaaagatgccagaggctaccttcaagcacttgcttctaagatgaccgaagagcttgagactttgagaagctctagtttgggatccaggacactggacccactctggaaggtccgtcggagccagaagctggacatgtctgcgcggctggagttgcagtccgctctcgaggcagagatccgtgccaagcagctggttcacgaggagctgaggaaggtcaaagacaccagcctagccttcgaaagcaaactgaaggagtcagaagccaaaaacagggaattattagaagaaatgcaaagtctgaagaaaaggatggaagaaaaatttagagcagatacagggctcaaacttccagatttccaggatcctatctttgagtacttcaacactgctcctcttgcacatgacctgacttttagaactagctcagctagtgatcaggaaacacaggcttcaaagttggacttgtccccatcagtgtctgtggccacaagcacagaacagcaggaggatgcggctcgttcacagcagaggccgtctactgtgccgctgcccaacacacaggccctcgccatggctggaccaaagcccaaggcacaccagttcagcatcaagtccttccccagccccacccagtgtagccactgtacgtccttgatggttgggctgatccgacagggctatgcctgtgaggtctgcgcgttttcctgccatgtgtcctgcaaagacagcgctccccaggtgtgccccatacctcctgagcagtccaagcggcctctcggcgtagacgtgcagaggggcataggcacagcctacaagggctacgtcaaggtcccgaagcccacaggcgtgaagaaagggtggcagcgggcttacgcagtggtctgtgactgcaagctcttcctgtacgacctgccagaagggaagtccacccagcctggggtcatcgccagtcaagtcttagacctcagagatgacgagtttgctgtgagctcagtcctggcctcagatgtcatccatgctacacgccgagacatcccgtgtatattcagggtgacggcctctctcttaggttcaccttctaagaccagctcactgctcatcctgacagagaacgagaatgaaaagaggaagtgggttgggatcctggaagggctgcaggctatcctccacaagaaccggctgaggagccaggtggtgcacgtggcacaggaagcgtacgacagctcactgccgctcatcaagaccgtcctggctgccgctattgtggatggagacagaattgcggtcggcctggaagaagggctctacgtcattgagctcacccgagatgtgatcgtccgcgctgctgactgcaagaaggtataccagatcgagctggcgcccaaggagaagctcatcctcctcctctgtggccggaaccaccacgtgcacctctacccctggacctccttcgatggagcagaagctagcaactttgacatcaagctcccagaaacgaagggctgccagctcatagcaacagggacgctgaggaagagctcgtccacctgcctgtttgtcgccgtgaagcggctggtcctttgctacgagatccagagaactaagcctttccaccggaagttcaatgagatcgtggccccgggacatgtgcagtggatggccatgttcaaggacaggctctgtgttggctacccctccgggttctctctgttgagcatccagggggacgggcagcctctagacctggtaaatcccgctgacccctcgctcgcgttcctctcacagcagtctttcgatgccctctgtgctgtagagctcaaaagtgaggagtacctgctctgcttcagccacatgggactgtacgtggaccctcaaggtcggaggtcacgcacgcaggagctcatgtggcctgcggctcctgtcgcctgtagttgcagctcctcccacgtcacggtgtacagcgaatacggggtggatgtcttcgacgtgcgcaccatggagtgggttcagaccatcggcctgcggaggataagacctctgaactctgatggtagcctcaacctgctgggctgtgagcccccatgcctcatctacttcaaaaacaagttctcaggcaccgtcctcaatgtgcccgatacctcggacaacagcaagaagcagatgctgcggacgcggagcaaacggcgcttcgtcttcaaggttccagaggaagagaggctgcagcagcggcgagagatgctcagagacccggaactgagatccaaaatgatatccaatccgaccaacttcaaccacgtggctcacatgggccctggcgatgggatgcaggtgctcatggacctgcctctgagcgtgcgcccacagcccaggaggaaaagcagggtcctgccccaacaggcctccctcggcagcctcccatccaggaacaagccctatgtctcatggccgtcctcaggtgggtctgagcctggagtgcctgtgcctctgaggagcatgtctgaccccgaccaggattttgacaaagagcctgactctgactccacgaagcactcactccgtccaacagctccaaccctagcggccccccgagccccaactcaccgcaccggagccagctccctctgaaggcctggaccagccagcctgcgacgcctgaggccgccagcatagcaccatagggccagggagccagatggccccaacatcagtgccaagactgagctgaccctccagtgttgtccaaggaaatgtagaatcagtttgtagatagataaatgaatctttaattatatgatcagttt

SEQ ID NO: 1351 - protein, 1702 aa, Rattus norvegicus
  ref <308>: DATABASE ACCESSION NUMBER: Refseq / NP_446072
  ref <309>: DATABASE ENTRY DATE: 2003-01-14
MSAKVRLKKLEQLLLDGPWRNESSLSVETLLDVLVCLYTECSHSALRRDKYVAEFLEWAKPFTQLVKDMQLHREDFEIIKVIGRGAFGEVAVVKMKNTERIYAMKILNKWEMLKRAETACFREERDVLVNGDCQWITALHYAFQDENYLYLVMDYYVGGDLLTLLSKFEDKLPEDMARFYIGEMVLAIDSIHQLHYVHRDIKPDNVLLDVNGHIRLADFGSCLKMNDDGTVQSSVAVGTPDYISPEILQAMEDGMGKYGPECDWWSLGVCMYEMLYGETPFYAESLVETYGKIMNHEERFQFPSHVTDVSEEAKDLIQRLICSRERRLGQNGIEDFKKHAFFEGLNWENIRNLEAPYIPDVSSPSDTSNFDVDDDVLRNIEILPPGSHTGFSGLHLPFIGFTFTTESCFSDRGSLKSMIQSNTLTKDEDVQRDLENSLQIEAYERRIRRLEQEKLELSRKLQESTQTVQSLHGSTRALGNSNRDKEIKRLNEELERMKSKMADSNRLERQLEDTVTLRQEHEDSTQRLKGLEKQYRLARQEKEELHKQLVEASERLKSQTKELKDAHQQRKRALQEFSELNERMAELRSQKQKVSRQLRDKEEEMEVAMQKIDSMRQDIRKSEKSRKELEARLEDAVAEASKERKLREHSESFSKQMERELETLKVKQGGRGPGATLEHQQEISKIRSELEKKVLFYEEELVRRERSHVLEVKNVKKEVHESESHQLALQKEVLMLKDKLEKSKRERHSEMEEAIGAMKDKYERERAMLFDENKKLTAENEKLCSFVDKLTAQNRQLEDELQDLASKKESVAHWEAQIAEIIQWVSDEKDARGYLQALASKMTEELETLRSSSLGSRTLDPLWKVRRSQKLDMSARLELQSALEAEIRAKQLVHEELRKVKDTSLAFESKLKESEAKNRELLEEMQSLKKRMEEKFRADTGLKLPDFQDPIFEYFNTAPLAHDLTFRTSSASDQETQASKLDLSPSVSVATSTEQQEDAARSQQRPSTVPLPNTQALAMAGPKPKAHQFSIKSFPSPTQCSHCTSLMVGLIRQGYACEVCAFSCHVSCKDSAPQVCPIPPEQSKRPLGVDVQRGIGTAYKGYVKVPKPTGVKKGWQRAYAVVCDCKLFLYDLPEGKSTQPGVIASQVLDLRDDEFAVSSVLASDVIHATRRDIPCIFRVTASLLGSPSKTSSLLILTENENEKRKWVGILEGLQAILHKNRLRSQVVHVAQEAYDSSLPLIKTVLAAAIVDGDRIAVGLEEGLYVIELTRDVIVRAADCKKVYQIELAPKEKLILLLCGRNHHVHLYPWTSFDGAEASNFDIKLPETKGCQLIATGTLRKSSSTCLFVAVKRLVLCYEIQRTKPFHRKFNEIVAPGHVQWMAMFKDRLCVGYPSGFSLLSIQGDGQPLDLVNPADPSLAFLSQQSFDALCAVELKSEEYLLCFSHMGLYVDPQGRRSRTQELMWPAAPVACSCSSSHVTVYSEYGVDVFDVRTMEWVQTIGLRRIRPLNSDGSLNLLGCEPPCLIYFKNKFSGTVLNVPDTSDNSKKQMLRTRSKRRFVFKVPEEERLQQRREMLRDPELRSKMISNPTNFNHVAHMGPGDGMQVLMDLPLSVRPQPRRKSRVLPQQASLGSLPSRNKPYVSWPSSGGSEPGVPVPLRSMSDPDQDFDKEPDSDSTKHSLRPTAPTLAAPRAPTHRTGASSL

SEQ ID NO: 1352 - DNA, 369 bp, Rattus norvegicus
  ref <308>: DATABASE ACCESSION NUMBER: EMBL / AA891588
  ref <309>: DATABASE ENTRY DATE: 2000-03-03
tgtgtagcagaaatagacttggccctgcagctgggaagaggctccacttctgatgtgaaacatacaatatttatgctctgacttgctcctgaattggaggagggccatcagtgtaaagacggctgaggatcatttcatactgcacagcacactctgagaacgtgctcgcactgtggtgcaaaggaaatttccccaagccctgagggtccagatgctactttatgactccatgtttcaccggtactcattgccaagccccgtttggcaaaggccatcttgtgcatcgagagcttccctgtggtccacagccatggtgtctttctttttccctctcagttatggtgctccttgaataaattgcctttcacg

SEQ ID NO: 1353 - DNA, 1327 bp, Rattus norvegicus
  ref <308>: DATABASE ACCESSION NUMBER: EMBL / D26307
  ref <309>: DATABASE ENTRY DATE: 2000-04-19
gagctcatcgcgggggccgaggctataagagtgcgcgcgggcggcgcggggcagagcggccggcatcggagccggtctgtacgggcagcggactggggggcatacggggccccccggggaggccgcggccactccccccgccccggggccgagcgcggcgggggaggcggggatggaaacgcccttctatggcgaggaggcgctgagcggcctggctgcgggtgcgtcgagcgtcgctggtgctgctggggcccccggcggtggtggcttcgcgcccccgggccgcgctttccccggggcgcccccaacgagcagcatgctgaagaaagacgcgctgacgctcagcctggcggagcagggagcggcgggattgaaaccagggtcggccactgcaccttctgcattgcgccccgacggcgcccccgacgggctgctggcttcgccggatcttgggctgctcaaactcgcgtcgccggagctggaaaggctgatcatccagtccaacgggctggtgaccaccaccccgaccagtacgcagttcctctaccctaaggtggcggccagcgaggagcaggagttcgccgaaggcttcgtcaaggcgctggaggacctgcacaagcagagccagctgggtgcggccaccgcggccacctcaggggctcccgcgccccccgcgcccgcggacctggcagccacccccggggccacggagaccccggtctacgccaacctgagcagtttcgcgggtggcgccgggccccctgggggcgcggccacagtggccttcgccgcggagccagtgcccttcccgccgcccccgggcgcgctggggccgccgccacctccgcatccaccgcgtctggccgcgctcaaggacgagccgcagaccgtgccggacgtgccgagcttcggcgacagccctccactgtcgcccatcgacatggacacgcaggaacgcatcaaggcggagcgcaagaggctgcgcaaccgcatcgccgcttccaaatgccgcaagcgcaagctggagcgtatctcgcgcctggaggagaaagtcaagaccctcaaaagccagaacaccgagctggcgtccaccgcgagcctgctgcgcgagcaggtggcgcagctcaaacagaaagtcctcagccacgtcaacagcggctgccagctgctgccccagcaccaggtccccgcgtattgagcccgagcgcgggacgcatgcgcggactagatgcggtggggggggcgccccggactctttcgagactcggtgcccccggactcgacaagctggacccccctttactctggatggggaccccgagcgcac

SEQ ID NO: 1354 - protein, 342 aa, Rattus norvegicus
  misc_feature (1)..(342): Xaa=Unknown amino acid
METPFYGEEALSGLAAGASSVAGAAGAPGGGGFAPPGRAFPGAPPTSSMLKKDALTLSLAEQGAAGLKPGSATAPSALRPDGAPDGLLASPDLGLLKLASPELERLIIQSNGLVTTTPTSTQFLYPKVAASEEQEFAEGFVKALEDLHKQSQLGAATAATSGAPAPPAPADLAATPGATETPVYANLSSFAGGAGPPGGAATVAFAAEPVPFPPPPGALGPPPPPHPPRLAALKDEPQTVPDVPSFGDSPPLSPIDMDTQERIKAERKRLRNRIAASKCRKRKLERISRLEEKVKTLKSQNTELASTASLLREQVAQLKQKVLSHVNSGCQLLPQHQVPAYX

SEQ ID NO: 1355 - DNA, 1498 bp, Rattus norvegicus
  ref <308>: DATABASE ACCESSION NUMBER: Refseq / NM_022859
  ref <309>: DATABASE ENTRY DATE: 2002-03-01
aactcctcaggaagaccagcagagtcaactaacctggacccttggtagctcccggcgactgaatcattaagcaaagggacaatatctcattctgctctgaaaatagaaccatggcattaatgttagtgctgttgttcctggctgctgtattgccaccatctcttcttcaagataccactgatgaatgggatagagatcttgagaatttgtcaaccactaaactgtcagtccaagaagagatcataaacaagcacaaccaattgagacgaacggtttctccgtctggtagtgacttactaagagtggaatgggaccatgatgcttatgtgaacgctcagaaatgggcaaacaggtgcatttacaatcacagtcctctacaacacaggacaaccacattaaaatgtggtgagaatttgttcatggcaaattaccctgcatcgtggtcttctgtaatccaagattggtatgatgaatcccttgattttgtctttggtttcggcccaaaaaaagttggtgttaaagtcggacactatactcaggttgtttggaattcaactttcctggttgcatgtggagttgctgaatgccctgaccaaccattgaaatacttttatgtttgtcactattgtcctggtggcaattatgtaggaagactatactcaccttacacagaaggagaaccttgtgacagttgtcctggtaattgtgaagatgggctgtgcaccaatagttgtgaatatgaagataattattctaactgtggcgatctgaagaagatggtgagctgcgacgatccacttcttaaagaaggttgcagagcttcatgcttctgtgaagacaaaattcattaaatttccagtccacataatcaggaccatgtagaaaaggaaaataccctctacttagtcttatcatgtcccaccaaaaatatgtaggtttagtacactgaaataattccaaatggtaaagattctgtttcttctcctatttctctctattttgcataagtcatttaccccaaaatattttaaaataacaaaatcaataccacctttggaactggccatatgaaatctgtgacacatttatggaatcaaatctatcccacgattatatattatttgtctgtatgacttaagtcactaaatctctggcttgaaaatatgaatcatgttcccagagcacaatgaaataagagaacagatagcatatagtccctctgtattggccaatcactttttttttagttctaccactatttttagctaattatctccggagaaaacattcacattaattgtcttctatttcttctcaccattcattattcttcacattcatcagaattagtggtttaaattctaaactaccatttatgttttgttgtcgggtctttaagaatgatattaaaatgtaacttaataaacagaatttgcttgttcaggggtaatgaccttggttgcttcagaaaaaaaataaatcttaatcttagcatatt

SEQ ID NO: 1356 - protein, 246 aa, Rattus norvegicus
  ref <308>: DATABASE ACCESSION NUMBER: Refseq / NP_074050
  ref <309>: DATABASE ENTRY DATE: 2002-03-01
MALMLVLLFLAAVLPPSLLQDTTDEWDRDLENLSTTKLSVQEEIINKHNQLRRTVSPSGSDLLRVEWDHDAYVNAQKWANRCIYNHSPLQHRTTTLKCGENLFMANYPASWSSVIQDWYDESLDFVFGFGPKKVGVKVGHYTQVVWNSTFLVACGVAECPDQPLKYFYVCHYCPGGNYVGRLYSPYTEGEPCDSCPGNCEDGLCTNSCEYEDNYSNCGDLKKMVSCDDPLLKEGCRASCFCEDKIH

SEQ ID NO: 1357 - DNA, 552 bp, Rattus norvegicus
  ref <308>: DATABASE ACCESSION NUMBER: EMBL / AA859768
  ref <309>: DATABASE ENTRY DATE: 2000-03-03
tttttttttttttttttgtactttaaataacaaacactttatttcactgacttttccataatcttgtaaatcctagatttctagaagcacggtttttggcatttggcaatacaaagtgctggggtaccttcctttaacagtgttgtcactagtatctcctgccgtgctgactcggggaagggcctacagctccttcactgataaccctgaggtctggtccctcccccagtgatacacagcactgaggcccacttgctgtaaagaaagccatggagactttctccattgtggcctgcttgggttttcacttgacagccaatcactcactgagctcatattcatcaaatttgtttgcagattaggaaactgaggcacagatagcgaaattaatgatccagttctcatataggtgctgctggggagctgagtgagtcaaccttagacttcgcacagcactactgtggtgttggctccgctgtccttagcagccagggactcacgcactttatttcctctgtacacacgaagaagcttgaccctcgtgccgaattc

SEQ ID NO: 1358 - DNA, 569 bp, Rattus norvegicus
  misc_feature (1)..(569): n=a, c, g or t
  ref <308>: DATABASE ACCESSION NUMBER: EMBL / AA945589
  ref <309>: DATABASE ENTRY DATE: 2000-03-03
tattaaaccatccctgcatgcctgagatgaagcctacttgatcatggtggatgattgttntgatgtgctcttggattcggtttcccagaattttaagatcttaatcagagacagaaagggaagatgacctacagcgagagaaggaagcttgccatgtgcaggtcaaaaagaaaagcctacaatggtctgaacaaatcaccatgatatgagatctgcagcctccagaactatgaggaagttccttttcaacaagaattaagctaccatatgtttggcttaccctgccatctgaggcacacaagtttggtggagatttttagaaaaattaatgaaaataactgtacatctgcactattggggactggaagaatcacttcactgtatcccaagctgaagcctttgataaagtgtttcaggagaaaatggccggtttccctccagggatgttcccatgggaataaaatttcaaaagttttaaatattttatgaacattgatatttatgtttctgttgttctatgtctgaataactgaatgtggtcatcgaataaatcctgttctggtattgtg

SEQ ID NO: 1359 - DNA, 1035 bp, Rattus norvegicus; identical to SEQ ID NO: 774
  ref <308>: DATABASE ACCESSION NUMBER: EMBL / X54686
  ref <309>: DATABASE ENTRY DATE: 1993-08-03

SEQ ID NO: 1360 - DNA, 3709 bp, Rattus norvegicus
  ref <308>: DATABASE ACCESSION NUMBER: Refseq / NM_013016
  ref <309>: DATABASE ENTRY DATE: 2003-01-14
cgcgctcaccgccgatctcccatccttgctctgcagccgcggcccatggagcccgccggcccggcccctggccgcctagggccgctgctgttctgcctgctgctctccgcgtcctgtttctgtgcaggagccagcgggaaagaactgaaggtgactcaggctgacaaatcagtgtctgttgctgctggagattcggccactctgaactgcactgtgtcctccctgacgcctgtgggacccattaagtggttcaaaggagaagggcaaaatcggagcccgatctacagtttcataggaggagaacactttcctcgaattacaaatgtttcagatgctactaagagaaacaatatggactttagcatctgtatcagtaatgtcacccctgaagatgctggcacctactactgtgtgaagttccagaaaggaatagtagagcctgacacagaaattaaatctggagggggaacaacgctctatgtactcgccaaaccttcttcaccggaagtatcgggcccagactccaggggctctcctggacagacagtgaacttcacctgcaagtcttacggcttctctccccggaatatcaccctgaagtggctcaaagatgggaaagaactctcccatttggagaccaccatctccagtaaaagcaatgtctcctacaacatctccagcacagtcagcgtgaaactaagccccgaggacattcattctcgggtcatctgcgaggtagcccacgtcaccttggaaggacgcccgcttaatgggaccgctaacttttctaacatcatccgagtttcacccaccttgaagatcacccaacagcccctgacgcccgcgagccaggtgaacctcacctgccaggtgcagaagttctaccccaaggctctccagctgaactggctggagaatggaaacttatcacggacggacaagcccgagcatttcacagacaacagggatgggacctataattacacaagcctgttcctggtgaactcatctgctcacagagaggatgtggtattcacgtgccaggtggagcatgacagtcagccagcgatcaccgaaaaccataccgtgcgggcatttgcccactcgagtagtggaggcagcatggaaaccatccctgataataatgcttactacaactggaacgtcttcatcggtgtgggtgtggcgtgtgctttgctagtagtcctgctgatggctgccctctacctcctccgaatcaaacagaagaaagccaagggctcaacttcttccacacggttgcacgagcccgagaagaatgccagggaaataacccagatccaggacacaaatgacatcaacgacatcacatacgcagacctgaatctgcccaaagagaagaagcccgccccccgggtccccgagcccaacaaccacacagaatatgcaagcattgagacaggcaaactgcctaggccagaggataccctcacctatgctgacctggacatggtccacctcaaccgggcacagccaacccccaagcctgagccatccttctcagagtatgccagtgtccaagtccagaggaagtgaatggggctgtggttggctctaggccccatccccacaagttttcttgtcctacatggagtggccatgatgaggacaaccagccagccagccctgtctccagaaggccaggtggcacaggtcctaggaccaggggtaagggtggcttctgtcttccctccgtggctctccaacacctcttggacacccatgtccccttcttctggagctgggtgttgcagaaccagagggggaactggagaaagctgcctagaatccaagaagcgttgtgcctcagcccatcacactgggtctggatcctggtcttggcaacccccaggttgcttccttgatgctccagcgcctggtcttctgtgtggagaagagttcaccatctccatccaacttgagcttcggggccagactccctttagatcagaccgccccatgtgtggaagaactacaccaggagtcaacaagttttcacatgtgtgaagaactacaccaggagtcaacaagtttacgccaacagtgctagcctccccacctcccaggctgacgagccctgaggagaaggaaccctcttccccctagaccagcagagactccctgggcatgttcagtgtggccccacccttccagtcccagctcgcttcctccagctagcactaactcaacagcattgctctgtggacgcctgtaaattattgagaaatgtgaactgtgcagtcttgaagctaaggtgttagaaaatttgatttgtgctgtttagttgttgttgggtttcttttcttttcttttttttcttcctttttctttcttctttttttcttttcccccttaaaacaacagcagcagcatcttggctctttgtcatgtgttgaatggttgggtcttgtgaagtctgaggtctaacagtttattgtcccggaaggattttcttatagcagaaacagattttttttccaattcccagcaccctgaggaccaagaaggatccctctgttgtcattttcagcactcagcgtcactgggatgagccaggctctgtccccacagctggcccttggcctccatggctactgtggtaagtgcagccttgtctaatccagtgctgacgttggccattcctcattgaggagagaaggtcagtgacaaactcacaagcactgcagaggcatacggagagaagggacgctcggccagcacccggtattccagcgctctgaggtaatcagtgcaaggagtctgttattaccatcagacctcagcaggatcatactggaacagaacctgatcatacctgtgacaacacagctgtcagccagggcaaaccaccccactgtcccagagtctgggcagaggctctgacccccacccttcaaactggatgtcggggcctggctgggcccaatggcaagcagatgttgcaaccctagctatctggtcttaacatgcagctcagtaagttgaggcgctaatgtccccccatgccgggggattcctggttccggctcttcaagtaagaagctgattcaacctgcctgtttctgtaggtgtgacagggatgtcaggaaaacagccaggactcatctctatagggctggtgacctgatacttcccataaaggcatccaggagttagctgacccaatagtcagagttgacctcactggcctagcaaaccgtaacttgtctttggcccagccatggtcttgggctgtcttctaattccaaagggttggtaggtaaagatccatcctcttcccctctgccaagagacatcacgtgtgtacacacacacatgcgcgcgcgcgcacacacacacacacacacacacacacacacacacacacacacacgggtgtataggtgagttaaaaggatgtcctcgctgacatcctaattttgtcttaagtttttttggagggagaaaggaaagaggcagggaagatacgtagctctagctttagtcaggcagcctggggggatccccaagcctatgtatggaaccctggtacgaaagcgccctgtgaggagtgggatttcagttttatctgtagaccagatgagaaggagaaaggccccattttgtacatagttgcaacttaaaatttttggcttgcaaaatatttttgtaataaagatttctgggtaac

SEQ ID NO: 1361 - protein, 509 aa, Rattus norvegicus
  ref <308>: DATABASE ACCESSION NUMBER: Refseq / NP_037148
  ref <309>: DATABASE ENTRY DATE: 2003-01-14
MEPAGPAPGRLGPLLFCLLLSASCFCAGASGKELKVTQADKSVSVAAGDSATLNCTVSSLTPVGPIKWFKGEGQNRSPIYSFIGGEHFPRITNVSDATKRNNMDFSICISNVTPEDAGTYYCVKFQKGIVEPDTEIKSGGGTTLYVLAKPSSPEVSGPDSRGSPGQTVNFTCKSYGFSPRNITLKWLKDGKELSHLETTISSKSNVSYNISSTVSVKLSPEDIHSRVICEVAHVTLEGRPLNGTANFSNIIRVSPTLKITQQPLTPASQVNLTCQVQKFYPKALQLNWLENGNLSRTDKPEHFTDNRDGTYNYTSLFLVNSSAHREDVVFTCQVEHDSQPAITENHTVRAFAHSSSGGSMETIPDNNAYYNWNVFIGVGVACALLVVLLMAALYLLRIKQKKAKGSTSSTRLHEPEKNAREITQIQDTNDINDITYADLNLPKEKKPAPRVPEPNNHTEYASIETGKLPRPEDTLTYADLDMVHLNRAQPTPKPEPSFSEYASVQVQRK

SEQ ID NO: 1362 - DNA, 3382 bp, Rattus norvegicus
  ref <308>: DATABASE ACCESSION NUMBER: Refseq / NM_053937
  ref <309>: DATABASE ENTRY DATE: 2003-01-14
gagtaactcccagcaagtgctgttacagaaagatgccagtccgcaggggccacgttgctccccaaaacacttacttggacaccatcatccgcaagtttgaaggccagagtcggaagttcctgattgccaatgcgcagatggagaactgtgccatcatttactgcaacgatggcttctgcgaactctttggctactcccgtgtggaggtgatgcagcggccctgtacttgtgatttcctcacgggcccgaacactccaagcagtgctgtgtcccgcttggctcaggccctgctcggggctgaagagtgcaaggtggacatcctctactatcgcaaggacgcctccagcttccgctgcctggtggatgtggtccccgtgaagaatgaggacggggcagtcatcatgtttatcctcaatttcgaggacctggcccagctcctggccaaaagcagcagccgcagcctgacccaacggttgttgtcacacagcttcctgggttctgagggctctcacagcaggccgagtggacaggggcctggcccaggcaggggcaaatacagaaccgtcagccagattccgcagttcacactcaacttcgtggagttcaacctggagaagcaccgctcaggctccaccacggagattgagatcatcgctccgcacaaggtggtggagcggacacagaatgtcactgaaaaagtcacccaggtcctgtccctaggtgcagatgtgctgccagagtacaagctacaagcaccgcgtatccaccgaggcaccattctgcactacagccccttcaaggccgtgtgggactggctaatcttgctcttagtcatctatacagcggtcttcacgccctactctgccgcctttctactcagcgaccaggacgaatcacagcgcggtacctgtggctatacctgcagcccgctcaccgtggtggacctcatcgtggatatcatgtttgtcgtggacatcgtcatcaacttccgaaccacctacgtcaacactaatgatgaggtggtcagccacccacgacgcatcgctgtccactatttcaagggctggttcctcattgacatggtggctgccatcccctttgacctgcttatcttccgcactggctcagatgagaccaccaccttgattgggttactgaagacggcgcgcctcctgcggctggtgcgcgtggcccggaagctggaccgctattctgaatacggggccgcggtactcttcctgctcatgtgtactttcgcgctcattgcgcactggctggcctgtatctggtacgccatcggcaacgtggagcgaccctacttggagcccaagatcggctggctggacagcctgggtgcacagcttggcaagcagtataatggcagcgacccagcctcaggaccctctgtccaggacaagtatgtcaccgccctctacttcaccttcagcagccttaccagtgtgggcttcggcaacgtgtcacccaacaccaactctgagaaggtcttctctatctgcgtcatgctcattggctcccttatgtacgccagcatctttggcaacgtgtcggccatcatccaacgcctgtactcgggcactgcccgctaccacacgcagatgctgcgtgtcaaggagttcatccgcttccaccagatccccaacccactgcggcagcgcctggaagagtatttccagcacgcctggtcctacaccaacggcattgacatgaacgcggtgctgaagggcttccctgagtgcctgcaggcggacatctgcctgcacctgcaccgcgctctgctgcagcactgccccgccttccggggcgccagcaaggggtgcctgcgcgcgctcgcggtcaagttcaagaccacgcacgcgccgcctggggacacgctggtgcacctgggcgacgtgctctccacgctctacttcatctcccgcggctccatcgagatcctgcgcgatgatgtggtcgtggccattctagggaagaatgacatctttggggagcctgccagtcttcatgccaggccaggcaaatctagcgcagatgtgcgcgccctgacctactgcgacctgcataagatccatcgagcagacctgctggaggtgctggacatgtaccctgcctttgcagacaccttctggaataagctggaggtcaccttcaacctgcgggacgcagatgggggtctccagtcaacaccccgacaggccccaggccaccaagacccccaaggcttcttcctcaatgacagtcagtcaggtgccgccccttccttgagcatttcagacacatctgcactttggcctgaattgctacagcaaatgcccccaagtcccccaaacccacgacaggacctggattgctggcatcgggagctaggctttaagttagaacagctccaagcccagatgaacagattggagtcccgtgtgtcatcagacctcagccgcatcctacagctgcttcagcacccgcagggtcgccccagctacatcttgggagcctctgcctccagtgacctggcctcatttcctgaaacttcagtgactcggagttcagagtctacgcttctggtgggacatgtgccctctgctcagaccctaagctacggtgacttggacgaccatattcagacacccaggaatttctcccccaggacacctcacgtggccatggcaatggacaaaactctggtgccatcctcagaacaagagcaacctgggggtctcctgtcacctctagcctcacctctgcgtcccctggaagtaccgggactgggtggttcccgcttcccctccctccctgaacacctcagctcagttcccaagcagctagagttccagagacacggttccgatcctggattcacaaggagttagggcctttagaccccagggtaaaagctaccatgagggaatttaagtacagtgaggtgagagttaagcccccttcgggggagggccaggcagctctcccataaaactctgaaaaccatttcctcagagaaactgtagaccgctgagccagtgaccaggatgatctgagcaaagaggctcaggacttggcccgggctccttgggacccctgtagtcagcaagccaggcagaggtttgctcagaggtagcttacaggatgccagtggagaatacagatgcttcagatctctgggagggtcttgcttggggccgcatgtggttggctcccagctcagaaccaccttctgcctcaaaagcccagacccaaggccaggtttgaccagacctttaccaaaagcctctacctaatatggctggaattagaggtgtcctctgtggtggacataaaagacagggagctgcagccctcagcccctcttcccctgagactctcataacag

SEQ ID NO: 1363 - protein, 950 aa, Rattus norvegicus
  ref <308>: DATABASE ACCESSION NUMBER: Refseq / NP_446389
  ref <309>: DATABASE ENTRY DATE: 2003-01-14
MPVRRGHVAPQNTYLDTIIRKFEGQSRKFLIANAQMENCAIIYCNDGFCELFGYSRVEVMQRPCTCDFLTGPNTPSSAVSRLAQALLGAEECKVDILYYRKDASSFRCLVDVVPVKNEDGAVIMFILNFEDLAQLLAKSSSRSLTQRLLSHSFLGSEGSHSRPSGQGPGPGRGKYRTVSQIPQFTLNFVEFNLEKHRSGSTTEIEIIAPHKVVERTQNVTEKVTQVLSLGADVLPEYKLQAPRIHRGTILHYSPFKAVWDWLILLLVIYTAVFTPYSAAFLLSDQDESQRGTCGYTCSPLTVVDLIVDIMFVVDIVINFRTTYVNTNDEVVSHPRRIAVHYFKGWFLIDMVAAIPFDLLIFRTGSDETTTLIGLLKTARLLRLVRVARKLDRYSEYGAAVLFLLMCTFALIAHWLACIWYAIGNVERPYLEPKIGWLDSLGAQLGKQYNGSDPASGPSVQDKYVTALYFTFSSLTSVGFGNVSPNTNSEKVFSICVMLIGSLMYASIFGNVSAIIQRLYSGTARYHTQMLRVKEFIRFHQIPNPLRQRLEEYFQHAWSYTNGIDMNAVLKGFPECLQADICLHLHRALLQHCPAFRGASKGCLRALAVKFKTTHAPPGDTLVHLGDVLSTLYFISRGSIEILRDDVVVAILGKNDIFGEPASLHARPGKSSADVRALTYCDLHKIHRADLLEVLDMYPAFADTFWNKLEVTFNLRDADGGLQSTPRQAPGHQDPQGFFLNDSQSGAAPSLSISDTSALWPELLQQMPPSPPNPRQDLDCWHRELGFKLEQLQAQMNRLESRVSSDLSRILQLLQHPQGRPSYILGASASSDLASFPETSVTRSSESTLLVGHVPSAQTLSYGDLDDHIQTPRNFSPRTPHVAMAMDKTLVPSSEQEQPGGLLSPLASPLRPLEVPGLGGSRFPSLPEHLSSVPKQLEFQRHGSDPGFTRS

SEQ ID NO: 1364 - DNA, 1062 bp, Rattus norvegicus
  ref <308>: DATABASE ACCESSION NUMBER: EMBL / Y14706
  ref <309>: DATABASE ENTRY DATE: 2001-08-31
atggccatgccctctgcgttgtcttcgaggccctgggatgctgtgttccccaataccactacagcagcatggaccaatggaagtgtgccagagactcccctgttctacctattcgcccggctggatgaggaacttcatgccaccttccccagcctgtggctggcactaatggtcgtgcatggcaccatcttccttgccgggctgttcctcaatggactggcgctgtacgtcttctgctgccgcacgcgggccaagacaccttcagtcaccatatccatcaacctggtggtgactgacctgctggtgggcctgtccctgcccacacgctttgcagtcttctacggtgcccgcggctgcctacactgtgccttccctcacgtcctgggctacttcctcaacatgcactgttctatcctcttcctcacctgcatctgtgtggaccgctacctggccattgtgcaacctgagggctcccatcgctggcgccagccggcctgcgccaaggctgtgtgcgtctttgtgtggctggcagcgggagtcgtgaccctgtctgtattgggtgtgaagactggtggacggtcatgctgccgggtctttgctctgaccgttctggagttcctgctgccgctactggtcatcagcgtgttcacaggccgtatcatgtgtgcactgtcgaggccaggcctcgtacgccagggtcgtcagcggcgcatgagggccatgcagctgctgctcacggtgctggtcatcttcctggtctgtttcacacccttccatgcccgccaggtgactgtggcactgtggcccaatgtgccttaccataccagccttgtggcttaccatgtggccgtcaccctcagcagcctcaacagctgcatggaccccatcgtctactgttttatcaccagtggtttccaggccactgtccaaggcctcttctaccagcgtggagaagaattcaagcccagcactatggatatggtcagcatgcacaagagcaccaagggctcagccccattcacatcctcagcaccggttctcacaccctcacccagcctttga

SEQ ID NO: 1365 - DNA, 2340 bp, Rattus norvegicus
  ref <308>: DATABASE ACCESSION NUMBER: EMBL / U61405
  ref <309>: DATABASE ENTRY DATE: 2000-03-04
gagggccgcggcggcgctggccgcgccgggtcccggtccccgcccccgccccgcccccgcccggcgctccggtcccttcccggcaagatggcaaccccggccgccgtcaaccctccggaaatggcttcagacatacctggatctgtgaccttgcctgttgcccccatggcggccacgggacaggtgagaatggcaggggccatgcctgcccgaggaggaaagcggcgatccggaatggactttgatgacgaagatggtgaaggtcccagtaaattttcaagagagaaccacagtgagattgagcggcgcaggcggaacaagatgactcaatatattacggaactctccgacatggttcccacctgcagtgcactagctaggaagccagacaagctcaccattctacgcatggcggtctcacacatgaagtccatgaggggcaccggcaacaaatctactgacggcgcatataagccttccttcctcactgagcaggaactgaagcatctcatccttgaagctgctgacggatttctgtttgtggtggctgccgagacagggagagtaatctacgtgtctgattctgtcactcctgtcctgaaccagccacagtcagagtggtttgggagcacactctatgaacaggtgcaccctgatgacgtggagaaactgagagaacagctgtgcacttcagaaaactccatgacaggccgcatcctagacctgaagactgggacagtgaagaaggagggacagcagtcgtccatgcgcatgtgtatgggctcccggcgctccttcatctgtagaatgaggtgtggaaatgctcccttggaccacctgcctttgaacagaataaccaccatgaggaaaaggttcaggaatggccttggccctgtgaaagaaggagaagcccaatatgccgtggtccactgcacaggttacatcaaggcttggccaccagcaggaatgagcatacccgaagaagatgctgatgttggacaaggcagtaaatattgccttgtggcaatcgggaggctccaggtgaccagctctcctgtgtgcatggacatgagtggcatgtcagtgcccacggagttcctgtctcggcataactctgatgggatcatcacgtttgtagacccaagatgcatcagtgtgattggctaccagccccaggaccttctgggaaaagatattttggaattctgccaccctgaggatcagagccacctacgggagagcttccagcaggtggttaaactgaagggccaagtgctgtcggtcatgtacaggttccgcaccaagaaccgggagtggctgttgatccgcaccagcagcttcaccttccagaacccctactctgatgagatcgagtatgtcatctgcaccaacaccaacgtcaagcaacttcagcagcagcaggcagagctggaggtacaccagcgagacgggctgtcatcatatgacttgtctcaggtcccggtacccaacctacccactggtgttcatgaggcagggaagcctgtggaaaaggcagatgcgatcttctcccaagagagagaccctcgttttgctgagatgtttgcaggcatcagtgcatcggagaagaagatgatgagctcagcctcagcatccggcagccagcagatctactcccaaggaagtccattccctgccgggcactcgggcaaggccttcagctcttctgtggtccatgtgcctggagtgaatgacattcagtcctcctcctcaacgggccagaacatatcccagatctcccggcagctgaaccagggccaggtggcatggacaggcagccgtccacccttcccagggcagcccagcaagacgcagtcatctgccttcggaattggatcaagccacccctacccagccgacccttcatcctacagtcctctctccagcccagctgcctcctcaccaagcggaaacgcataccccagtcttgccaacaggactccagggtttgctgagagtggacagagtggagggcaattccagggccggccctcagaggtctggtcccagtggcagagccagcatcacggacagcagagcggtgagcagcactcccaccagcagcctggccagactgaagtgttccaggacatgctacccatgccgggcgacccgacgcaggggactggcaactataacatcgaggactttgctgacctgggcatgttccctccattttctgagtagcttcaggcaaagccaggcttctactgcccaggcgctattatcataccatagatgcccatgttcaaagagtgccccctcacccagcttgccctgctgcagaacccctctcgtgcc

SEQ ID NO: 1366 - DNA, 328 bp, Rattus norvegicus
  ref <308>: DATABASE ACCESSION NUMBER: EMBL / AA799671
  ref <309>: DATABASE ENTRY DATE: 2000-03-03
gaagggggtccgtttttaggttaaaaagtattttaaatttatttgggtgggatgttggttgtatttgggtaaacaaccgcaagggcaacggaggagtacccggaaacttgagggccaaattggttaattttaaatttttttgtttaagggctttttacggagttggaaatgtccaacttgttaagtttgaaaaaaaagggggagttagttgattttgaaaccccaggcaattggttaatgtatgaaattgacaatgttggggttatcttggaggggggggttggggttccggcaatttaaaattgggccacttgaaggaaaggggggg

SEQ ID NO: 1367 - DNA, 3615 bp, Rattus norvegicus
  ref <308>: DATABASE ACCESSION NUMBER: EMBL / J02649
  ref <309>: DATABASE ENTRY DATE: 2000-03-04
ctgagcaataaaggggtacatacacttgtctgctcctagaaatcgatacatgcacacgactgcttcgaagggaaggatgctcttcatgaatgtcacgatgtacatgagacgaggggtgcagatcatgggctggtcagtgaggatggccttcatggcctgcttcacacagtaatcgggcttcaaagagggcagagcacctagccaccatggggaaggagaattatgaattgtactcagtggaactggggactggccctggtggggacatggctgccaagatgagcaagaagaaggcgggaggcgggggaggcaagaagaaggagaagctagagaacatgaagaaggagatggagatgaacgaccaccagttgtcagtgtctgagctggagcagaagtaccagaccagtgccaccaagggcctgaaggcgagtctggcagctgagctgctgctgagggatgggcccaatgcactccggccacctcggggcacccccgagtacgtgaagttcgcccggcagctggcaggcggtctgcagtgcctcatgtgggtggctgcagccatctgcctcattgcctttgcgattcaggccagcgagggagacctgaccactgatgacaatttgtacctggcgttggcactcattgctgtggttgtggtcactggctgttttggctactaccaggagttcaagagcacaaatatcatcgccagcttcaagaatcttgtaccccagcaagccacagtgatccgagacggggataagttccagatcaacgcggatcagcttgtggtgggcgacctggtagagatgaaaggcggggaccgcgtcccagcagacatccgaattctgtcagcccagggctgcaaggtggacaactcctcgcttactggagagtctgaaccgcagacccgctcacctgagtgtacacacgagagtccccttgagacccgcaacatcgccttcttctccaccatgtgtctggagggcacggcgcagggcttggtggtgagcaccggtgatcgcaccatcattggacgcatcgcctctctggcttcgggtgtggaaaacgagaagactcctatcgcgatcgagatcgaacattttgtggacatcattgctggcctggccatcctcttcggtgccacattctttgtggtggccatgtgtatcggctataccttccttcgggccatggtcttcttcatggccattgtggtagcctatgtgcctgaggggctgctggctactgtcacggtctgcctgtcactgacagcaaagaggctggccagtaaaaactgtgtggtcaaaaatctggaagcagtggagaccctgggttccacgtcagtcatctgctcagacaagacaggaactcttactcagaaccgcatgacggtgtctcatctatggtttgacaaccatatccacacggcggacaccacagaagaccagtcagggcaaacgttcgaccaatcgtcggagacctggcgggcgctgtgccgcgtgctcaccctgtgcaaccgcgctgccttcaagtctggccaggacgccgtgccagtgcccaagcgcatcgtgatcggagacgcatctgagactgcgctgctcaagttctcggagttgacgttgggcaacgccatgggttatcgggaccgcttccccaaagtttgcgagatccccttcaactccaccaacaagtttcagctgtccattcacactctggaggatccgcgcgacccccggcacttgctggtgatgaagggcgccccagagcgcgtgctggagcgttgcagctccatcctcatcaagggccaggagctgcccctggacgagcaatggcgtgaggccttccagacagcctaccttagcctgggaggcctaggcgaacgcgttcttggtttctgccagctctacctgaatgagaaggactacccgcctggctacacctttgatgtggaggccatgaactttccgagtagtggcctctgctttgcgggacttgtatccatgattgaccctccccgggccaccgttccagatgctgtgctcaaatgccgtacggcaggcatccgggtgatcatggtgactggtgaccatcccatcacagccaaggccattgcagccagtgtggggatcatctcggaaggcagcgagacagtggaagacatcgccgcccgcctccgaatgcctgtagaccaggttaataagaaggatgcccgggcctgtgtgatcaatggcatgcagttgaaggacatggacccgtctgagctggtggaggcgctgcgcacccaccctgagatggtgtttgctcgaaccagtcctcagcagaagctggtgattgtggagagctgtcagcgactgggtgccattgtggctgtaacaggggatggtgtgaatgactccccagccctgaagaaggctgacattggtgtagccatgggcattgctggctccgatgctgctaaaaatgctgctgacatgatcttgctggatgacaacttcgcttccattgtgacgggcgtggagcagggccgactgatctttgacaacctgaagaaatccatcgcctatacactgaccaagaacattccagaactgacaccctaccttatctatatcactgtcagtgtgcccctaccccttgggtgtatcaccattctcttcatagaactctgcacagatatctttccatctgtgtccctggcatatgaaaaggccgagagtgacatcatgcacctgcgcccacggaaccccaggcgggaccggttggtcaatgaacccctggctgcttattcctattttcagattggtgccattcagtcatttgccggctttgctgactacttcacagccatggcccaggagggctggttccctctgctgtgtgtggggctgcgaccacaatgggaggaccaccatctacaagatcttcaagacagctacggccaggaatggacatttggtcagcgtctgtaccagcagtacacctgttacaccgtgttcttcatcagcatcgagatgtgccagattgctgatgtcctcatccgcaagacacgccgcctctccgctttccagcagggattcttcaggaacaggatcctggtgatcgccatcgtgtttcaggtctgcattggctgcttcctgtgctactgcccagggatgcccaacatcttcaacttcatgcccatccggttccagtggtggctggtccccatgccctttggccttctcatctttgtctatgatgagatccggaaacttggagttcgctgttgcccagggagctggtgggaccaggaactctactattagaggggtaatcacctctccatccactatcagctgggacaaaacatcgtgtaatctgtccccagccctatggaactgtgcccacttctgcagcccatgacaccattggagggactctaccctttacccctttcactccatagtcccacacccaggaaagtactgggatgggaggggctaaacagcggttggcagctcctgtggaggtgtgtccatctcaaggactccatctggacaagagggttgtgtggggctctgttacaaattcctcatgttctgctggacagtaataaagccatgtcatatcacc

SEQ ID NO: 1368 - DNA, 443 bp, Rattus norvegicus
  misc_feature (1)..(443): n=a, c, g or t
  ref <308>: DATABASE ACCESSION NUMBER: EMBL / AA892128
  ref <309>: DATABASE ENTRY DATE: 1999-01-28
taaaattcttctgcctatgaatgtaggaatgtcagttttctgtgacaaatctgatttttctcaggacaactgggaggggcgggaaagagctatcgggccagtggagaggntgtggngatgctcttcacggctcagccttcctgtcttgagcttggtttaggtgtgtgaagtgggagacactggccagcaggtgggccagtgtctcagcaccgataaagccgtgtacagttaagtggaaatgagaactctgcactaagtaactgctttccgtgaatgtgaagaagattcttgcaaagtggactcaggaccttggcactgtatttgtaaaatgataatgtgctttgagaaaaccttagggggaggggagatgaaagaaattaaagtggctaaaacaagacaaatatgagtaaatgcctatttttactgtaacattaattatgtct

SEQ ID NO: 1369 - DNA, 2141 bp, Rattus norvegicus
  ref <308>: DATABASE ACCESSION NUMBER: EMBL / S48813
  ref <309>: DATABASE ENTRY DATE: 2000-03-04
caagatggccgacctggaggcggtgctggccgatgtgagctacctgatggccatggagaagagcaaggccacgcgccgcgcgcgcgccagcaagaagatcctgctgccagagcccagcatccgcagcgtcatgcagaagaatctagaggatcgaggagaagtgacctttgaaaagatcttctcacagaagttaggatacctgcttttccgggacttctgcctgaaccatctggaagaggccaagcccttggtggagttctatgaagagatcaagaaatatgagaagctggagacggaggaggaacgtgtggtccgcagccgggagatctttgactcctacatcatgaaagaactgctggcctgctcacatcccttttcaaagaatgccacggagcatgtccagggccacctggtgaagaagcaggtacctccagatctcttccagccatacattgaggagatttgtcagaacctccgaggggatgtgttccacaagttcattgagagtgacaagttcacacggttctgccagtggaagaatgtagagctcaacatccacctgaccatgaatgacttcagtgtgcatcgaatcatcgggcgtgggggcttcggtgaggtctatgggtgccggaaagcagacacaggcaagatgtacgccatgaagtgtctggacaagaaacgcatcaagatgaagcagggagagaccctggctctgaacgagcggatcatgctttccctcgtcagcactgtggactgccccttcatcgtgtgcatgtcatatgcattccacacaccagacaagctcagtttcagcctggatctcatgaacggtggggacctgcactaccacttgtctcagcatggtgtcttctctgaagccgacatgcgctactacgcagctgagatcatcctgggccttgaacacatgcacaatcgctttgtagtctacagggacctaaagccagccaacattctcctggatgagcatggccatgtgagaatctcagacctgggcctagcctgtgacttctccaagaagaagcctcatgccagtgtgggcacacacgggtacatggccccggaagtcctacagaagggcgtggcctatgacagcagtgccgactggttctccctgggctgcatgctcttcaagttgttgcggggacacagccccttccggcagcacaagaccaaagacaagcatgagattgaccgcatgacattgacaatggctgttgagctgcctgactccttctcccctgaactccgatccctgctggaaggtttgctgcagagggatgtcaatcggagactaggctgtctgggccgtggggctcaagaggtaaaagaaagccccttcttccgttccctggactggcagatggtcttcttacagaagtaccctcctccactgatccccccacgcggggaggtgaatgcagcggacgcctttgacattggctcctttgatgaggaggacacaaaaggaatcaagttactggacagtgaccaggaactgtaccgcaacttccctctcaccatctctgagcggtggcaacaggaggtggcagagactgtctttgataccatcaatgctgagacagaccggctggaggcacggaagaaagccaaaaacaaacagctgggccacgaggaggactacgccctgggtaaggactgcatcatgcatggctacatgtccaagatgggcaaccccttcctgacccagtggcagcggcgatacttctacctgttccccaaccggcttgagtggaggggtgaaggcgaggctccgcagagcctcctgaccatggaagagatccagtcggtggaagagacacagatcaaggaacgcaagtgtctcctgcttaagatccgaggtggcaagcagtttgtcctgcagtgtgatagtgaccctgagctggtgcaatggaaaaaagagctacgagatgcttaccgtgaggcccagcagctggtgcagcgagtgcccaagatgaagaacaagccacgctcacctgtggtggagctgagcaaggtgccactgattcagcgtggcagtgccaacggcctctgattcacccatctgctgcccgcctgcccacccgccttttataaacctctaatttattttgttgaatttt

SEQ ID NO: 1370 - DNA, 558 bp, Rattus norvegicus
  ref <308>: DATABASE ACCESSION NUMBER: EMBL / AI638950
  ref <309>: DATABASE ENTRY DATE: 2000-03-04
atttactgtaaatatacgtggacatagtaagctcagaatgtcttatgtccctgctgtattatcatctttatggaaaaaaattcattttgttctctgtagagccattagaaaaatgaattatattggaaaaaataattatgttggtgatttgaagaagtaactttgtgggttgtctctttgttccacagtaaaactttatgctcagtgtccctattctgcattgtttacattcttaaggtttttattttaatcatccatgagtgtaaaaaatgtacatattatttttaacatctcaatttgaagagacatacagttaaacttgacttttttgataaaaacgtgtaggtcattgtctgctaacagcgaattgtagccatatgcttcatagtgatgtggctttctgtcatagttgtgtccttggtatttattgagcatccacacagatagttttttcaacaactcttttgattgagctgtaatcctttttaaggctttaatttgattttataattgtcagaatgtgatgttcagcaataaaagatcaaatgtaaaccagaa

SEQ ID NO: 1371 - DNA, 553 bp, Homo sapiens
  misc_feature (1)..(553): n=a, c, g or t
  ref <308>: DATABASE ACCESSION NUMBER: EMBL / AU152292
  ref <309>: DATABASE ENTRY DATE: 2002-08-06
aacataaaatgctggtacacatttattcttttattgctaaacatcaaatgccggcaattacgataccttcaagttaaagcttaagaatgaattacaggacagtcagaagatttatagaaaaaaacacctgtgcaccattagtatgtgaacattcaataaataccataggacaaagtgatgactgagagccacaatatctatgaagcacatgtttacaatttgctgttagaacagacaatgacctgtaagagcgattatcaaaaggtcaagtttaactgcatgtcttttcaaactgagatgctgaaaagaatatatacattctttacagattgtaggtgattaaaaaaaactgtcaaaaatgtaaacaatgcagagtaggaacactgagaataaagttttactgttgaacaaagtgacaacgcagaaagaacactttcttcaatcctcaaaataatccatttttccaatcactctacagaaaccacagtggattctttncatgaagatgataatatgccagggacacaaagacccttcaggtatttttttatgg

SEQ ID NO: 1372 - DNA, 13539 bp, Rattus norvegicus
  ref <308>: DATABASE ACCESSION NUMBER: EMBL / AF005720
  ref <309>: DATABASE ENTRY DATE: 1998-03-25
cctgcggcgcgcgaccggggacccgtcgcactctgcactcggccgcccgggctaaggggacaggacgggtgcgggcgcgggctcagcgagccgggagctgagtcaaggccagagcccgagaagcaagaggaggcaagaggacagtgcaccgagatggcggccgcaacggccgcggcggcgacggtggcgggggaagggatggagcctcgagcgctgcagtacgagcagaccctggtaagtgaaacccaagggttgcgctaccgtaccactgcttcaggttgccctggaaagtgtgaagacaggcggcctaccctaacccggtcccagccttcctcagccgtggaaactgaggttcgggatcccccaggctgtagattcggggtgttggaaagctgcttgctgatttctgactgagactggcggcctgcaggagacaatgacactagggtgcttgggccaagtgtccttacccttaccctcttctgcatacactttttcgttttcttatcactcgaagccaagttatagcacccagtgctctttctgagcaaccatctatacctctgaactttctccacatgtctgtccacattcaacacccttcctgggtccctgctatgtacctggtactaagctgagcataaggacggtaggcaagtgagcaaaccaagcccaacccctgcttttaatggctcaaagcccaacattgaccagaactactcagtcgacccttttgggaaaggtggcttaggtggtttttggcaccccgggcactgaagctttagggctgatgcaggaagcaggaatgggtgtgagaactgaaacctttgttccagctggatctagccaggtaccccatcaccaccacccacggccatgaagtgtcccttgacctcataaggagagggtcctgaggtttgagatgactcatggccaccattgttggagagccattcaccatcatgtcactagagtaaagggggtggggggacccaagccctaaagaaagaaactggccctgtggctcctttctcttttttttcatcagcttaggctggaatttgcccgggagggcggcagggaggaacctctattggggagggcctgggctgtaactgagtcagagaggtgcccaattaccagggactgtgaaacaggatgactgggagaggtggtgggtatggaaatacagtgcccatagtggagacaagccctttttggggagatggccaatatcctgtcaatccacaggtcgaggagaggggcatttggccacagaagccaggcacctaacctctgaatgctatctctttcgcaccagcggctgccccatctccttgtgtctgtggaatgagttctcagggtcaagcgctccctgctcaggcctctcccacttcccctcctacccttttggcttgccctcacctcctcccacctgctgtgtttctctgtacactcttcctcctccctgctctggacactgccttgctttcccttgactctcccttctgcctttcctctaaagttcctcttcccctggttcgccctttcttctgtctcaccctgtgtctctatcttttccctcccccccccaccccaaccccaacaggagcctttgtgtcctgaagctccgcgggtggcagcagaatctactcctccccaccccccaacacacgcccggcttggcaggtccagccgtaacacagtcacgggctcgccatctacagcctcgggagtggtccctctgacctgtcactgtccccaagtgcagttccagagtaggactgagggcacccaacactgcctacccacccaaagaggctttccagttcagctgggctgacaggctaatgggggtttgggagtagagaatgaggacaaggggattagggtgggtgggaagggtgcagctgggttggtcacaggccagaggcccagcaggaacgtgataaggattggagctgagacctccgcggaccagctctgctgccctctgcgggccagctctgctgccctcagccccaccaggctcttgctgttacacatgcgcccttgaccatccctcattctctgaccttcgctcctcccacttttagactgccttaagttttttcatcttttccctcctctggacccttccttcccgctccacccctgactttctggaagaggaccaattattctgccacccccagagttgtgtccctgtaccttgtctgtccccatcactctggccaggacagcccccacagtctgcagtgtgcattgttcccacactccaagcctgagtataaattggattcaagatgggatatactgtatgggagctgagcgagggggcggggtcaactacggtgtgggagctgagcgaggggcggggtcaaatacagtgtgggagctgagcgagggggcggggtcaaatacagtgtgggagctgagcgagggggcggggtcaaaacccaggaaaactctgtctccccacctcagccactcaggcttatgccacatctgtccattgctccagatgtatggccggtatactcaggaactcggggcctttgccaaagaggaagctgctcggattcgcctgggagggcctgagccctggaaggggtccccttctgcccgggctaccccagacctcctagaatatggacagagccgatgtgccagatgtcgcagtaagatccagattggggcagggacccggatgttctatattgaggaagacaaagaccattagagctggccacgggggatggggagaagcggggtacagagtaggaacacatggtaccagcttcttcaaggatcttcccttccttgcttccagtttgttctgtacgctgccacaagttcctagtgtccagggtcggtgaagattggatcttcctggtcctgttggggctcctcatggcattggtcagttgggccatggactatgccatcgctgtctgtctacagggtgagggcaaaggctggggagggccgacctgctccctgcatgccacagttgtttaggtaacttggctactggccactttctccggccagtctgactgaccatctccaggcaataatgactgccacttgcacatgccacacctccctaccgtcccttgacaactgtcttatctgcgacgggctttgtcccagtaaatgccttccagaacctcccctctgtccccgctctggacacttgtcttatcactgtgtcccagtggcagggaaggtgcgggtgtgtgtgcactggaagcccagcgagcatgtcttctacccacagctcagcaatggatgtcccggggcttaaacaccaacatcttactccagtacctggcttgggttacctaccctgtcgtcctcatcactttctctgccggattcacccagatcctggccccgcaggctgttggtaggataggaggagctgggggaggctcaagcttccggaacggaacggcgtccatcagatgactcttctggacatgtatctctgcagggtctggcatccccgagatgaaaaccatccttcggggagtggtgctgaaagagtacctcaccctcaagacctttgtagctaaggtcatcgggctgacctgtgccctgggcagtgggatgccccttggcaaggaggtaattgcaggttggggaatgaaggagtccctcccattggaagaaaaggccaggcgaaggtccagcaagtcctgtccctactcactcccaacccctacctccagggaccctttgtgcacattgccagcatgtgtgctgcccttctcagcaagttcctctccctctttgggggtatctatgaggtaagaggaaagtcctagggatctaggggaggggaaggtgggctgctgagcccaagctgacactgcatccccacccttgccagaacgagtcccggaacacagagatgctagctgccgcatgcgcagtaggagtgggctgctgctttgccgcaccaatcggaggtaggcggggctccagtcagcacagcctgggccctacatctggcctctcctcctgtacccctcttcctctgggagttaagtccataggtcagaccctggcctcaagggcgctatcctctgccccccctgcaggggtcctattcagcattgaggtcacctccaccttcttcgctgttaggaactactggcggggcttctttgcggccaccttcagtgccttcatctttcgggtcttggcagtgtggaaccgtgatgaaggtgggaatcgtaggggtgggggatccaagtgttatttaagtgggacacaagttagacctcctcccgccgaccctcacacctacatacttcttctccctttagaaaccatcacagctctcttcaaaactcggttccgactcgacttcccctttgacctgcaggagctgccagcttttgctgtcattgggtaaggagctaaggggagggcgtaggtcaggaaggaggtttctatgagaaggcgtgtacttctcatggaaactctagccctgtacttcttgcttctttagtattgctagtggcttcgggggagccctctttgtctacctgaaccggaagattgtccaggtgatgcggaagcaaaaaaccatcaaccgcttcctcatgaagaagtacgttggccacagactcctctccagactgttctgggttgtataaggaccacatggggagagagggaggcactgaggatccgaagcagagacccagtcaaaatcaggcgctttagcaaggtggggtactacaggtctatgatctcagcactacagaggctgaagccggagaattgtagcaaattctaagccatctgtggctacagcgtgatactatgtctctctcaagtgaaaacataaagactgctacggttggaaaatgctttggtgtcctcgtgctgattctggggaaaccagctggaaatgggttacttcttgaaccctaggcactggctggggacttgggataaaagacccaaggtttacttaggtcctcaggcctggtccagatagcagatagtgtttgtacctcagtttaccccgtgactggtgtgaatgaatggatgagttatcttccgagcatagctctttccactgtgaatgggagaactgggaatgtgaaggtatttgagacatgagagctgttccctacaggacttgcggtgactgtatgagagcccttggctccttccacactgtcttccctggctggcctggaactctatatagcccaggacggccctgaactcagagatctacctgcctctgcctcccagtgcgagggtcaaaggctgtctgcccccccagcttacactgctgtctctcaagtcaccacagaggggcaaagagtggcaaaggcatctttaagcctgcatatcacttgcccttcagctggggtttctgagagcagaggtggtcacaggcttgtccaagaaggggctcaacacgtgtttgctgttgctgccacctccggagtaagcgaaggagccctctgccaccagctcttacaataatcccagtccaccatcacccttggagctgtggcatcaaacacagtaaaaaggccctaccccccccccaccaccccccccaggcgctgtgctttgataaggcctaggctctgccctgagcttagtcctgagataagcaagagctcctggcctatgggagacctgtctcttgtctgattctgtaacccctctacctctagacggctgctcttccccgcactggtgactctgctcatctccactctgaccttcccccctggctttggacagttcatggccggacaggtagcccctatgggacttgtgacacgcacaccccagcccccagcagcatgactgggatcccttgttcccatgcgctccttcctggggtcctgtgccccaaacctaaaggattgtgttcaccgtagctctcacagaaagagaccctggtcacactgtttgacaaccggacatgggtccgccagggcctggtagaggatctaggagcacctagcacttcacaggcctggagcccaccgcgcgccaacgtcttcctgactctcgtcatcttcatcctcatgaaggtgagatcctttccaccgatatggaccccctgacgtttatttacgcaggccgctaaccgctccagcactcaccatgaatcagaatattgtgagaaagggactcctgtccccgtgtttagagatggtgagtcaaaagacaagtagtaactgtccgaacagttggtcagatgtgagggcttgaacccaacccatctagttctagagtcctttcttttttcttcgcctctggggattctgggctaggattgtgctgagaggtgagtaaggcctgcttccctgaggcctctgttctgaacccatgctgcctacagttctggatgtctgcactggccaccaccatcccagtgccctgtggtgccttcatgcctgtctttgtcattggtgagtctgcctctgcctgcctcccagcctgcccctcccctaccctctggctatggtcttgtggagtccttctctgcccaggagtgggtgttgacccaactcttgccccaaccccaactcccgttagggggactgctacccctttactaaatgacccaccgggccctcccctactcccctgaccctctctcttcatagtgtccccccactacctctctctcttcctaaaaccctccctgaaggagcagcatttggccggctggtgggcgagagcatggctgcctggttcccagatgggattcacacggatagcagtacctaccggattgtacctggaggctatgccgtggtcggtgagcacccagttttatttgcttcgtggtgctggggctcaaacccagggtattgcacatgataggcgtgtatttaaactctcaggagtatccccagtccatacctgcatttggagaccctggcccagccagactgtggggttctggtgccccctgctggcaagcccaagtactgtatgggaccaccccgagaggctcccagagaccatggggaaggaagggaaagtatcccggggaactgagcatccttgggagactgggcatggctgtttccaggggcagctgcacttgcaggagcagtgacacacacagtgtccacagcagtgattgtcttcgagctcaccggccagattgcccacattctgcccgtcatgattgctgtcatcctggcgaatgccgttgcccagagcctgcagccctccctctatgacagtatcatccgcatcaagaagctgccctacctgcctgagctgggctggggccgccaccagtatggagggcccagtgcaaagagggtgggagtggtggggaggcctcccaggacccttgagccccacctccagcaaggtcccttaccagtagggctgagacgctaactattttgccctgcattaggactgccctcaccctggggggtctgtagttggcctctactgacccaacccgagaggaaggtggagaatactaactgccctgtgcaccctccactcctaccccacacactggttctgcagccgtcctcatgacaccctgggccaacctgggccagccttccatgctgagcgcacactgactgcccagttccatctccaggcagtaccgggtacgagtagaggacatcatggtacgggatgtaccccatgtagccctcagctgcacttttcgggacctgcgactggcactgcaccgaaccaagggccgtatgttggccctagtggagtcacctggtgagaccaagaggggtccccggtgttatgggcgtctcctaggagcacagctcaggaaggattaagcagcccagaatgaggcttttcccatagcttctgtccagggctccagcctgggtgtagaaggcagcaggtaggagctctcgctcctggctcctgagtcccttcccttgctctgcccagagtccatgattctgctgggctccatcgaacgctcacaggtggtagcgctactgggagcacagctgagtccagcgcgccggcggcagcacatgcaaaagctaaggaaagcccagatgtccccaccgtcagatcaggagagcccccccagctctgagacgtccatccgcttccaggtaagggaaaaacgactccatacacgcacacactcctaaagtgtcaggttgtcgcctcggaggtcctgaaccatagtctctcagccccttcctgtccatgtaggtgaacacagaggactcaggcttccctggagcccatgggcagactcacaagcccctgaagcctgctctaaagagagggcccagcaacgccacaagcctccaggaaggtaccacgggtgagccatttctcctccactccagacagagcctgagccacattgcagctgagtggggctacccacgtagacagggaggagttggggagcctctcccccctcaccccttgccttctgcaccttacccatacccaccttgcccctctggaccttgggtttggaacacaggcaacatggaatcagcaggcattgccctcagaagcctcttctgtggcagtccacctctggagtcgacgacgtcagaagtgagtagcccagatagtcccctctcctgcctgcccagctccctttctgattctcccggttaaccctacaatgacttccactctgcctgcttcctgctctcctgtcagctctgtccctgcagtgtgcccttcctcctgagctccatcccatccttcacgtcccctctccctataacctcaactcctctctgctttggctctgacaaagttggaaaagtcggaatcctgtgacaaacgcaagctgaagcgggtccgaatctccctggcggtacgtgcccccacccccaccccctgcagctcaggaagcaccaggcagggagggccgtcgggggggggtgggtctaggtgggacaaacctcccagagccgggggtacatccaccttcctctgtcttcctcctagagtgactcagacctggaaggcaagatgagtcccgaggaggtgagatgccattagactctagactttcctcctgggcgtgtcctcatcttggctagctaacaggaaggaccacaaggagggaggctgacaaacccggtggccttcgggggaggtgggagtggacttctgggttccctctccctaactcgaagtctcttctcctcagatcttagagtgggaagagcagcagctagatgagccagtcaacttcagtgactgcaaaatcgaccccgcccccttccagctagtggagcggacttctttgcacaaggtaggccagggtagggatgggatagtcctacctaggtctggactcgagacagtgcggtcggaaggagcaggagatagtacacttggtgcagtttgtaaaacataacgtttccggccatggaactctctgagccaggactccctcaccttgtcctgctccgtggtggagccaggcataatttttcctctgctcaagagttaccccgtggaattctggaccaaagcagcaacaaagacacagcttgaactgggtggaagccagaaggccaggccagggtcagagctaggcaggaggctgccagagcccaacaaggctgatacacacccacgctggaaaaaaagggggcagggccaaaaaacaggccagataagaaaatctaataaacaagtaacaaacagtcaagaagatgaggccactgcagtgaagagataaacaaagatgagggacaccagtaggggcttggaatgtcagaccccagagagtctaacgtcaagcaattcaagggaaaactggtaggaagagagcgcgcggcagagggcaacagggagagagaggaatagatggagacagatggggcgcacacaggaaggggctcctaaagctggggtggctggcaccactgggcacctgaaagctgccgtgtaaaagcagggaatgcaggccgccggccagagccgtttttaacagacataatgtgtaagcctccactggtggggacagacaagagcaacgggtaatagcgtcagtggtcccagggcttcatctcgggtggcgtcagacacaaagtgtgctataaagtcaacataataaatacattacaagcagaggccatgatgggaaggagacaggaaaaacgaaacagctgggcggtggtggccgatgccacccaggagaggcagggagatctgagttcaaggccagccctggtttcgagagtagccagggctacacagagaaaccctatctcaaaaaacaagaaaacaaaatccaaacaaagaaaaaacagcaaaaggaacgtatagggacttttagagacctcagatcaaatgagcaaggaagagcttctgtgctaggagcacagaggaggaggaagaagaggaggaggaggaggaggagggggaagaggagaagaggaggaggaggaggaggaggaggaggaggaagaggagatggacgagaagatacagcaagctgtacttcaagcctggcttcccaagacctcaagttttcccagtcagcagccatctttcttttttagagacaggatgtcatttagcacaagcagcccttgaactgtgacagtttgcctgccttggtctctggagactcaagccacgcaccatcacaccctgctatgagtcccttgtctgtcagtcatacataacgtcatggcgacgtgctttcggcgattgccacgtgccaggcactatgctaaggtcttcatgtaacttaattctcacagccgctctagccgatgggtgatgtcacattctctggctgtcctggaactgattccatattccagtaatgccactttcacagcctataaactttaccataagcaactatcaaagcacaaaagaactcagggatccacctggctctaactctgccaggattaaaggtgtacaccaccgccgcctggtgttacattgcgattattatagaaggctgtaaaataaaattgtataaagtagttaagtaaactgcctaaagtcacacatccagggagtagccaagctgggcctgaagaaagaaagtcatttgcctgcatcagtcttcagagtcaggcccaagacccagctctcctggcgaggctctcagaattctgtcagagggctccgttgtccttccccctgtcagttcagttcccgggcccacaatggctccctggtgtccaattaaattaaaatgaaaaagaacaaagtaggtgtttgttataaacttaaactaccacaggaaggagagaagcctccaaggaacgacttacagaagtacacagaacgggaatgataacataaaagattagaattctacagatcccattctaaaatagaatctattatgaagagagtagtaagcggtaatccgtttcaggttcaggaggggcactttcagaggatgaggacacgaggctctaggaacctcatggtagcaggtagctaaggtgacagcaagactagctgaaccctcatcctctcatgcctgactgtaaagttaacaagtggattagtcagtctgggcttccctatctacaagtcggaatggcataaactgagtatggtgattgtatgcctgcggtcctgacactcaggaggtcaaaggcatccatgatacatatcaagttcaggaccatcctgatctgtgagaccttccctccaaaagcctggggaacctaggcacagcagagtggcaatggcaaggctgggccaccccagggagtgctggggctacttgggttggaaaaagccatagaatggcagagcccagctggagaggcaggaagtaagaaaactcattccattgtctcagtccagaggatagtgaggcagcactgggcagaagtagggcagtgactagtgtggcgaatgccaggcacaagctgtacacagacctataaaagcacattgcctgctaggtcactacgattaagaatgagcaggaaaatggaactgtttaatagctccttcaaagacggtgaggaggattgtgtgacctcaagctaggagatcttacagtaaagatgtcccctcccccccaggggaaagacaaggaaatcaaggctaatttgtagcatgtagggttccttatataacaagagattgctaactacatgacaattacaggcattgaagaaacttgatttcaaaggctgaatttctaggacaggtgtggtagcacacacctaccaacacttaggcgttataaactcaaggtcagcctgggctaagtagaggcttaccactggcactacatacagttcagtgggtagtgtcatatacccagcatatatgacaccctggcttccttccccagagccaccaagactgagactcttgcttaagtatgccaggtcctgaccttcccataaatttagtgtaagaaagtatgcaagacgtaagacacttgggcccacccatcttgaatcacctgttatgccaagaggctcgtaaatgtaccccgaacagtagataaccaattccaggaaatgccaggagctgttttcagacagcaaatggaaactgtagataacgtctaagcctggtgatgtcagtcacatctgagggcttgggaagcgtcatacaagcagcctccagactttgggttctaagctttgggacacgggaacattctcagagctcaaatttccctccagcagtccctcccactgtcacacccccagttttccctggacccctttggcctgtggttgattctgagatgctcccttgaatatcaagcccagtgtttctgctccctgttctgcagacccacaccatcttctcgctgctgggagtggaccatgcttatgtcaccagcattggcagactcattgggattgtcaccctaaaggaggtgaggtgacgtggacaaagccacttaacacttccaaatagcatccgagctgtctggctcccccaggggacatgctggggaacagtctgagtaggggtcacacatctaactcttacctttccagctccggaaggccattgaaggctctgtcacagcacagggtgtaaaagtcaggccaccccttgccagtttccgggacagtgccaccagcagcagtgacacagagaccaccgaggtgcatgcactctgggggccgagatcccgccacggcctcccacgagagggtaccccctctgatagtgatgacaagtgccagtgacccccatactggacggcctgtcttccttctgcaagccagcagtgaccagaagctggaacctgaggccatcctcactgtgggctgccagctcccccattttcaacacctcccagccggaggaccagcaatgctctggcaggaggtggggttctgtggcccctgcctcgtcttttgagaaaagggcagaactaaaatgggtttatactggaacctccaatgacaagatgtatatagaaatttacaaagatttttatattaatttaataaaacaataaatagaataaacacctaattagccactcatgtatagaacacttgtgctattggctcatattttcttcaccttggatcc

SEQ ID NO: 1373 - DNA, 2621 bp, Rattus norvegicus
  ref <308>: DATABASE ACCESSION NUMBER: Refseq / NM_053665
  ref <309>: DATABASE ENTRY DATE: 2003-01-13
atggcaatccagttccgctcactcttccccttggccttgcctggaatgctagcactccttggctggtggtggtttttctctcgtaaaaaagatcggctcagcagcaatggcaagcaggtggggacattgaaggttggccctgccatcgaggaccgactgcccactgaagaggcctgtcctggagtcctgtctgtgacccccagtgtcacacagcctcctggaaaggaagagcagcgctctatggacaggcctctttcagatcccccagccttgccaaggacccgtcaagttcgccgaagatcagagtcctcaggcaacctccccagcattgtagacacaaggttgcaggcaggacagtgcagcgatgagaattcaaaagtggtactctccctgatgggggacgaagccaaatctattcctcttggacgtccgcttttcccaaaggatctgtccttcccctatgaagcagtggaagggtgtaagcaagagtctgccctgggcagaactcctgggagaggctggctaagccagtgtgcagcctctggagagaacgcgagagagacgggtggggcggaagggactggagatgctgtgttgggggaaagtgtacttgaggaaggcctattgccccaggagtgtgtttcagaagtagagaagagtgagtttccgatcctagctcccgggggaggcgggggagagaaggtgagaagtggcccaccacaggtagatgagcttttaaagaaggaagaatatattgttgggaagttgccaagtagctttgtggggccagttcactcggagctggttaaggatgagggtgcgctggtaccccaagtcaaaggtagccaggacagaagcctggctagagaactggacaaagacaagaccttgcctgaaaaggaccagattgagcagactgccttccagatcatctcccaggtgatcttggaagcgactgaagagatacgggccaccacagtgggcaagactgtggcacaagtgcatccaaccccgggcactcagcctcaggggcaggaggagagctgtgtcccagccagccaggaaactagcttgggacaagaaatcccagatcctgcttccaccagaacaggtgccactgccagcccttcagcaggagccccaccaccaaagacctatgtgagctgtctcagcagtcctctgtcaggccccaccaaggaccagaagccaaagaactctgcacaccacatctccctggctccctgcccaccgccagttaccccccagaggcagtctctggatggggcaagtaacccgagaggtgatgacacctttgtcacctgtacgtccaacaacagccagagtgtcctttcagttacctccttggggctgtgctcagaccctgtcagtacttcgaggcttgaagactcttgcacagagaccatctcaagctccggagacaaagctgtcaccccaccactgccagacagtactgagcccttcagcaatggggtgctgaaggaggagttgtcagacttggggaccgaggatggatggaccatggatacagaagcagatcattcaggaggttctgacgggaacagtatggattcagtggatagctgttgtgggcttacgaaacctgatagcccccagactgtccaggcaggctccaaccctaagaaggttgacctcatcatctgggagatcgaggtgccaaagcatttagttggtcgactgattggcaagcagggacggtacgtgagttttctgaagcagacgtctggtgccaagatctacatctccaccctgccttacacacagaacatccagatctgccacatagaaggctctcagcatcatgtggacaaagctctgaacttgattgggaagaagtttaaggagctgaacctcaccaatatctatgcaccaccgctgccttctctggcactgccttccctgccgatgacatcgtggctcatgctgcctgatggtatcactgtggaagtcatcgtggtcaaccaggtcaatgctgggcacctatttgtacagcaacacacacaccccaccttccacgcactgcgcagcctggaccagcagatgtacctctgttactctcagcctggaatccccaccttgcccaccccagtggaaataacggttatctgcgctgcccctggtgcggacggggcctggtggcgagcccaagtagtggcctcctatgaggagaccaatgaggtggagattcgctacgtggactatggtggatataagagggtgaaagtcgacgtgctccggcaaattaggtctgactttgtgaccctgccattccaaggagcagaagtccttctggacagtgtggttccgctgtcagatgatgatcacttttcacccgaggcagacgcagccatgagtgagatgacaggcaatacagcactgctggcccaggtgacaagctacagtgcgactggccttcctctgattcagctatggagtgtggttggagatgaagtggtgttgataaaccggtcgctggtggagcggggcctggcacagtgggtagacagctgctatgccagcctttgaccgtggctcctgggctgcttcggtcttctttgcactgttgagagtgggtctagaac

SEQ ID NO: 1374 - protein, 854 aa, Rattus norvegicus
  ref <308>: DATABASE ACCESSION NUMBER: Refseq / NP_446117
  ref <309>: DATABASE ENTRY DATE: 2003-01-13
MAIQFRSLFPLALPGMLALLGWWWFFSRKKDRLSSNGKQVGTLKVGPAIEDRLPTEEACPGVLSVTPSVTQPPGKEEQRSMDRPLSDPPALPRTRQVRRRSESSGNLPSIVDTRLQAGQCSDENSKVVLSLMGDEAKSIPLGRPLFPKDLSFPYEAVEGCKQESALGRTPGRGWLSQCAASGENARETGGAEGTGDAVLGESVLEEGLLPQECVSEVEKSEFPILAPGGGGGEKVRSGPPQVDELLKKEEYIVGKLPSSFVGPVHSELVKDEGALVPQVKGSQDRSLARELDKDKTLPEKDQIEQTAFQIISQVILEATEEIRATTVGKTVAQVHPTPGTQPQGQEESCVPASQETSLGQEIPDPASTRTGATASPSAGAPPPKTYVSCLSSPLSGPTKDQKPKNSAHHISLAPCPPPVTPQRQSLDGASNPRGDDTFVTCTSNNSQSVLSVTSLGLCSDPVSTSRLEDSCTETISSSGDKAVTPPLPDSTEPFSNGVLKEELSDLGTEDGWTMDTEADHSGGSDGNSMDSVDSCCGLTKPDSPQTVQAGSNPKKVDLIIWEIEVPKHLVGRLIGKQGRYVSFLKQTSGAKIYISTLPYTQNIQICHIEGSQHHVDKALNLIGKKFKELNLTNIYAPPLPSLALPSLPMTSWLMLPDGITVEVIVVNQVNAGHLFVQQHTHPTFHALRSLDQQMYLCYSQPGIPTLPTPVEITVICAAPGADGAWWRAQVVASYEETNEVEIRYVDYGGYKRVKVDVLRQIRSDFVTLPFQGAEVLLDSVVPLSDDDHFSPEADAAMSEMTGNTALLAQVTSYSATGLPLIQLWSVVGDEVVLINRSLVERGLAQWVDSCYASL

SEQ ID NO: 1375 - DNA, 371 bp, Rattus norvegicus
  ref <308>: DATABASE ACCESSION NUMBER: EMBL / AA859663
  ref <309>: DATABASE ENTRY DATE: 2000-03-03
tttttttttttttttttaagagcttagaaaatttatttttttcttgaaatgacacacatgggcagggaggtaggacttggtgtaggttggtggaaaccgtgtcccccagcatcccagttttcctctcagttctttgatgagaggtctcctaaagactgggaggcggagcggagagctcccagttctaagcttggaatctaacttgaagtgcggagggtatggggatgtggtgggagccatgggactttgttctctggtaaaaccaaaaaatcaaaacaacaaaactccgagtcagctcggggatacttaatttgcatattggatgctgggtttcaggaaggatgttgtgtgttggtccttgcctcgtgccg

SEQ ID NO: 1376 - DNA, 448 bp, Rattus norvegicus
  ref <308>: DATABASE ACCESSION NUMBER: EMBL / AA859705
  ref <309>: DATABASE ENTRY DATE: 2000-03-03
tttttttttttttttttaccaacgggagatgcaatttatttacaccagcagccatgggggcagaggggaatacacagcgtttacaaagttagctacctgtacaggatggattacatatgcaaaaataaaaatctcaagaccacaggacagcgtgatgtcctcatagatgctgggcgctgggggagccggtggctttggctttttcttcttgttggagcccaggccagaggcagtccctaccaagctcagatgggatttctttttcttggttttccgtgattcagagctgttggtacctaaaccccatccctgattttcactagtcttggaggagcctgaatcagacggtgagagatcagaagaaccgtcccactgaagccggctgaggagggcctggctgtcagtcatgtcaaagccatcattgtccaaggagctctctacctctgga

SEQ ID NO: 1377 - DNA, 3589 bp, Homo sapiens
  ref <308>: DATABASE ACCESSION NUMBER: Refseq / XM_046017
  ref <309>: DATABASE ENTRY DATE: 2003-01-03
aacaacacccccacccccgtgtgtgcagccgtgttgccgcccgctgtgctatgagcagtcagagcgccgtctccacaagagtttacaaatgaaaatggaggaaatgtctttgtctggcctggataacagcaaactagaggccatcgctcaggagatatacgcggacctggtcgaggattcttgtttgggattctgctttgaggtacaccgggctgtcaagtgtggctacttcttcttggacgacacggaccctgatagcatgaaggattttgagatcgtggaccagccgggcttggacatctttggacaggttttcaaccagtggaagagcaaggagtgtgtttgccccaattgcagtcgcagcattgccgcctcccgctttgctccccatctggagaagtgcctgggaatgggtcggaacagcagccgaatcgccaaccgccggattgccaatagcaacaatatgaataagtctgagagtgaccaagaagataatgatgacatcaatgacaacgactggtcctatggctcggagaagaaagccaagaagagaaagtcagacaagaaccccaattcccctcgaagatccaagtcattaaaacacaaaaatggggaacttagcaattcggatccttttaagtataacaattcaactgggatcagctatgagaccctggggccggaggagcttcgcagcctgctaaccacgcaatgtggggtgatttctgaacacaccaagaagatgtgcacaaggtccctgcgctgcccacagcacacagatgagcagaggcgaaccgtacggatttattttctcgggccctcggctgtccttccagaggtcgagagctccctggataatgacagctttgacatgactgacagccaggccctgatcagccggcttcagtgggacggctcctctgacctctcaccctctgattcaggctcctccaagacgagtgaaaatcagggatggggtctaggtaccaacagctctgagtcacggaaaaccaagaaaaagaaatcccatctgagcctggtagggactgcctccggcctaggttccaacaagaagaagaagccaaagccaccggcacccccgacgcccagcatctatgatgacatcaactgacttgggtgcaagggatagcctttggctgagcagagccctctctcctgacccccacccaggtggcatagcctggcaaatggacggctgctgggggttggggcttgggaagcttggtgggccaggcaggcagaggatccgattatgcgcccctggggggtgtcaaagtcctctgcaatggagcacgactcctcggcgtgcaggactcagacctggacatattatgccttggacataagtttggtggggaggcggttttcctatttattctgtgagttactggatgtccagctaggccaggggcctgacctgggcactgtgccagggcactgcctgccccccaccccaggaactggactaagccctgctgaggggcaatgtggcgacccgggaggctgtgggttggaagctgagcctggagggggcctgcctcggccgccctcagcaatgtgaatgggtccggtgcttggagctgaggggcaaggctgggcatgtcctgtctgtgtgcagaatcttatcaaatgcccccagtcccaggggtaggcaggcacagagtgctgtctgctgaggtgggcgtccagaactgccgccaccttccctgcccctcacaggggcagccctttcccctcagtccccatgggcctccttggcagcaggagctgtccttttgttgggtgccaggaaagggcctccagcctctacagcttcaaggaatgggaaagggagggtaggaagagggagaagtgtcagaattcctccccctgcctctcctccctgacccagggctggtgaggagtggggccccaaggtgagagggaacggtgctgctttatttgaaatgttttcttacctcattccctgccccaggaagggacccagcctcaccctcctggggtggccccgtgttcctcctgcccaccctgccccactgccctaccggggcagcccaggttcccaactgctgcttccacccccttcaccttgactggcttcagttcctctcagcgctcctgcctccaaagcgtgccctgtttcccttccttagcgcttttaagttatttattctgtacttgtggtttggggctctgaggaaaatcctaatcttgtgcctctccccctttgctaggagttgggtgggaagagagggtggcctctgtgccccaggttgtcagtggaggggaaggggtgtcactgcccctctgtgggactgtcatgccagtgtgcccacctgcctggtctacatcctaaagagatgtaccgtcccccctccatgcgggcaccaccactcccaggagccaagctggaggaccgcgacctgggctgggagcagagctgactgacatgggtggaggtgaccctgagccaagttctctggcacttgctggacatgtcccctaccctcttcccaagaggagccatcccacatttgggtagttagtacccaggactggttggactgatcgggttagggaccctagagggttaagggaacaacagagatggggctgcaatgccctgtctggaactccgctctcccgctggggtggttctgattgtggctcatgcctggttgcaaattggtttttaacccacaaattgtgattattttttaaaaagccaaacagattttggcaggagttagaataaatcccggggcctgggcttctctattcttggccctccgtagtctccctccgagaggaggccagagggagaggaggatctcagcaggcctctagccgcttccagatgcagtctggggagtgggctgaaggtgaagggaggaaggctgtgggccactctcccttctgagaggcagctgcagctcaggccctaatacactctttgccctgtggcctctcccttttccccccttctggttggaggagggagaagtgggaagtagcttgggaactggtttgtccacataaacttccccattgttccttggcccgccctcagggcagagccccctgcccaggctgggtaagagatgggcttggtccagcagggaccctgagggaacaaacccttttccttctggggagagagtgccccccctaccatgtagttgaacaggggctaggagctccccactcccctccctctaacagcaggctgtgtgggtttcaattcccatccttcccaccccggctaggtgtcgtccaccctgtatcctgtgtctgagtgtgtgtgggggggttctgtactaatttccatggccggtggcttttccttccatgcatcactcccccccgcatgcccaggggccacccgcctggcattaccgcatgctggggtcattgggggaggggggtggggctcacgctgtcctgtggtcttgagatttttatttttgcatatgtaatccattctgtacaggtagctaactttgtaaacgctgtgtattccctctgcccccatggctgctggtgtaaataaactgcatctcccgttggt

SEQ ID NO: 1378 - protein, 222 aa, Homo sapiens
  ref <308>: DATABASE ACCESSION NUMBER: Refseq / XP_046017
  ref <309>: DATABASE ENTRY DATE: 2003-01-03
MNKSESDQEDNDDINDNDWSYGSEKKAKKRKSDKNPNSPRRSKSLKHKNGELSNSDPFKYNNSTGISYETLGPEELRSLLTTQCGVISEHTKKMCTRSLRCPQHTDEQRRTVRIYFLGPSAVLPEVESSLDNDSFDMTDSQALISRLQWDGSSDLSPSDSGSSKTSENQGWGLGTNSSESRKTKKKKSHLSLVGTASGLGSNKKKKPKPPAPPTPSIYDDIN

SEQ ID NO: 1379 - DNA, 3731 bp, Rattus norvegicus
  ref <308>: DATABASE ACCESSION NUMBER: Refseq / NM_031514
  ref <309>: DATABASE ENTRY DATE: 2001-05-02
atcctgcgcgcctccgggcgctcctgtgtggcccgacccgtgtcgccggttcctgaagcaggcgacgggaacaagatgtgaactgtttttcctccacagaagaagaggcccttctttcccctcccgggaaggccgatgttctgaaaaaggctgtggatgggaatggcttgccttacaatgacagaaatggagggaacctccacatctcctgcacatcagaatggtgatattcctggaaatgctaactctgtgaagcagacagagccagtccttcaagtgtacctgtaccattctcttgggcaagctgaaggagactatctgaagtttccaaatggagagtatgttgccgaagaaatttgtgtggctgcttctaaagcatgtggtattacgcctgtgtatcataatatgtttgctttaatgagtgaaacagaaaggatctggtatccacccaatcatgtcttccacatagatgagtcaaccaggcataatatactctacagaataaggttttactttcctcattggtactgcagtggcagcaacagaacctataggtacggagtatctcgtggggctgaagctcctctccttgacgactttgtcatgtcttacctttttgctcagtggcggcatgattttgttcatgggtggataaaagtacctgtgactcacgaaactcaggaagaatgtcttggcatggcagtgttagacatgatgagaatagctaaggagaaggaccagactcccctggctgtctataactccatcagctacaagacgttcttaccgaagtgcgtgcgagcgaagatccaggactatcacattttaactcggaagcggataaggtacagattccgcaggttcattcagcagttcagtcagtgcaaagccactgccaggaacctaaaacttaagtatctcataaacctggagaccctgcagtctgccttctacacagaacagtttgaagtaaaagaatctgcaagaggtccttcaggtgaggagatttttgcaaccattataataactggaaacggtggaattcagtggtcaagagggaaacataaggaaagtgagacactgacagaacaggatttacagttgtattgtgattttcctgatattattgatgtcagtattaagcaagcaaatcaggaatgctcaactgaaagtagagttgtgaccgtccacaagcaggacgggaaggtcttggaaatagaacttagctcattaaaagaagccttgtcatttgtgtcgttaattgacgggtattacagactaactgcggatgcacaccattacctctgtaaagaggtggctcctccagccgtgcttgaaaacatacacagcaactgtcacggcccaatttcaatggattttgccatcagcaaactaaagaaggcaggaaaccagactggactgtatgtacttcgatgtagccctaaggacttcaacaaatacttcctgacctttgccgttgagcgagaaaatgttattgaatataaacactgtttgattacaaagaatgagaatggagagtacaacctcagtgggactaagaggaacttcagtagtcttaaggaccttttgaattgctaccagatggaaactgtgcgctcagacagtatcatcttccagttcaccaaatgctgtcctccaaagccgaaagataaatcaaaccttcttgtcttcagaacaaatggtgtttctgatgttcagctctcaccaacattacagaggcataataatgtgaatcaaatggtgtttcacaaaatcaggaatgaagatttgatatttaatgaaagccttggccaaggcacttttacaaaaatatttaaaggtgtaagaagagaagttggagattatggtcagctgcacgaaaccgaagttcttttgaaagtcctagataaagcacatagaaactattcagagtctttctttgaagcagcaagcatgatgagtcagctttctcacaagcatttggttttgaattatggagtatgtgtctgtggagaggagaacattttggttcaagagtttgtaaaatttggatccctggatacatacctgaaaaaaaacaaaaattccataaatatactatggaaacttggagtggccaaacagttggcatgggccatgcacttcctcgaagaaaaatcccttattcatgggaatgtgtgtgccaaaaatatcctgcttatcagagaagaagacaggaaaacagggaatccacctttcatcaaacttagtgatcctgggattagcatcacagttctaccaaaggacattcttcaggagagaataccatgggtaccacctgagtgcattgaaaaccctaaaaatctaactttggcaacagacaagtggagctttggcaccactctgtgggagatctgcagtggaggagacaagcctctgagtgctctggactctcaaagaaagctgcagttctatgaagataagcaccagctcccagcacccaagtggacagagttggcaaaccttataaatacttgcatggattatgagccagacttcaggcctgccttcagagctgtcatccgtgatctgaacagcctgtttactccagattatgaactgctgacagaaaatgacatgctacccaacatgagaataggtgccctaggattttctggtgcttttgaagacagggaccctacacagtttgaagagagacacttgaaatttctacagcaacttggcaagggtaactttgggagtgtggagatgtgccgctatgacccgctgcaggacaacactggagaggtggtagctgttaagaagctccagcacagcacggaagagcatctccgagactttgaaagggaaattgaaatcctgaaatccttgcagcatgacaacatcgtgaagtacaagggagtgtgctacagtgctggtcggcgcaacctaagattaattatggaatatttgccgtatggaagtttacgagactatctccaaaaacataaagaacggatagatcacaaaaaacttctgcagtatacatcccagatatgcaagggcatggagtatcttggtacaaaaaggtatatccaccgggatctggcaacaaggaatatattggtagaaaatgagaacagagttaaaataggagattttggattaaccaaagtcttgccacaggacaaagaatactacaaagtaaaggaaccaggtgaaagtcccatattctggtatgctcccgaatccttgacagagagcaagttttctgtggcctcagatgtgtggagctttggtgtggttctgtacgaacttttcacgtatatcgagaagagcaaaagcccacctgtggaatttatgcgaatgatcggcaatgataaacaagggcagatgatcgtattccatttgatagagctactgaagaacaacggaagactgccgagaccagaagggtgcccagacgagatttatgtgatcatgacagaatgctggaacaacaatgtcaaccaacgtccctctttcagggacctttcccttcgggtggatcaaatccgggacagtatggctgcatgaaagaggtgacctttactcagagaccaagtagacttccagaaccagagcaaagctctgtagccacatggccatggactcgtgtccacgggcccttatcatgatgctagccagaaggaaatgtgatgctgtctgctcaagactttggaagcgttgtggatttttatgtaccatctgta

SEQ ID NO: 1380 - protein, 1132 aa, Rattus norvegicus
  ref <308>: DATABASE ACCESSION NUMBER: Refseq / NP_113702
  ref <309>: DATABASE ENTRY DATE: 2001-05-02
MGMACLTMTEMEGTSTSPAHQNGDIPGNANSVKQTEPVLQVYLYHSLGQAEGDYLKFPNGEYVAEEICVAASKACGITPVYHNMFALMSETERIWYPPNHVFHIDESTRHNILYRIRFYFPHWYCSGSNRTYRYGVSRGAEAPLLDDFVMSYLFAQWRHDFVHGWIKVPVTHETQEECLGMAVLDMMRIAKEKDQTPLAVYNSISYKTFLPKCVRAKIQDYHILTRKRIRYRFRRFIQQFSQCKATARNLKLKYLINLETLQSAFYTEQFEVKESARGPSGEEIFATIIITGNGGIQWSRGKHKESETLTEQDLQLYCDFPDIIDVSIKQANQECSTESRVVTVHKQDGKVLEIELSSLKEALSFVSLIDGYYRLTADAHHYLCKEVAPPAVLENIHSNCHGPISMDFAISKLKKAGNQTGLYVLRCSPKDFNKYFLTFAVERENVIEYKHCLITKNENGEYNLSGTKRNFSSLKDLLNCYQMETVRSDSIIFQFTKCCPPKPKDKSNLLVFRTNGVSDVQLSPTLQRHNNVNQMVFHKIRNEDLIFNESLGQGTFTKIFKGVRREVGDYGQLHETEVLLKVLDKAHRNYSESFFEAASMMSQLSHKHLVLNYGVCVCGEENILVQEFVKFGSLDTYLKKNKNSINILWKLGVAKQLAWAMHFLEEKSLIHGNVCAKNILLIREEDRKTGNPPFIKLSDPGISITVLPKDILQERIPWVPPECIENPKNLTLATDKWSFGTTLWEICSGGDKPLSALDSQRKLQFYEDKHQLPAPKWTELANLINTCMDYEPDFRPAFRAVIRDLNSLFTPDYELLTENDMLPNMRIGALGFSGAFEDRDPTQFEERHLKFLQQLGKGNFGSVEMCRYDPLQDNTGEVVAVKKLQHSTEEHLRDFEREIEILKSLQHDNIVKYKGVCYSAGRRNLRLIMEYLPYGSLRDYLQKHKERIDHKKLLQYTSQICKGMEYLGTKRYIHRDLATRNILVENENRVKIGDFGLTKVLPQDKEYYKVKEPGESPIFWYAPESLTESKFSVASDVWSFGVVLYELFTYIEKSKSPPVEFMRMIGNDKQGQMIVFHLIELLKNNGRLPRPEGCPDEIYVIMTECWNNNVNQRPSFRDLSLRVDQIRDSMAA

SEQ ID NO: 1381 - DNA, 5097 bp, Homo sapiens
  ref <308>: DATABASE ACCESSION NUMBER: Refseq / NM_004972
  ref <309>: DATABASE ENTRY DATE: 2001-03-13
ctgcaggaaggagagaggaagaggagcagaagggggcagcagcggacgccgctaacggcctccctcggcgctgacaggctgggccggcgcccggctcgcttgggtgttcgcgtcgccacttcggcttctcggccggtcgggcccctcggcccgggcttgcggcgcgcgtcggggctgagggctgctgcggcgcagggagaggcctggtcctcgctgccgagggatgtgagtgggagctgagcccacactggagggcccccgagggcccagcctggaggtcgttcagagccgtgcccgccccggggcttcgcagaccttgacccgccgggtaggagccgcccctgcgggctcgagggcgcgctctggtcgcccgatctgtgtagccggtttcagaagcaggcaacaggaacaagatgtgaactgtttctcttctgcagaaaaagaggctcttcctcctcctcccgcgacggcaaatgttctgaaaaagactctgcatgggaatggcctgccttacgatgacagaaatggagggaacatccacctcttctatatatcagaatggtgatatttctggaaatgccaattctatgaagcaaatagatccagttcttcaggtgtatctttaccattcccttgggaaatctgaggcagattatctgacctttccatctggggagtatgttgcagaagaaatctgtattgctgcttctaaagcttgtggtatcacacctgtgtatcataatatgtttgctttaatgagtgaaacagaaaggatctggtatccacccaaccatgtcttccatatagatgagtcaaccaggcataatgtactctacagaataagattttactttcctcgttggtattgcagtggcagcaacagagcctatcggcatggaatatctcgaggtgctgaagctcctcttcttgatgactttgtcatgtcttacctctttgctcagtggcggcatgattttgtgcacggatggataaaagtacctgtgactcatgaaacacaggaagaatgtcttgggatggcagtgttagatatgatgagaatagccaaagaaaacgatcaaaccccactggccatctataactctatcagctacaagacattcttaccaaaatgtattcgagcaaagatccaagactatcatattttgacaaggaagcgaataaggtacagatttcgcagatttattcagcaattcagccaatgcaaagccactgccagaaacttgaaacttaagtatcttataaatctggaaactctgcagtctgccttctacacagagaaatttgaagtaaaagaacctggaagtggtccttcaggtgaggagatttttgcaaccattataataactggaaacggtggaattcagtggtcaagagggaaacataaagaaagtgagacactgacagaacaggatttacagttatattgcgattttcctaatattattgatgtcagtattaagcaagcaaaccaagagggttcaaatgaaagccgagttgtaactatccataagcaagatggtaaaaatctggaaattgaacttagctcattaagggaagctttgtctttcgtgtcattaattgatggatattatagattaactgcagatgcacatcattacctctgtaaagaagtagcacctccagccgtgcttgaaaatatacaaagcaactgtcatggcccaatttcgatggattttgccattagtaaactgaagaaagcaggtaatcagactggactgtatgtacttcgatgcagtcctaaggactttaataaatattttttgacttttgctgtcgagcgagaaaatgtcattgaatataaacactgtttgattacaaaaaatgagaatgaagagtacaacctcagtgggacaaagaagaacttcagcagtcttaaagatcttttgaattgttaccagatggaaactgttcgctcagacaatataattttccagtttactaaatgctgtcccccaaagccaaaagataaatcaaaccttctagtcttcagaacgaatggtgtttctgatgtaccaacctcaccaacattacagaggcctactcatatgaaccaaatggtgtttcacaaaatcagaaatgaagatttgatatttaatgaaagccttggccaaggcacttttacaaagatttttaaaggcgtacgaagagaagtaggagactacggtcaactgcatgaaacagaagttcttttaaaagttctggataaagcacacagaaactattcagagtctttctttgaagcagcaagtatgatgagcaagctttctcacaagcatttggttttaaattatggagtatgtgtctgtggagacgagaatattctggttcaggagtttgtaaaatttggatcactagatacatatctgaaaaagaataaaaattgtataaatatattatggaaacttgaagttgctaaacagttggcatgggccatgcattttctagaagaaaacacccttattcatgggaatgtatgtgccaaaaatattctgcttatcagagaagaagacaggaagacaggaaatcctcctttcatcaaacttagtgatcctggcattagtattacagttttgccaaaggacattcttcaggagagaataccatgggtaccacctgaatgcattgaaaatcctaaaaatttaaatttggcaacagacaaatggagttttggtaccactttgtgggaaatctgcagtggaggagataaacctctaagtgctctggattctcaaagaaagctacaattttatgaagataggcatcagcttcctgcaccaaagtgggcagaattagcaaaccttataaataattgtatggattatgaaccagatttcaggccttctttcagagccatcatacgagatcttaacagtttgtttactccagattatgaactattaacagaaaatgacatgttaccaaatatgaggataggtgccctagggttttctggtgcctttgaagaccgggatcctacacagtttgaagagagacatttgaaatttctacagcaacttggcaagggtaattttgggagtgtggagatgtgccggtatgaccctctacaggacaacactggggaggtggtcgctgtaaaaaagcttcagcatagtactgaagagcacctaagagactttgaaagggaaattgaaatcctgaaatccctacagcatgacaacattgtaaagtacaagggagtgtgctacagtgctggtcggcgtaatctaaaattaattatggaatatttaccatatggaagtttacgagactatcttcaaaaacataaagaacggatagatcacataaaacttctgcagtacacatctcagatatgcaagggtatggagtatcttggtacaaaaaggtatatccacagggatctggcaacgagaaatatattggtggagaacgagaacagagttaaaattggagattttgggttaaccaaagtcttgccacaagacaaagaatactataaagtaaaagaacctggtgaaagtcccatattctggtatgctccagaatcactgacagagagcaagttttctgtggcctcagatgtttggagctttggagtggttctgtatgaacttttcacatacattgagaagagtaaaagtccaccagcggaatttatgcgtatgattggcaatgacaaacaaggacagatgatcgtgttccatttgatagaacttttgaagaataatggaagattaccaagaccagatggatgcccagatgagatctatatgatcatgacagaatgctggaacaataatgtaaatcaacgcccctcctttagggatctagctcttcgagtggatcaaataagggataacatggctggatgaaagaaatgaccttcattctgagaccaaagtagatttacagaacaaagttttatatttcacattgctgtggactattattacatatatcattattatataaatcatgatgctagccagcaaagatgtgaaaatatctgctcaaaactttcaaagtttagtaagtttttcttcatgaggccaccagtaaaagacattaatgagaattccttagcaaggattttgtaagaagtttcttaaacattgtctgttaacatcactcttgtctggcaaaagaaaaaaaatagactttttcaactcagctttttgagacctgaaaaaattattatgtaaattttgcaatgttaaagatgcacagaatatgtatgtatagtttttaccacagtggatgtataataccttggcatcttgtgtgatgttttacacacatgagggctggtgttcattaatactgttttctaatttttccatagttaatctataattaattacttcactatacaaacaaattaagatgttcagataattgaataagtacctttgtgtccttgttcatttatatcgctggccagcattataagcaggtgtatacttttagcttgtagttccatgtactgtaaatatttttcacataaagggaacaaatgtctagttttatttgtataggaaatttccctgaccctaaataatacattttgaaatgaaacaagcttacaaagatataatctattttattatggtttcccttgtatctatttgtggtgaatgtgttttttaaatggaactatctccaaatttttctaagactactatgaacagttttcttttaaaattttgagattaagaatgccaggaatattgtcatcctttgagctgctgactgccaataacattcttcgatctctgggatttatgctcatgaactaaatttaagcttaagccataaaatagattagattgttttttaaaaatggatagctcattaagaagtgcagcaggttaagaattttttcctaaagactgtatatttgaggggtttcagaattttgcattgcagtcatagaagagatttatttcctttttagaggggaaatgaggtaaataagtaaaaaagtatgcttgttaattttattcaagaatgccagtagaaaattcataacgtgtatctttaagaaaaatgagcatacatcttaaatcttttcaatta

SEQ ID NO: 1382 - protein, 1132 aa, Homo sapiens
  ref <308>: DATABASE ACCESSION NUMBER: Refseq / NP_004963
  ref <309>: DATABASE ENTRY DATE: 2001-03-13
MGMACLTMTEMEGTSTSSIYQNGDISGNANSMKQIDPVLQVYLYHSLGKSEADYLTFPSGEYVAEEICIAASKACGITPVYHNMFALMSETERIWYPPNHVFHIDESTRHNVLYRIRFYFPRWYCSGSNRAYRHGISRGAEAPLLDDFVMSYLFAQWRHDFVHGWIKVPVTHETQEECLGMAVLDMMRIAKENDQTPLAIYNSISYKTFLPKCIRAKIQDYHILTRKRIRYRFRRFIQQFSQCKATARNLKLKYLINLETLQSAFYTEKFEVKEPGSGPSGEEIFATIIITGNGGIQWSRGKHKESETLTEQDLQLYCDFPNIIDVSIKQANQEGSNESRVVTIHKQDGKNLEIELSSLREALSFVSLIDGYYRLTADAHHYLCKEVAPPAVLENIQSNCHGPISMDFAISKLKKAGNQTGLYVLRCSPKDFNKYFLTFAVERENVIEYKHCLITKNENEEYNLSGTKKNFSSLKDLLNCYQMETVRSDNIIFQFTKCCPPKPKDKSNLLVFRTNGVSDVPTSPTLQRPTHMNQMVFHKIRNEDLIFNESLGQGTFTKIFKGVRREVGDYGQLHETEVLLKVLDKAHRNYSESFFEAASMMSKLSHKHLVLNYGVCVCGDENILVQEFVKFGSLDTYLKKNKNCINILWKLEVAKQLAWAMHFLEENTLIHGNVCAKNILLIREEDRKTGNPPFIKLSDPGISITVLPKDILQERIPWVPPECIENPKNLNLATDKWSFGTTLWEICSGGDKPLSALDSQRKLQFYEDRHQLPAPKWAELANLINNCMDYEPDFRPSFRAIIRDLNSLFTPDYELLTENDMLPNMRIGALGFSGAFEDRDPTQFEERHLKFLQQLGKGNFGSVEMCRYDPLQDNTGEVVAVKKLQHSTEEHLRDFEREIEILKSLQHDNIVKYKGVCYSAGRRNLKLIMEYLPYGSLRDYLQKHKERIDHIKLLQYTSQICKGMEYLGTKRYIHRDLATRNILVENENRVKIGDFGLTKVLPQDKEYYKVKEPGESPIFWYAPESLTESKFSVASDVWSFGVVLYELFTYIEKSKSPPAEFMRMIGNDKQGQMIVFHLIELLKNNGRLPRPDGCPDEIYMIMTECWNNNVNQRPSFRDLALRVDQIRDNMAG

SEQ ID NO: 1383 - DNA, 4238 bp, Rattus norvegicus
  ref <308>: DATABASE ACCESSION NUMBER: Refseq / NM_031809
  ref <309>: DATABASE ENTRY DATE: 2003-01-15
gctggggcattgagaagacaattcctggctagccgctgacatctgaacaggtgtcaggatgttgggctgggtccaaagggtgctgcctcagcctccggggaccccccagaagactgaagagggagcaggaccacagccagaaacagagtcaaagcctgaggcaaatccacaacccgagccagaggttcagccggaaccagagccggaaccggaaccagagccggaaccggaaccagcacctgaagaggctgcaccagaggtccagaccctgccaccagaggaaccagtggaaggagaggatgtggctgaggctggccctagccttcaagagacccaggaagctgaccctcctcagcccacctcccaggcccaggttgctgttgtcaaggtgaacaggcccagctcctggatgttgagctggttctggaagggcatggagaaggtcgtgccacagcctgtctacagcagcagtgggggccagaacctggctgccggagagggaggcccagatcaggatggagcacagaccctggagccctgtggcactggagacccagggtctgaagatggctcagataaaacttccaagactcaagacactgagcccagcctgtggctactcaggtggcttgagctgaatctggagaaggtgctacctcagccccctacgccttcccaggcctggaaagttgaacctgagggtgctgtcttggaaccagatcctccaggaacccctatggaagtggagcccacagagaacccctcccagcctaatcctggacccgtggagcctgaggaggagccagccgcagagccccagcctggctttcaagcctcttccctgccaccacctggggaccctgtcaggctgatcgagtggctcctacacaggctggagatggccctgcctcagcctgtgctccatgggaaggctgcagagcaggagcccagctgccctgggacgtgtgacgtacagaccatcagcatcctccctgtggaacaggcggaacatgatcttgtcctcgaggatgtggactcttgctgggaggacacccagcaggaagatggtgccagcctgcaggagacagagttggctcccatttatgaagacgagagtgaggccatggtggagatgcccagggagctgccacagattcaagagcagcaggaagaggagaatgaagagaaagaagaagaggaagaagagaaggaagagaaggaagagaaggaagaggaggaagagaaggaagaggaggagaagagggaggaagagaagaagaaagagaaggaagaggagaagaaagagaaggaagaagaggagaacggggaggaagaagagaaggaagagaaggaagaaaaggaagaggaggaggggaaggaagagaaggaagagaaggaagagaaggaagaaaaagaagaggaggagaaggaagaaaaagaagaggaggagaaggaagaaaaagaagaggaggaagaggaagaggaggaagaggaggaagaggagcctattgtcctgctggatagctgtttggtggtgcaggctgatgtggaccagtgccagctagaaagggcacagccagagacagcatcgatccaggagttaccagaagaagaagaggagaaggaggaagagaagaaggaggaggaagaggagaaggaggaggaggaagagaaggaagaggaagaggagaaggaggaggagggggaggccacaaactcaacagtaccagccacgaaagagcacccggagctccaggtggaagacacagatgccgaagctggccccctcatcccagaggagacgatcccgccacctgagagaccaccagtgtctcccgccaagtctgacaccctcgcggttcccagcgcagcaacccacaggaagaagctaccttctcaggatgatgaggctgaagaactcaaggccctgtcaccggctgagtccccagtggttgcctggtcagaccccaccaccccacaggaggctgatggcgaggaccgtgcggcctccacagccagccagaacagtgccatcatcaacgaccggctccaggagctggtgaagatgttcaaggagcggacagagaaggtgaaggagaagctcattgaccctgacgtcacctccgatgaggagagccccaagccctccccagccaagaaggccccagactcagccccagcccagaagccggcggaggcagaggcggcagaggaggagcactactgtgacatgctctgctgcaaatttaagcgcaggccctggaagatgtaccagttcccccagagcatcgacccactgaccaacctcatgtacatcctgtggctgttcttcgtggtgctggcctggaactggaactgctggctgattcctgtgcgctgggccttcccgtaccagcgggcagacaacatccacctctggctgctcatggactacttgtgcgacttcatctacctcctggacatcaccgtgttccagatgcgtctccagtttgtcaaaggcggggacatcattacagataagaaggagatgcgtaataattacctgaagtctcaacgatttaagatggacttgctctgccttttgcctttggattttctctacttgaaacttggcgtgaacccccttcttcgcctgccccgctgcctgaagtacatggccttctttgagtttaataaccgtctggaagccatcctcagcaaagcctacgtttacagggttatcaggaccaccgcctacctgctgtatagcttgcatctcaactcctgtctttactactgggcgtcggccttccagggcatcggttccactcactgggtttatgacggcgtggggaacagctacattcgatgctactactgggctgtgaaaactctcatcaccatcggaggactgcccgacccccagacgctctttgagatcgtcttccagctgctgaattattttacaggtgtcttcgctttctctgtgatgattggacagatgagagatgtggtgggggccgccacggcagggcagacgtactaccgcagctgcatggacagcacggtgaagtacatgaacttctacaagatccccaggtctgtgcagaaccgcgtcaagacctggtacgaatacacctggcactcacaaggcatgctggatgagtcagagctgatggttcagcttccggacaagatgcgtctggacctggccattgacgtaaactacaacattgtcagcaaagtggcgctcttccagggctgcgaccggcagatgatcttcgacatgctcaagcgacttcgctcagtcgtctacctacccaatgactatgtgtgcaagaagggggagattggccgagagatgtatattatccaggcggggcaggtgcaggtgctgggcggcccagatggaaaggctgtcctggtgacactcaaagccggatcggtgtttggagagataagcttgctggctgtcgggggcggtaacaggcgcacggccaatgtggtggcccacggcttcaccaatctcttcattctggataagaaggacttgaatgagattttggtgcattaccctgaatctcagaagctgctccggaagaaggccaggcgcatgctcagaaacaacaacaaacccaaggaggagaagagtgtgctcatcctgcccccacgtgcgggcaccccgaagctcttcaatgctgccctggctgcagcaggaaagatgggccccaggggagccaagggcggcaagctcgcccacctgagagccaggctcaaagaactggctgcactggaggcagccgcacgacagcagcagctgctggaacaggccaagagctcgcaagaagccgggggagaggagggctctggagccacagaccaacctgcaccccaggagccgtcagagcccaaggagcccccggagcccccagccccgagttctccaccgccagcctcagcaaagcccgagggaagcacggaggaggccgcagggccgccggagccttcagtgaggatccgtgtgagtccaggccctgatcccggggaacagacactatcggtggagatgctggaagagaagaaggaggaggtggagtgaggtgcattcagcaccctgatcccatccctaggtgcggaccagacctttgaaccacctgcctcaccaagcatcttagcctaaagcgctcttcgtcaccggcttatagaaactctcaaatttcatccaagtagtggtggtgacctctcgagctcctaacatt

SEQ ID NO: 1384 - protein, 1339 aa, Rattus norvegicus
  ref <308>: DATABASE ACCESSION NUMBER: Refseq / NP_113997
  ref <309>: DATABASE ENTRY DATE: 2003-01-15
MLGWVQRVLPQPPGTPQKTEEGAGPQPETESKPEANPQPEPEVQPEPEPEPEPEPEPEPAPEEAAPEVQTLPPEEPVEGEDVAEAGPSLQETQEADPPQPTSQAQVAVVKVNRPSSWMLSWFWKGMEKVVPQPVYSSSGGQNLAAGEGGPDQDGAQTLEPCGTGDPGSEDGSDKTSKTQDTEPSLWLLRWLELNLEKVLPQPPTPSQAWKVEPEGAVLEPDPPGTPMEVEPTENPSQPNPGPVEPEEEPAAEPQPGFQASSLPPPGDPVRLIEWLLHRLEMALPQPVLHGKAAEQEPSCPGTCDVQTISILPVEQAEHDLVLEDVDSCWEDTQQEDGASLQETELAPIYEDESEAMVEMPRELPQIQEQQEEENEEKEEEEEEKEEKEEKEEEEEKEEEEKREEEKKKEKEEEKKEKEEEENGEEEEKEEKEEKEEEEGKEEKEEKEEKEEKEEEEKEEKEEEEKEEKEEEEEEEEEEEEEEPIVLLDSCLVVQADVDQCQLERAQPETASIQELPEEEEEKEEEKKEEEEEKEEEEEKEEEEEKEEEGEATNSTVPATKEHPELQVEDTDAEAGPLIPEETIPPPERPPVSPAKSDTLAVPSAATHRKKLPSQDDEAEELKALSPAESPVVAWSDPTTPQEADGEDRAASTASQNSAIINDRLQELVKMFKERTEKVKEKLIDPDVTSDEESPKPSPAKKAPDSAPAQKPAEAEAAEEEHYCDMLCCKFKRRPWKMYQFPQSIDPLTNLMYILWLFFVVLAWNWNCWLIPVRWAFPYQRADNIHLWLLMDYLCDFIYLLDITVFQMRLQFVKGGDIITDKKEMRNNYLKSQRFKMDLLCLLPLDFLYLKLGVNPLLRLPRCLKYMAFFEFNNRLEAILSKAYVYRVIRTTAYLLYSLHLNSCLYYWASAFQGIGSTHWVYDGVGNSYIRCYYWAVKTLITIGGLPDPQTLFEIVFQLLNYFTGVFAFSVMIGQMRDVVGAATAGQTYYRSCMDSTVKYMNFYKIPRSVQNRVKTWYEYTWHSQGMLDESELMVQLPDKMRLDLAIDVNYNIVSKVALFQGCDRQMIFDMLKRLRSVVYLPNDYVCKKGEIGREMYIIQAGQVQVLGGPDGKAVLVTLKAGSVFGEISLLAVGGGNRRTANVVAHGFTNLFILDKKDLNEILVHYPESQKLLRKKARRMLRNNNKPKEEKSVLILPPRAGTPKLFNAALAAAGKMGPRGAKGGKLAHLRARLKELAALEAAARQQQLLEQAKSSQEAGGEEGSGATDQPAPQEPSEPKEPPEPPAPSSPPPASAKPEGSTEEAAGPPEPSVRIRVSPGPDPGEQTLSVEMLEEKKEEVE

SEQ ID NO: 1385 - DNA, 4382 bp, Homo sapiens
  ref <308>: DATABASE ACCESSION NUMBER: Refseq / NM_001297
  ref <309>: DATABASE ENTRY DATE: 2000-10-31
gaattccgatggcagaagagaatccacctgcaattcctggctggcggttggcatctaagcaggcatcaggatgttgggctgggtccagagggtgctgcctcagcccccagggacccctcggaagaccaagatgcaggaggaagaggaagtggaaccagagccagagatggaggcggaggtggaaccagaaccgaatcctgaggaggccgagacagagtccgagtccatgccccccgaagagtcattcaaggaggaggaagtggctgtggcagacccaagccctcaggagaccaaggaggctgcccttacttccaccatatccctccgggcccagggcgctgagatttctgaaatgaatagtcccagccacagggtactgacctggctcatgaagggtgtagagaaggtgatcccgcagcctgttcacagcatcacggaggacccggctcagatcctggggcatggcagcactggggacacagggtgcacagatgaacccaatgaggcccttgaggcccaagacactaggcctgggctgcggctgcttctgtggctggagcagaatctggaaagagtgcttcctcagccccccaaatcctctgaggtctggagagatgagcctgcagttgctacagcgcctccaggacgcccccaggaaatggggcccaagctgcaggcccgggagaccccctccctgcccacacccatccccctgcagcccaaggaggaacccaaggaggcaccagctccagagccccagcccggctcccaggcccagacctcctccctgccaccaaccagggaccctgccaggctggtggcatgggtcctgcacaggctggagatggccttgccgcagccagtgctacatgggaaaataggggaacaggagcctgactcccctgggatatgtgatgtgcagaccatcagcatccttcctggaggacaagtggagcctgaccttgtcctagaggaggttgaaccgccctgggaggatgcccaccaggatgtcagtaccagcccacagggtacagaggtggttccagcttatgaagaagagaacaaagctgtggagaagatgcccagagagctgtcccggattgaagaggagaaagaagatgaggaggaggaagaggaagaggaggaggaggaggaagaggaggaggtgactgaggtgctgctggatagctgtgtggtgtcgcaggtgggcgtgggccagagtgaagaagacgggacccggccccagagcacttcagatcagaagctgtgggaggaagttggggaggaggccaagaaggaggctgaagagaaggccaaggaggaggccgaggaggtggctgaagaggaggctgaaaaggagccccaggactgggcggagaccaaggaggagcctgaggctgaggccgaggctgccagttcaggagtgcctgccacgaaacagcacccagaagtgcaggtggaagatactgatgctgatagctgccccctcatggcagaagagaatccaccctcaaccgtgttgccgccaccatctcctgccaaatcagacacccttatagtcccaagctcagcctcggggacacacaggaagaagctgccctctgaggatgatgaggctgaagagctcaaggcgttgtcaccagcagagtccccagtggttgcctggtctgaccccaccaccccgaaggacactgatggccaggaccgtgcggcctccacggccagcacaaatagcgccatcatcaacgaccggctccaggagctggtgaagctcttcaaggagcggacagagaaagtgaaggagaaactcattgaccctgacgtcacctctgatgaggagagccccaagccctccccagccaagaaagccccagagccagctccagacacaaagcccgctgaagccgagccagtggaagaggagcactattgcgacatgctctgctgcaagttcaaacaccgcccctggaagaagtaccagtttccccagagcattgacccgctgaccaacctgatgtatgtcctatggctgttcttcgtggtgatggcctggaattggaactgttggctgattcccgtgcgctgggccttcccctaccagaccccggacaacatccaccactggctgctgatggattacctatgcgacctcatctacttcctggacatcaccgtgttccagacacgcctgcagtttgtcagaggcggggacatcattacggacaaaaaggacatgcgaaataactacctgaagtctcgccgcttcaagatggacctgctcagcctcctgcccttggattttctctatttgaaagtcggtgtgaaccccctcctccgcctgccccgctgtttaaagtacatggccttcttcgagtttaacagccgcctggaatccatcctcagcaaagcctacgtgtacagggtcatcaggaccacagcctaccttctctacagcctgcatttgaattcctgtctttattactgggcatcggcctatcagggcctcggctccactcactgggtttacgatggcgtgggaaacagttatattcgctgttactactttgctgtgaagaccctcatcaccatcggggggctgcctgaccccaagacactctttgaaattgtcttccagctgctgaattatttcacgggcgtctttgctttctctgtgatgatcggacagatgagagatgtggtaggggccgccaccgcgggacagacctactaccgcagctgcatggacagcacggtgaagtacatgaatttctacaagatccccaagtccgtgcagaaccgcgtcaagacctggtacgagtacacctggcactcgcaaggcatgctggatgagtcagagctgatggtgcagcttccagacaagatgcggctggacctcgccatcgacgtgaactacaacatcgttagcaaagtcgcactctttcagggctgtgaccggcagatgatctttgacatgctgaagaggcttcgctctgttgtctacctgcccaacgactatgtgtgcaagaagggggagatcggccgtgagatgtacatcatccaggcagggcaagtgcaggtcttgggcggccctgatgggaaatctgtgctggtgacgctgaaagctggatctgtgtttggagaaataagcttgctggctgttgggggcgggaaccggcgcacggccaacgtggtggcgcacgggtttaccaacctcttcatcctggataagaaggacctgaatgagattttggtgcattatcctgagtctcagaagttactccggaagaaagccaggcgcatgctgagaagcaacaataagcccaaggaggagaagagcgtgctgatccttccaccccgggcgggcaccccaaagctcttcaacgctgccctcgctatgacaggaaagatgggtggcaagggggcaaaaggcggcaaacttgctcacctccgggcccggctcaaagaactggccgcgctggaggcggctgcaaagcagcaagagttggtggaacaggccaagagctcgcaagacgtcaagggagaggaaggctccgccgccccagaccagcacacgcacccaaaggaggccgccaccgacccacccgcgccccggacgccccccgagcccccggggtctccaccgagctctccaccgcctgcctcccttgggaggccggagggagaggaggaggggccggccgagcccgaagagcactcggtgaggatctgcatgagcccgggcccggagccgggagagcagatcctgtcggtgaagatgccggaggaaagggaggagaaggcggagtaaggtggggtgaggcggatcccgcgcgcagttccagcaggtgtgtccccagcgcccgctgcgcccctcgccccagcgccccaccttcccccacggctcaagagaagatgcttttccgtagtcgtgacctcagtggctgcagctctgaccgtcccgccagcacgccagccccgactcagctcctcgcggggctgggcctgagctcgacaagttgcatcaagtgttcgagtccctgagctctcactatcatttgagagccctaccttttcctgactgttcctctttttaagaacaaaatgattttccacttttaaagttcatgggtgagggataaaatgaggctccaatacatgggaagctttgctgaaaaagtaaagtgttattgaatgtgtggggtttcccctcaggaatttgtctaacacatttcaaggatagaaaatacttcactgccgggcatggtggctcatgcctataatcccagtgctttgggaagccgaagcaggaggatcactggaggccaagagttggagagcagactgggcaacatagcgagacctcatctcaaaccggaattcgg

SEQ ID NO: 1386 - protein, 1245 aa, Homo sapiens
  ref <308>: DATABASE ACCESSION NUMBER: Refseq / NP_001288
  ref <309>: DATABASE ENTRY DATE: 2000-10-31
MLGWVQRVLPQPPGTPRKTKMQEEEEVEPEPEMEAEVEPEPNPEEAETESESMPPEESFKEEEVAVADPSPQETKEAALTSTISLRAQGAEISEMNSPSHRVLTWLMKGVEKVIPQPVHSITEDPAQILGHGSTGDTGCTDEPNEALEAQDTRPGLRLLLWLEQNLERVLPQPPKSSEVWRDEPAVATAPPGRPQEMGPKLQARETPSLPTPIPLQPKEEPKEAPAPEPQPGSQAQTSSLPPTRDPARLVAWVLHRLEMALPQPVLHGKIGEQEPDSPGICDVQTISILPGGQVEPDLVLEEVEPPWEDAHQDVSTSPQGTEVVPAYEEENKAVEKMPRELSRIEEEKEDEEEEEEEEEEEEEEEVTEVLLDSCVVSQVGVGQSEEDGTRPQSTSDQKLWEEVGEEAKKEAEEKAKEEAEEVAEEEAEKEPQDWAETKEEPEAEAEAASSGVPATKQHPEVQVEDTDADSCPLMAEENPPSTVLPPPSPAKSDTLIVPSSASGTHRKKLPSEDDEAEELKALSPAESPVVAWSDPTTPKDTDGQDRAASTASTNSAIINDRLQELVKLFKERTEKVKEKLIDPDVTSDEESPKPSPAKKAPEPAPDTKPAEAEPVEEEHYCDMLCCKFKHRPWKKYQFPQSIDPLTNLMYVLWLFFVVMAWNWNCWLIPVRWAFPYQTPDNIHHWLLMDYLCDLIYFLDITVFQTRLQFVRGGDIITDKKDMRNNYLKSRRFKMDLLSLLPLDFLYLKVGVNPLLRLPRCLKYMAFFEFNSRLESILSKAYVYRVIRTTAYLLYSLHLNSCLYYWASAYQGLGSTHWVYDGVGNSYIRCYYFAVKTLITIGGLPDPKTLFEIVFQLLNYFTGVFAFSVMIGQMRDVVGAATAGQTYYRSCMDSTVKYMNFYKIPKSVQNRVKTWYEYTWHSQGMLDESELMVQLPDKMRLDLAIDVNYNIVSKVALFQGCDRQMIFDMLKRLRSVVYLPNDYVCKKGEIGREMYIIQAGQVQVLGGPDGKSVLVTLKAGSVFGEISLLAVGGGNRRTANVVAHGFTNLFILDKKDLNEILVHYPESQKLLRKKARRMLRSNNKPKEEKSVLILPPRAGTPKLFNAALAMTGKMGGKGAKGGKLAHLRARLKELAALEAAAKQQELVEQAKSSQDVKGEEGSAAPDQHTHPKEAATDPPAPRTPPEPPGSPPSSPPPASLGRPEGEEEGPAEPEEHSVRICMSPGPEPGEQILSVKMPEEREEKAE

SEQ ID NO: 1387 - DNA, 2540 bp, Rattus norvegicus
  ref <308>: DATABASE ACCESSION NUMBER: EMBL / E04239
  ref <309>: DATABASE ENTRY DATE: 2000-09-02
ccgcggcccactacagcagtcgcccgccgtcagcctcccgcgctcgtctctcgtcactgctgctcggcgtccattgctgcctctccccgcagtcgccgacgtcgcttccccgcgcgctcccacaaccgccgccccgccggtcagtgaagccggtgagccattccccgcgccggcccccagaggcgggcatccagccggaccccgagtgtggccctctcctgctgtggccgtccgcgccttctcgaccgcttatccagcatgaaaaccaagttctgcaccgggggcgaggccgagccgtccccgcttgggctgctgctgagctgcggtggcagcgctgccccgacgcccggcgtagggcagcagcgcgatgccgcaggcgagctggagtccaagcagcttggtggccggtcccaacctctcgcgctgccgccgccaccaccgccgcccctgccgctgcccccgccgccatcaccgccgctagcggacgaacaacccgcgccccggacgcggcgcagggcctacctgtggtgcaaggaattcctgcccggagcctggaggggccttcgcgaggaccagttccacatcagtgtcatcaggggtggtctcagaaacatgctgttccagtgttccttgccagactccatagccagtgttggtgatgaacctcggaaagtgctcttgcgactgtatggggcaatcttaaagatgggggctgaagcaatggttctggagagtgttatgtttgccattcttgcagagaggtcacttgggccaaaactctatggcatctttccgcaaggccgactggagcagtttatcccgagccggcgattggacactgaagaattatgtttaccagatatttctgcagaaatagctgaaaaaatggccacatttcatggtatgaaaatgccattcaataaggaaccaaaatggctttttggaacaatggaaaaatacctgaatcaagtactaagacttaaattcagcagggaggccagagttcaacaactgcacaagttcctctcttacaatctgcctctcgagcttgagaacctgaggtcattgctgcagtatactagatccccagttgtgttttgtcataatgactgtcaagaaggtaatatcttattgttggaaggccaagagaattctgaaaagcagaagttgatgctcattgactttgaatacagcagttacaattacaggggatttgacattggaaatcatttctgtgaatggatgtatgattatacctatgaaaagtatcctttcttcagagcaaacattcagaagtatcctacccgaaaacaacagctccattttatttcaagttacttgactacattccaaaatgattttgaaagcctcagcagtgaagagcagtctgctacaaaagaagacatgttgcttgaagtcaacagatttgcccttgcctctcatttcctctggggactttggtccattgtacaggccaagatctcatccattgaatttgggtacatggaatatgcccaagccaggttcgatgcctactttgaccagaagaggaagcttggtgtgtgaatggatggctccactcttcaccactggactgcaggaggtggctgcaccaggccctcagtggagcgctgctgtgaccactgccctgggcagaaggcctggacgtctcactactgagcaccgatgtgtatgatactacagactatattaaagtggagtaacatttctttcatctttgtttacactctcactaggactctgaaccatgattggaagcagaaatatagtgtgatagtgcaatagctcagaccccgcctaagcgggaggcctttcagctacatggctacagcttcagccacttaggccccagccagacagagcagtgctgtgtgggtactgagtgctgacttaggatattaatgtgctgcaacacgttcatgaccaggctttgaaggtgacagtctgacaatgtgttggagacactctgaagggcaagtgaacagacatactgtgaaatggctcgacaggaggagcctgaattgtggggtctgtggaggcagccagctgtttctgtacagggtacacttgactatgggtatgcatctgcaggcagtagctgcagccctcctgtgcctgtgtacacatgactacaggggccagtgtcactgactggccataactgcagtgtctcctaactgggtgtgctttatgcttcagcttcccggggaggagcagtggagccagcttcctcaccccttcttgccttctctctgcctgacctggaacttgggctttcgcccattgccctctgaagctgcttcccatctgatgtcactgggagacagcagctgtatgtgtggggtattggggtgcaggtagattagagctgtgaaatccatgtacattaatacccaatgggataaacctagaatttttttttttttactctgaactctgaattgttttgtgcacatatttctgctaccaccgaaactgtattatacagataaataaacaacttgaaacttaaaaaaaaa

SEQ ID NO: 1388 - DNA, 3224 bp, Rattus norvegicus
  ref <308>: DATABASE ACCESSION NUMBER: EMBL / E13890
  ref <309>: DATABASE ENTRY DATE: 2000-09-02
gtttcgcgcaggaagcaggctccattttagcgccgcccgccgtcgccatctgtttctctctcctcccccttgtctctggtgtggccgaatccccaacagaaagattgaagcccgcgctgtccgaggtcaggcgggaagagaaccagaggacgggaggaagggtgctcgtaggagctgagtggagcaggtcaggtcgaagcgcgcggcccgccggacggactgacggacggactcgtgcgcctgcggccgcggctgcggcgcgccgcgcgactcgcttcccggcggcggtggcggcggcggaagccggagggcagccatggcggccgacagccgggaggagaaagatggggaacttaatgttttagatgatattttgactgaagtaccagaacaggatgatgaactgtataatccagagagtgaacaagataaaaatgagaaaaaaggatcaaaaagaaaaagtgaaagaatggaatctattgacaccaagcgacagaagccttctatccattcaagacaactgatttctaagccactaagctcatctgttagcaataataaaagaatagttagtacaaaaggaaagtcggttacagaatataaaaatgaggaatatcaaagatctgaaaggaacaagcgtctagatgctgatcgaaaaattcgtctgtcaagcagttcctctagagaaccttacaagagtcaaccagaaaaaccttgtctacggaaaagggattctgaaagaagggccaagtctcctacaccagatggttctgagagaattgggcttgaagttgatagacgtgcaagcagatccagccagtcttcaaaggaagaggggaactctgaggagtatggctctgaccacgagacaggaagcagtgcttcttctgaacagggcaacaacactgagaatgaggaggaaggaggggaagaagatgtagaggaagatgaagaggtagatgaagatggagatgatgatgaggaagtggatgaagatgcggaggaggaggaggacgaggaagaagatgaggaggaggaggatgaggaagaagaagaggaagaggaagaagaatatgaacaggatgagagagatcagaaggaagaagggaatgattatgacacccgtagtgaggccagtgattctggttctgagtctgtttccttcacagatggatctgtcaggtctggttcaggaacagatggatcagatgagaaaaagaaggaaaggaagagagctcgaggcatatcacccattgtctttgatagaagtggcagttctgcatcagagtcatatgcagatcaaaccagtaaactcaaatatgtccttcaggatgcaagatttttcctcataaagagtaacaaccatgagaatgtgtctcttgccaaagcaaagggtgtatggtccacattacctgtaaatgagaagaaattaaatcttgcgtttagatctgcaaggagtgttatattaatattttctgtcagggaaagtggaaagtttcaaggttttgccagattgtcatcagaatcgcatcatggtggctctcctatacattgggtgcttccagcaggaatgagtgctaaaatgcttggaggtgtttttaaaattgactggatttgcaggcgtgaattaccctttactaagtcagctcatctcaccaatccctggaatgaacataagccagtaaagattggacgtgatggacaggaaattgaacttgaatgtggaacccagctttgtcttctgtttccccctgatgaaagtattgacttgtatcagctcattcataaaatgcgtcacaagagaagaatgcattctcagcctcgatcaagaggacgtccatcccgtcgagaaccagtccgggatgtgggaaggcgtcgaccagaagattatgatattcataacagcagaaagaaaccaaggattgactatccccctgagtttcaccagagaccagggtatttaaaggatccccgataccaggaagttgacagacgattttcaggagttcgccgagatgtgtttttaaatgggtcctacaatgattatgtgagggaatttcataacatgggaccaccgcctccttggcaaggaatgcctccttacccgggaatagaacagcctccacaccatccctactaccagcaccatgccccgcctcctcaagcccaccccccttactcaggacaccatccggtaccacatgaagcaagatacagagataaacgagtacatgactatgatatgagggttgatgatttccttcgccgcacacaagccgttgtcagtggtcggagaagtagaccccgagaaagagatcgggagcgagagcgagaccgccctagagataacagaagagatagagagcgagacagaggtcgtgatcgagaaagagagagagaaagaatatgtgatcgggacagagaccgaggggaaagaggtcgttatcgaagataatgtgctttttggaagcactgactgaagataaaaaatattgtattttttttgtgtgtgtttacaagtagtaaatttattttcagctgtctacttaaagctcattgtgtagaaggatttattatcttctttgttccaagcatgcagtagaataagaactggaaaactcagatccgccaaaaaatgcacagttgacagttgagttgacacttttattggggcagaatggaacagtccaagaatgtagatattgattcattctccataaatgttctttttacagtgtattcatcctagagttattttgtttgtttgttttccttcttttggaccttggtcaatactgccatagtattttgctttgtgtttctataggtagctgcacacggttcagtaaaaataatgctgctatcaagtatgcagatattgagtatgatggtttgactatatggcagtgttgtagcagcctctcggtttctcctcttccctccttttttttaaacctataaatccactttttttttaagtcttcaatgatgagagcaatattaagaagacattgctatctaatttttaatctttttaaataaaacgttcctatgttcagtagcatggtcgatgctattgtttagccttccttccaaactgtacattggcttggaatgttcagttttgcgtgtgtggcagcagaagataaccccacattctacattgctactgttttgtatgaaataaattggtaaagattgacactaaaaaaaaaaaaaaaaaa

SEQ ID NO: 1389 - DNA, 640 bp, Rattus norvegicus
  ref <308>: DATABASE ACCESSION NUMBER: EMBL / L35558
  ref <309>: DATABASE ENTRY DATE: 2000-06-03
gaggcgtgttttcagcagtacaaaaccaagcgtgaagaagtgaagcctgccagtgatcctggggggaaccagacagaggtgtctgtcaccacggccatgacaacaatgtctgagaacaagacaaaggaatacaaaatcgtttgcctgtactcagacggcatcaacgtcctgggcctgattatcttcttcctcgtctttggacttgtcattggaaaaatgggagaaaagggacagattctggtggatttcttcaatgcgttgagtgacgccaccatgaaaatcgttcagatcatcatgtgttacatgccgatcggtattttgttcctaatcgctgggaagatcatagaagttgaagactgggaaatattccgcaagttgggcctttatatggccactgtcctgagtgggcttgcaatccactccctcgtagtgctgccactgatctatttcatagtcgttacgaagaaccctttccgctttgccttgggcatggcgcaggctctcctgacagctctcatgatctcatctagctcggcaacccttccagttacattccgctgtgcggaagaaaagaaccacgtggacaagaggatcacaagatttgtgctgcccgtcggcgccaccatcaacatggacggca

SEQ ID NO: 1390 - DNA, 2108 bp, Rattus norvegicus
  ref <308>: DATABASE ACCESSION NUMBER: Refseq / NM_016991
  ref <309>: DATABASE ENTRY DATE: 2002-11-05
gggcggactttaaaatgaatcccgatctggacaccggccacaacacatcagcacctgcccactggggagagttgaaagatgacaacttcactggccccaaccagacctcgagcaactccacactgccccagctggacgtcaccagggccatctctgtgggcctggtgctgggcgccttcatcctctttgccatcgtgggcaacatcttggtcatcctgtcggtggcctgcaaccggcacctgcggacgcccaccaactactttatcgtcaacctggccattgctgacctgctgttgagtttcacagtactgcccttctccgctaccctagaagtgcttggctactgggtgctgttgagtttcttctgtgacatctgggcagcggtagatgtcctgtgctgtacggcctccatcctgagcctatgtgccatctccattgaccgctacattggggtgcgatactctctgcagtaccccacgctggtcacccgcaggaaggccatcttggcgctcctcagtgtgtgggtcttgtccacggtcatctccatcgggcctctccttggatggaaagaacctgcgcccaatgatgacaaagaatgtggggtcaccgaagaacccttctacgccctcttttcctccctgggctccttctacatcccgctcgcggtcatcctggtcatgtactgccgggtctacatcgtggccaagaggaccaccaagaatctggaggcgggagtcatgaaggaaatgtccaactccaaggagctgaccctgaggatccactccaagaactttcatgaggacaccctcagcagtaccaaggccaagggccacaaccccaggagttccatagctgtcaaactttttaagttctccagggaaaagaaagcagccaaaaccttgggcattgtagtcggaatgttcatcttatgttggctccccttcttcatcgctctcccgcttggctccctgttctccaccctaaagcccccggacgccgtgttcaaggtggtgttctggctgggctacttcaacagctgcctcaatcccatcatctacccgtgctccagcaaggagttcaagcgcgccttcatgcgtatccttgggtgccagtgccgcggtggccgccgccgccgccgccgtcgccgtctaggcgcgtgcgcttacacctaccggccgtggacccgcggcggctcgctggagagatcacagtcgcggaaggactctctggatgacagcggcagctgcatgagcggcacgcagaggaccctgccctcggcgtcgcccagcccgggctacctgggtcgaggaacgcagccacccgtggagctgtgcgccttccccgagtggaaacccggggcgctgctcagcttgccagagcctcctggccgccgcggccgtctcgactctgggccactcttcaccttcaagctcctgggcgatcctgagagcccgggaaccgaaggcgacaccagcaacgggggctgcgacaccacgaccgacctggccaacgggcagcccggcttcaagagcaacatgcccctggcgcccgggcacttttagggtcccttttcatcctccccctcaacacactcacacatcggggtgggggagaacaccatcgtaggggcgggagggcgcgtggggggagtgtcagccctaggtagacacagggtcgcaaggggacaaggggggaggggggcggggagaggggcagctgcttttctggcaggggcatgggtgccaggtacagcgaagagctgggctgagcatgctgagagcgtggggggcccccctagtggttccgggacttaagtctctctctcttctctctctgtatatacataaaatgagttcctctattcgtatttatctgtgggtacacgtgcgtgtgtctgttcggtgtacgtgtgggctgcatgggtgtgagtgtgaggcctgcccgcacgcgcgtgccggggcagagcgagtgcgccccctggtgacgtccaggtgtgttgtttgtctcttgactttgtacctctcaagcccctccctgttctctagtcaatgctggcactttgataggatcggaaaacaagtcagatattaaagatcatttctcctgtg

SEQ ID NO: 1391 - protein, 515 aa, Rattus norvegicus
  ref <308>: DATABASE ACCESSION NUMBER: Refseq / NP_058687
  ref <309>: DATABASE ENTRY DATE: 2002-11-05
MNPDLDTGHNTSAPAHWGELKDDNFTGPNQTSSNSTLPQLDVTRAISVGLVLGAFILFAIVGNILVILSVACNRHLRTPTNYFIVNLAIADLLLSFTVLPFSATLEVLGYWVLLSFFCDIWAAVDVLCCTASILSLCAISIDRYIGVRYSLQYPTLVTRRKAILALLSVWVLSTVISIGPLLGWKEPAPNDDKECGVTEEPFYALFSSLGSFYIPLAVILVMYCRVYIVAKRTTKNLEAGVMKEMSNSKELTLRIHSKNFHEDTLSSTKAKGHNPRSSIAVKLFKFSREKKAAKTLGIVVGMFILCWLPFFIALPLGSLFSTLKPPDAVFKVVFWLGYFNSCLNPIIYPCSSKEFKRAFMRILGCQCRGGRRRRRRRRLGACAYTYRPWTRGGSLERSQSRKDSLDDSGSCMSGTQRTLPSASPSPGYLGRGTQPPVELCAFPEWKPGALLSLPEPPGRRGRLDSGPLFTFKLLGDPESPGTEGDTSNGGCDTTTDLANGQPGFKSNMPLAPGHF

SEQ ID NO: 1392 - DNA, 553 bp, Rattus norvegicus
  ref <308>: DATABASE ACCESSION NUMBER: EMBL / AA799741
  ref <309>: DATABASE ENTRY DATE: 2000-03-03
cagagttggggtccttcttctttctccgtgtccccactttctctttgccttgttctggccgttgtgtcagccactccttctgaagctgcttcagcatgtctgcagtgaggagtccttgctgcaccagcctagaggcaaggggcagctccttgtcactggggctgggtggctctgccgccttattccctgttttagtgccacgtgtccttctagctgggctcttggaggctcctggcaaacgtgactggctccctgatggctccagattcaagagcttgtgtgactcagagattttaatcagtttggtgatattgtgcacaccttcttggataatgacatccagttctttctggagactccgaacaaagctggagtctggaaacatatcaataaatcggtagcttagccacaggtaaagatcaaagacatcatggacagcttcaagatccatgaggtctttaatgttcttaggtggaagcagaggccacttgatgtaccggcgtagccaggcaaaggtcaggggctcattcctgctgtactgcctggcaaactg

SEQ ID NO: 1393 - DNA, 2361 bp, Homo sapiens
  ref <308>: DATABASE ACCESSION NUMBER: Refseq / NM_003171
  ref <309>: DATABASE ENTRY DATE: 2001-12-19
atgtccttctcccgtgccctattgtgggctcggctcccggcggggcgccaggctggccaccgggcagccatctgctctgcccttcgtccccactttgggccctttcccggggttctggggcaagtttctgtccttgccaccgcctcctcctctgcctccggtggctccaaaataccaaacacgtccttgttcgtgcccctgactgtgaaacctcagggccccagcgccgacggcgacgtcggggccgagctaacccggcctctggacaagaatgaagtaaagaaggtcttagacaaattttacaagaggaaagaaattcagaaactgggtgctgattatggacttgatgctcgtctcttccaccaagctttcataagctttagaaattatattatgcagtctcattccctggatgtggacattcacattgttttgaatgatatttgcttcggtgcagctcatgcggatgatttattcccatttttcttgagacatgccaaacaaatatttcctgtgttggactgtaaggatgatctacgtaaaatcagcgacttaagaataccacctaactggtacccagatgctagagccatgcagcggaagataatatttcattcaggccccacaaacagtggaaagacttatcacgcaatccagaaatacttctcagcaaagtctggagtgtattgtggccctctaacatcactggcacatgagatcttcgaaaagagtaatgctgctggcgtgccatgtgacttggagacaggtgaagagcgtgtgacagttcagccaaatgggaaacaggcttcacatgtttcttgtacagttgagatgtgcagtgttacaactccttatgaagtggctgtaattgatgaaattcaaatgattagagatccagccagaggatgggcctggaccagagcacttctaggactgtgtgctgaagaggttcatttgtgtggagaacctgctgctattgacctggtgatggagcttatgtacacaacgggggaggaagtggaggttcgagactataagaggcttacccccatttctgtgctggaccatgcactagaatctttagataaccttcggcctggggactgcattgtctgttttagcaagaatgatatttattctgtgagtcggcagattgaaattcggggattagaatcagctgttatatatggcagtctcccacctgggaccaaacttgctcaagcaaaaaagtttaatgatcccaatgacccatgcaaaatcttggttgctacagatgcaattggcatgggacttaatttgagcataaggagaattattttttactcccttataaagcccagtatcaatgaaaagggagagagagaactagaaccaatcacaacctctcaagccctgcagattgctggcagagctggcagattcagctcacggtttaaagaaggagaggttacaacaatgaatcatgaagatctcagtttattaaaggaaattttgaagaggcctgtggatcctataagggcagctggtcttcatccaactgctgagcagattgaaatgtttgcctaccatctccctgatgcaacactgtccaatctcattgatatttttgtagacttttcacaagttgatgggcagtattttgtctgcaatatggatgattttaaattttctgcagagttgatccagcatattccactaagtctgcgagtgaggtatgttttctgcacagctcctatcaacaagaagcagccttttgtgtgttcttcactgttacagtttgccaggcagtatagcaggaatgagcccctgacctttgcatggttacgccgatacatcaaatggcctttacttccacctaagaatattaaagacctcatggatcttgaagctgtccacgatgtcttggatctttacttgtggctaagctaccgatttatggatatgtttccagatgccagccttattcgagatctccagaaagaactagatggtattatccaagatggtgtgcacaatatcactaaattgattaaaatgtctgagacgcataagctgttgaatttggagggctttccatcagggagccagtcacgattgtcaggaaccttaaagagccaagctagaaggacacgcggcaccaaagctctagggagtaaagctactgagccacccagccccgatgcaggagagctgtcccttgcttccagattggtgcagcaaggactcctcactccagacatgctgaaacagctagaaaaagagtggatgacacaacaaactgaacacaacaaagaaaaaacagagtctgggactcatccaaaagggacgagaagaaagaagaaggaacctgattcggactag

SEQ ID NO: 1394 - protein, 786 aa, Homo sapiens
  ref <308>: DATABASE ACCESSION NUMBER: Refseq / NP_003162
  ref <309>: DATABASE ENTRY DATE: 2001-12-19
MSFSRALLWARLPAGRQAGHRAAICSALRPHFGPFPGVLGQVSVLATASSSASGGSKIPNTSLFVPLTVKPQGPSADGDVGAELTRPLDKNEVKKVLDKFYKRKEIQKLGADYGLDARLFHQAFISFRNYIMQSHSLDVDIHIVLNDICFGAAHADDLFPFFLRHAKQIFPVLDCKDDLRKISDLRIPPNWYPDARAMQRKIIFHSGPTNSGKTYHAIQKYFSAKSGVYCGPLTSLAHEIFEKSNAAGVPCDLETGEERVTVQPNGKQASHVSCTVEMCSVTTPYEVAVIDEIQMIRDPARGWAWTRALLGLCAEEVHLCGEPAAIDLVMELMYTTGEEVEVRDYKRLTPISVLDHALESLDNLRPGDCIVCFSKNDIYSVSRQIEIRGLESAVIYGSLPPGTKLAQAKKFNDPNDPCKILVATDAIGMGLNLSIRRIIFYSLIKPSINEKGERELEPITTSQALQIAGRAGRFSSRFKEGEVTTMNHEDLSLLKEILKRPVDPIRAAGLHPTAEQIEMFAYHLPDATLSNLIDIFVDFSQVDGQYFVCNMDDFKFSAELIQHIPLSLRVRYVFCTAPINKKQPFVCSSLLQFARQYSRNEPLTFAWLRRYIKWPLLPPKNIKDLMDLEAVHDVLDLYLWLSYRFMDMFPDASLIRDLQKELDGIIQDGVHNITKLIKMSETHKLLNLEGFPSGSQSRLSGTLKSQARRTRGTKALGSKATEPPSPDAGELSLASRLVQQGLLTPDMLKQLEKEWMTQQTEHNKEKTESGTHPKGTRRKKKEPDSD

SEQ ID NO: 1395 - DNA, 1420 bp, Rattus norvegicus
  ref <308>: DATABASE ACCESSION NUMBER: Refseq / NM_053995
  ref <309>: DATABASE ENTRY DATE: 2003-01-13
ccctcaatagccacactatttattttatttcaattaaaaatttcttcccaaacctttcctgcacctccctcacccaaaactataaactcggtgccatgatgctggccgcccgtctttccagacccctgtcacagctcccaggaaaagctctaagtgtctgtgatagagaaaatgggacaagacacacactgttgttttacccagcttctttcagccctgacacccgtcggacctacaccagccaggcagatgcggctagtggcaaagctgtcctggttacaggctgtgactctggatttgggttctctttggccaagcatctacactcaaaaggtttccttgtatttgccggatgtttgttgaaggaacaaggcgatgctggggtcagggagctggacagcctgaagagtgaccggctgagaaccatccagctcaatgtctgcaacagtgaggaggtggagaaagcggtggagaccgtccgctccggcctgaaggatcctgagaagggaatgtggggcctggttaacaacgcaggcatctcaacgtttggggaggtggagttcactagcatggagacgtataaggaggtggccgaagtgaacctctggggaactgtgcgcacaacaaaatccttccttccccttctccgaagagccaaaggccgtgttgttaacatcagcagcatgctgggtcgcatggccaacccagcccgctcaccatactgcatcaccaagtttggggtagaggctttctcggactgcctacgctatgagatgcaccctctgggtgtgaaggtcagtgtggtggagcctggcaacttcatagctgccaccagcctctatagccctgagcgtatccaggccattgccaagaagatgtgggatgagctgccagaggtcgtccgcaaagactatggcaagaagtacttcgatgaaaagattgccaagatggagacctactgcaacagcggttccaccgatacgtcctccgtcatcaacgctgtcacccatgccctgactgctgccaccccttatacccgctaccatcccatggactactactggtggctgcggatgcaggtcatgacccattttcctggagccatctctgacaagatctacatacactgaagagctgaagaggtccctgcagcctctgccagggagcctgatgggagggagttcatacagttatcttttgattaaccattgtgggttgtccactgtcttaggaagacctattttaaccttacgtgttcaatgtggtgaatggtttgggccttcacaaatacagggcactggtgggtggccctaaccctcaaggccaatatggtgcttctatctgtctatctagagttgattttatataaagatttgtgggaaatacctttatattaaagacgttattagaatagaaaaaa

SEQ ID NO: 1396 - protein, 344 aa, Rattus norvegicus
  ref <308>: DATABASE ACCESSION NUMBER: Refseq / NP_446447
  ref <309>: DATABASE ENTRY DATE: 2003-01-13
MMLAARLSRPLSQLPGKALSVCDRENGTRHTLLFYPASFSPDTRRTYTSQADAASGKAVLVTGCDSGFGFSLAKHLHSKGFLVFAGCLLKEQGDAGVRELDSLKSDRLRTIQLNVCNSEEVEKAVETVRSGLKDPEKGMWGLVNNAGISTFGEVEFTSMETYKEVAEVNLWGTVRTTKSFLPLLRRAKGRVVNISSMLGRMANPARSPYCITKFGVEAFSDCLRYEMHPLGVKVSVVEPGNFIAATSLYSPERIQAIAKKMWDELPEVVRKDYGKKYFDEKIAKMETYCNSGSTDTSSVINAVTHALTAATPYTRYHPMDYYWWLRMQVMTHFPGAISDKIYIH

SEQ ID NO: 1397 - DNA, 1594 bp, Homo sapiens
  ref <308>: DATABASE ACCESSION NUMBER: Refseq / NM_004051
  ref <309>: DATABASE ENTRY DATE: 2002-02-10
ggcacgagggcggaggccgcaggccgcaggagtgctggtggaggggcttccagaaagaccctgcggcagcgccccccctcggctctccccgcaggagagcgggcacctgcgcggcgccgggtgaaggcgagagcctcggcgagccctctgcagcggagccccctgcccatttggttttggaaccaccgggaggaactgggccattctaacacccgttgctaccatgctggccacccgcctctccagacccctgtcacggctcccaggaaaaaccctaagtgcctgtgatagagaaaatggagcaagacgcccactattgcttggttctacttcctttatcccgattggccgtcggacttatgccagtgcggcggagccggttggcagcaaagctgtcctggtcacaggctgtgactctggatttgggttctcattggccaagcatctgcattcaaaaggcttccttgtgtttgctggctgcttgatgaaggacaaaggccatgatggggtcaaggagctggacagcctaaacagtgaccgattgagaaccgtccagctcaatgtctgcagcagcgaagaggtggagaaagtggtggagattgtccgctcgagcctgaaggaccctgagaaaggcatgtggggcctcgttaacaatgccggcatctcaacgttcggggaggtggagttcaccagcctggagacctacaagcaggtggcagaagtgaacctttggggcacagtgcggatgacgaaatcctttctccccctcatccgaagggccaaaggccgcgtcgtcaatatcagcagcatgctgggccgcatggccaacccggcccgctccccgtactgcatcaccaagttcggggtagaggctttctcggactgcctgcgctatgagatgtaccccctgggcgtgaaggtcagcgtggtggagcccggcaacttcatcgctgccaccagcctttacagccctgagagcattcaggccatcgccaagaagatgtgggaggagctgcctgaggtcgtgcgcaaggactacggcaagaagtactttgatgaaaagatcgccaagatggagacctactgcagcagtggctccacagacacgtcccctgtcatcgatgctgtcacacacgccctgaccgccaccaccccctacacccgctaccaccccatggactactactggtggctgcgaatgcagatcatgacccacttgcctggagccatctccgacatgatctacatccgctgaagagtctcgctgtggcctctgtcagggatccctggtggaaggggaggggagggaggaacccatatagtcaactcttgattatccacgtgtggattatccaccatgccaggaagacccataactggttttaacactaactagagggaatgacttctttgcatagtgagtgacttgggccttcacaaacagggtgtggagtggcaggcagaggcctctaaatctcagggcaaacatggtgaatctatctctccggagataatttcatacagagattttaagaaaacatctttatattaaaaacagatctcatttgatccttaaaaaaaaaaaaaaaaaaaa

SEQ ID NO: 1398 - protein, 343 aa, Homo sapiens
  ref <308>: DATABASE ACCESSION NUMBER: Refseq / NP_004042
  ref <309>: DATABASE ENTRY DATE: 2002-02-10
MLATRLSRPLSRLPGKTLSACDRENGARRPLLLGSTSFIPIGRRTYASAAEPVGSKAVLVTGCDSGFGFSLAKHLHSKGFLVFAGCLMKDKGHDGVKELDSLNSDRLRTVQLNVCSSEEVEKVVEIVRSSLKDPEKGMWGLVNNAGISTFGEVEFTSLETYKQVAEVNLWGTVRMTKSFLPLIRRAKGRVVNISSMLGRMANPARSPYCITKFGVEAFSDCLRYEMYPLGVKVSVVEPGNFIAATSLYSPESIQAIAKKMWEELPEVVRKDYGKKYFDEKIAKMETYCSSGSTDTSPVIDAVTHALTATTPYTRYHPMDYYWWLRMQIMTHLPGAISDMIYIR

SEQ ID NO: 1399 - DNA, 1049 bp, Rattus norvegicus
  ref <308>: DATABASE ACCESSION NUMBER: Refseq / NM_024374
  ref <309>: DATABASE ENTRY DATE: 2003-01-13
gcggaacctgctctgctgggcccaaccgctgcaaaagtactttctcctgcccgaacgctagccgcggcccacagtctcgcccgctcggctgcctgaggcacgtcgtttcctcgtgtccttcgtcgggcgtaatcgccgcttctgcccgacccgccggcccatcccgctgcagtgatgtgcgacaaggagttcatgtgggccctgaaaaacggagacttggatgaggtgaaggactatgtggctaagggagaagatgtcaaccggacactagagggtgggaggaagcctcttcactatgctgcagattgtggacagcttgaaatcctggaatttctgctgctgaaaggagcagatattaatgctccagataaacatcatatcacccctcttctgtctgctgtctatgagggtcatgtttcctgtgtgaaattgcttctgtcaaagggtgctgataagactgtgaaaggcccagatggactgaccgcccttgaagccactgacaaccaggcaatcaaagctcttctccagtgatggatggatggactgataacttgggaagaatgactctcctgtggcctcacactgctgcctgtctgtctgtcactttctatctgccagcttcttcagctaaatactttaagagggtgaagggagagagaaattcataacaaatcagactgccaggggggaattaaacatgttttggaggagcagtggggaatgtgatgagacttttactgggattcctgaacaaaccagcctgtttttcatttccagtaaaatatacagcttataccaagggagagcagaaataccgtctgctggaatccttggaccttctcagctccctagtgatttcttaattagtgtactgaaggtctggccacacaaggccaactcttcctatttggtggccctagctgtgagcagtagtggctgctgttctgtcaacttagggtgctgagataagcaattagctccagccttccttctgccttaagaatgcactctcctgggggctcctggctggttaagagcgctgcctgcag

SEQ ID NO: 1400 - protein, 118 aa, Rattus norvegicus
  ref <308>: DATABASE ACCESSION NUMBER: Refseq / NP_077350
  ref <309>: DATABASE ENTRY DATE: 2003-01-13
MCDKEFMWALKNGDLDEVKDYVAKGEDVNRTLEGGRKPLHYAADCGQLEILEFLLLKGADINAPDKHHITPLLSAVYEGHVSCVKLLLSKGADKTVKGPDGLTALEATDNQAIKALLQ

SEQ ID NO: 1401 - DNA, 2213 bp, Homo sapiens
cgcggaggagaagaggaagaggaagttgggggagggtcctagcggggagtgaaccggaagtgtaaaggttcctgcctctcctcggccaggcggaacctctctgctgggcccggtggccgcaaaagaactttctttctcccgcccgaacggtcgccgcggccaactgcctcgcccgcctggcagcctaaccctccttctcttcttctcctctccggcttcgcgcggccctgcctccctctcgcccggcggcatccgcttgctgctgccaccgcctcctcatcttctgcccggccaaccggcctgccccgctgcagtgatgtgcgacaaggagttcatgtgggccctgaaaaacggagacttggatgaggtgaaagactatgtggccaagggagaagatgtcaaccggacactagaaggtggaaggaaacctcttcattatgcagcagattgtgggcagcttgaaatcctggaatttctgctgctgaaaggagcagatattaatgctccagataaacatcatattactcctcttctgtctgctgtctatgagggtcatgtttcctgtgtgaaattgcttctgtcaaagggtgctgataagactgtgaaaggcccagatggactgaccgcctttgaagccactgacaaccaggcaatcaaagctcttctccagtgatggatggatggactgataactccggaagaatgactctcctgtggcctcacactgctgcctgtctgtctgtcactctctatctgccagcttcttcagctaaatactttaagaggggtgaggggagagagaaattcataacaaatccgactaccagaaaaaaaaaattgttttggaggaggggcaaaaggaaccatgatcaggcttttactgggattcctgatcaagtaagcctcttccctttctaataaaatatacaccttatacccaagggagagcaaagacaaaatacaccagtaacatttgaccttttcagctccctagctaatttattagattgtgttgaaggtctgattctacaaaggccaactctacatatttggtagccctaactgtctgagcagtagtggctgctgtgatgtaaacttagggtgctgagataagcaattagctctagccttctgccttaagaatgcactctactggggatttcctggcatagttaagagcgctgcctataaggttggtgaccaaatctttcctcggtgactttaagctttatgtgaaagcttagttaaggtgaggaggggcacactcctaaattgctggatgactgaactttggattttctctcccctttcacatggatttcatgtctctttagataaaactgactagttttatttataaaatcttaagttttggaagtctaaaggagaaaccattccagtatgcatatttttttctcctctagattcatacatttatatagcattgaaacactttcaaactcctgctggtagtaaaaggggatttaaaaatagaatcatagccataagcctgttagtatcatatgaagagagaacagttatcttagtacctatggattttctttatttgctgtttgaatggattgaccttggttatgtgttgagaattaaggaacattctttgaaatgcctctctcagacccatcttggaggctgattacttactgcaccaaagctatcactggggtgagatttactgtttggacaaatttagccccatcccttcaaaaatacacttgtaaccaggtttcccagagttgttgataggcttctgctgaacatatgccaacccacctgcataatatatttttgttgcttttataaatcatgcattacataaagtgtgacaacttcaaaatgtattctctgttcttggaatacagtgccctaaaatggtgttcttatgacctgcagaaaatatttacacataaataagcaattgcagtgttttgcatgcaaaatataaaaaatttaaattgtcctgattctattttgtaaatggagaaacaatcatatctttctaagcggtaatggaggaagactagtgctttgtgcattttgatatatttgagttcattttttccacaatgtcatacttttgacgcagttgggtttctcataagtatcctagttcatgtacatccgaatgctaaataatactgtgttttaagttttgtgttgcaagaacaaatggaataaacttgaattgtgct

SEQ ID NO: 1402 - protein, 118 aa, Homo sapiens
MCDKEFMWALKNGDLDEVKDYVAKGEDVNRTLEGGRKPLHYAADCGQLEILEFLLLKGADINAPDKHHITPLLSAVYEGHVSCVKLLLSKGADKTVKGPDGLTAFEATDNQAIKALLQ

SEQ ID NO: 1403 - DNA, 469 bp, Rattus norvegicus
  ref <308>: DATABASE ACCESSION NUMBER: EMBL / H31711
  ref <309>: DATABASE ENTRY DATE: 2000-03-04
aaagaagttgtttgagatgtggaccatcgtaaatccccatgggactgctccgtagaggagctgaagaagagaaacatctcagctcctgagtccagactcacccaggcagtctggaagcacaactgctttgcctttatattttgttggcttatactgtgacaaaaggctgatcgcagagggacctggggaaactgtacttgttgcagaggaagaagcggcacgagtggcgctcaggaagctttatggattcacggagaacaggcggccctgggactactccaagcccaaagagagctcaagagcagagaaaaccagcattgccagctaggcagcaagggtgtgtgtgacgtcatcaccactgagcacagcagagagacagtgccggaggcgaacagctcagaatacgggagcaatgtctcattgctctcactgtgccctacaattaaacaggtgtttatcaggtgacggg

SEQ ID NO: 1404 - DNA, 1728 bp, Homo sapiens
  ref <308>: DATABASE ACCESSION NUMBER: Refseq / NM_022915
  ref <309>: DATABASE ENTRY DATE: 2003-01-15
acggggacactggcccgactactttcgttccgtcttccatcgttttctctcgtgcaatggcgtccgggctggtaagattgctgcagcagggacatcgctgcctcctggctccagtcgcccccaagctggtccctccggttcggggagtgaagaagggattccgcgccgccttccgcttccagaaggagttagagcggcagcgccttctgcggtgcccgccgccgcccgtgcgccgttcagagaagccgaactgggattaccatgcagaaatacaagcttttggacatcggttacaggaaaacttttccttagatcttctcaaaactgcatttgttaatagctgctatattaaaagtgaggaggccaaacgccaacaacttgggatagagaaagaagctgttcttctgaatcttaaaagtaatcaagaactatccgaacaagggacatctttttcacagacttgccttacacagtttcttgaagacgagtacccagacatgcccactgaaggcataaaaaatcttgttgactttctcactggtgaggaagtcgtgtgtcacgtggctagaaacttggctgtggagcagttaacactgagtgaagaattcccagtgcccccagctgtgttacagcagactttctttgcagttattggagccctgttacagagcagtggacctgagaggactgcacttttcatcagggacttcttaattactcaaatgactggaaaagagctctttgagatgtggaagataataaatcccatggggctattggtagaagaactgaagaaaaggaatgtttcagctcctgaatcaagacttactaggcagtctggtggcaccacagctttgcctttgtattttgttggcttatactgtgataaaaagttgattgcagaaggacctggggaaacagtattggttgcagaagaagaggctgctcgagtggcccttagaaaactttatggattcacagaaaatagacggccgtggaactattccaagcccaaagaaaccttgagagcagaaaagagcatcactgccagctagccgccatggatgcagcagcctgaaacttgagagcgaaagtgagataaatgtcaaaggtgtttcaagccagacattttcacaattgtgaagaaatagatgttttgtttctgttttttactgtgttcccaaaattaaataaatgttaaccaagtcacagtgtttttggttttgtttttctgaaatcttggtttgatcaaatctttttttttttctcttgagatggagtcttactctgtcgcccaggctggactgcagtggtgcgatctcggctcactgcaacctccacctcacaggttcaagcgattctcgtggctcagcctccctagtagctgggattacaggcacacaccaccatacctggctaatttttgtatttttggtagagatggggtttcaccaagttggctagactagtcttgaactcctgacctcaggtgatccacccgccttggcctcccaaagtgctgggattacaggtgtgagccactatacccgaccagatcaaatctttttttgacatttttgcaaaaaaattttcctaatgttcttgatttaattgtatagaatttgtataattaggtgtattttatttgcctctagctttgaggtatcataatttatgtatcttatgtgaattttttgctgtaataccaataaagttttttttctccac

SEQ ID NO: 1405 - protein, 332 aa, Homo sapiens
  ref <308>: DATABASE ACCESSION NUMBER: Refseq / NP_075066
  ref <309>: DATABASE ENTRY DATE: 2003-01-15
MASGLVRLLQQGHRCLLAPVAPKLVPPVRGVKKGFRAAFRFQKELERQRLLRCPPPPVRRSEKPNWDYHAEIQAFGHRLQENFSLDLLKTAFVNSCYIKSEEAKRQQLGIEKEAVLLNLKSNQELSEQGTSFSQTCLTQFLEDEYPDMPTEGIKNLVDFLTGEEVVCHVARNLAVEQLTLSEEFPVPPAVLQQTFFAVIGALLQSSGPERTALFIRDFLITQMTGKELFEMWKIINPMGLLVEELKKRNVSAPESRLTRQSGGTTALPLYFVGLYCDKKLIAEGPGETVLVAEEEAARVALRKLYGFTENRRPWNYSKPKETLRAEKSITAS

SEQ ID NO: 1406 - DNA, 244 bp, Rattus norvegicus
  ref <308>: DATABASE ACCESSION NUMBER: EMBL / H31732
  ref <309>: DATABASE ENTRY DATE: 2000-03-04
tctggaattgcagtgactttcggaggagacggtgttgtgaaattttcataagaagtaattgttggagaatgggggtctgcaaaactctgatagcattcatctgaatttaaaattaatggggcacaatctttatcttccaaatcagttggtgaactatttggttttgatagtggataatctatagacacctgtagaataaaaataaatcattaaactatggtaagtaaataaagatgttgtaaat

SEQ ID NO: 1407 - DNA, 1683 bp, Rattus norvegicus
  ref <308>: DATABASE ACCESSION NUMBER: Refseq / NM_013057
  ref <309>: DATABASE ENTRY DATE: 2003-01-14
ctcgtgtagcgtagcctccgcgcctctgctgaagccccgcgacctcgccagcagcccttggacatggctatccccatgcgcccgcgcctcctagcggccctcgcgcccacctttctcggcttccttctccttcaggtggccgttggtgcaggcactcctccagggaaagcgtttaatttaacttggatatcaactgatttcaagacaatcttggagtggcaaccgaaacccaccaactatacctacactgttcagataagcgatagatctagaaactggaaatacaaatgcactggaaccacagacactgagtgtgacctcaccgacgagattgtgaaggatgtgaactggacctatgaagcaagggtcctatctgtcccatggaggaactcaactcatggaaaggaaacactctttggaactcatggggaggaaccgccatttacaaatgcccggaagtttttaccttaccgagatacaaaaattggacagccagtaattcagaagtatgaacaaggcggtacgaaactgaaggtgactgtaaaagactcatttacattagtcagaaagaatggtacattcctcactctgcggcaagtttttggcaatgacttgggttatattcttacgtatcggaaagactcaagcacaggaaggaaaacaaacactacacataccaatgaattcttgattgatgtggaaaagggggtaagctactgcttcttcgcacaagccgtgattttctccaggaaaactaaccacaagagcccagaaagcatcaccaagtgcactgagcaatggaagagtgtcctgggagaaacactcatcattgtgggagcagtggtgttcctggtcactgtctttatcatcctgctgaccatatctctgtgcaagcgcagaaagaacagagcaggacagaaaaggaagaacaccccgtcgcgcttggcatagacgaggaggctgacgctgctgactgtcacactgcccacacggcactgttaccgagacctctgctgggaactgtggagtttgctcctagctcagaaagactcccttcatggcctgtcattccagctaatgctttgattccaacactagcatctgtcactttaggacatactgaacggtacaaattgatcaacactacagcaccttttgcacaaagcttaagattgtgtattctacacgcgggaagacactaggttgcccaggcaaagccagtggtcagatgcctttcctataacctgggtgggcttttggagaacctttgaggagtgatgccataggctctagaacaggaaagtgggatttgggtggacttttccaacagttgtacttttcgcaaatcggtatttgggttttgtttttccttctactaggtacttttggaagttcaaagtaactgccaaactgtcatatgttaaatgcaggatatttctgcttgggacatccttgtgatttgtactttattacaacttagcactttaactgacaatgatggggattgaacattggacaaccaactctatttttataagactaccatacagaagaactacatatagttttatgatctaaggtacttaaagtgtttgtggttaacattgtgtatatttatatgagttttaaaggttttgtatatgggattttctatttatatatctcctatttgtatatattgag

SEQ ID NO: 1408 - protein, 295 aa, Rattus norvegicus
  ref <308>: DATABASE ACCESSION NUMBER: Refseq / NP_037189
  ref <309>: DATABASE ENTRY DATE: 2003-01-14
MAIPMRPRLLAALAPTFLGFLLLQVAVGAGTPPGKAFNLTWISTDFKTILEWQPKPTNYTYTVQISDRSRNWKYKCTGTTDTECDLTDEIVKDVNWTYEARVLSVPWRNSTHGKETLFGTHGEEPPFTNARKFLPYRDTKIGQPVIQKYEQGGTKLKVTVKDSFTLVRKNGTFLTLRQVFGNDLGYILTYRKDSSTGRKTNTTHTNEFLIDVEKGVSYCFFAQAVIFSRKTNHKSPESITKCTEQWKSVLGETLIIVGAVVFLVTVFIILLTISLCKRRKNRAGQKRKNTPSRLA

SEQ ID NO: 1409 - DNA, 4623 bp, Rattus norvegicus
  ref <308>: DATABASE ACCESSION NUMBER: Refseq / NM_024379
  ref <309>: DATABASE ENTRY DATE: 2003-01-13
ccccgccgccgagcgcacgcaaggctcgcggatacattttttaaaaagcccaactgcaaacaactctggcaatgccaaaattcccctccgagtgacagggcttgggaggaggctgcctctggctgtgctagctctcgggtcgcctgtgcctcctcggcaaccaggaaaggttgtgttctgtcaagagggatttggaaattagggggaaagctgcactcaactctattgtgacctcaaactctgtggaccgcttaagagaatatctacatattggaagcaaagtcgtggtcaaggaggatcggcatcggaggatggaagttttccccttgctcttctttctatccttctggtggtctcgaacctgggacctggcgacctccgattccatcatccacatcggagcaatttttgatgaatctgctaaaaaagatgatgaagtattccgcacagcagttggtgacctcaaccagaatgaggaaatcttacagactgagaaaatcacattttcagtgacatttgtggatggcaacaacccttttcaagctgttcaagaagcatgtgaacttatgaaccagggcatcttggccttggtcagctccattggttgcacatctgctgggtccctccagtctttggcagacgccatgcatatccctcacctcttcattcagcgttcaacagctgggaccccaagaagtggctgcggcctcaccaggagcaacagaaacgatgactataccctttcagttcgtccacctgtctacttgaatgaagtcatcctaagagtagtcacagagtatgcatggcagaaatttattatcttctatgatagtgaatatgatatccgtggcatacaggaatttttggacaaagtttcccagcagggaatggatgttgcccttcaaaaggtggaaaacaacatcaataaaatgatcaccacgctctttgacaccatgaggatagaggagttgaatcgctatcgagacactctcagaagagccatccttgttatgaaccccgccacagccaaatccttcataagtgaggtggtggagactaatctggttgcttttgactgtcactggatcatcatcaatgaggaaataaatgatgtggatgttcaggaacttgtcagaaggtccattggaaggttaacaattattcggcagacatttccagtcccccagaatataagtcagcgctgtttccgtggcaaccatcgaatttcttcaacactgtgtgatcccaaggatcccttcgcacagaatatggagatttctaacctttacatctatgacacggtgcttctgcttgcaaacgcctttcataagaagctgcaggaccggaagtggcacagcatggcgagcttgtcctgtatcaggaaaaactccaagccctggcagggagggcggtccatgctggagaccatcaagaagggtggagttaatggattgactggagatctagaatttggagaaaatggaggtaaccccaatgtccacttcgaaatccttggaaccaactatggagaagaacttggcaggggtgtccgtaaacttgggtgctggaatcctgtcacaggtctgaatggatcactgacagacaagaaactggagaataacatgcgaggtgtggttctacgcgtggtgactgtattggaggagccttttgtaatggtctctgaaaatgtcttgggaaaaccgaagaaataccagggcttctccattgatgttttagatgccctatctaactatctgggttttaactatgaaatttatgttgcaccggaccacaaatatggaagcccacaagaagatgggacatggaatggactagtaggagaacttgtttttaagagagctgacatcgggatttcagctttaaccatcactccagaccgggagaatgttgtggattttacaacacgctacatggactactcagtaggggtcctactgcgaagggcagaaaaaacagtggatatgtttgcctgccttgcaccatttgatctatctctgtgggcctgcattgccggcacagtccttcttgtgggactcctggtctacctcttgaactggcttaatcccccacggttgcaaatgggatcaatgacatctactacactctataactccatgtggtttgtgtacgggtcctttgtacagcaaggtggggaagtaccatacacaactttggcaacccgaatgatgatgggggcttggtggttatttgctctgattgtcatctcatcttatacagcaaatcttgccgctttcctcactatcacccgcattgagagctccatccagtctcttcaggatctgtccaagcaaacggatatcccttatggcacagtcttggattccgcagtatatcagcatgttcgcatgaaggggctgaatccttttgagagggacagcatgtattcccagatgtggaggatgatcaaccgaagcaatggctcagagaacaatgttctggagtcccaagcaggcattcaaaaggtaaaatatggaaactatgcttttgtatgggatgcagctgtgttggaatatgtggccatcaatgaccccgactgttccttctacactgttggaaatactgttgctgaccgggggtatggcatcgcactgcagcatggcagtccctaccgtgatgtcttttcacaaaggatcctggagctgcagcagagtggcgacatggacatcctcaagcacaaatggtggcctaagaatggccagtgtgacctgtactcctcagtagatgcaaagcagaagggaggagccctggacatcaagagtctggcaggcgtgttctgcatcctggccgcggggattgtactctcctgcctcatagccgtcctcgagacatggtggagtcggcggaagggctcccgagtcccatcgaaagaggatgacaaggaaattgacctggagcacctccatagacgtgtaaatagcttgtgcacagatgacgacagcccccataaacagttttccacctcgtcaattgacttgacccctctggacattgacactttgccaacacgacaagccctggagcagatcagtgatttcagaaacactcacatcaccaccaccaccttcatcccagagcagatccagactcttagccgcacactctcagcaaaagctgcctttggcttcactttcggcagtgtgcccgagcaccgaactggcccttttaggcacagggcccctaatgggggctttttcaggagtcctatcaaaacaatgtcatctattccttatcagcctactcccactctggggctcaatctgggcaatgaccccgaccgaggcacgtccatatgagcagcagacagctcggcctatatcctaggactgccccaaaggagcaactgtaatgtgggactaacatggatgtgatgttttatttaaaagaaatcaggataattagtaacaattctagttctttctctcccctgctctacttttttcggctctttctccctctctctgtctatcaccctccattttttggccattactcaacttgttccccaagaatatagtattctaggatccaagtagtctgcttttcatatactgtacttcaagtatagggaatgggcactgagactgagaacacttgaccagggttgacttgcatacagggctcccatgcacccaccgtccctctgtttcgaaactctaactgcaataacctcggtctttctccatcttcagccacatccataaaaccctccactactatcgagtgtcctttaactgtggaccaaaggcaacccctgcagtgtggatgaacatgattttgaagaccgttcaggccacacaatatgagatcaacggtttcgtaggattacaaaaacaaaaacaaaacaaaacaaaaaaaaaaagccattaatctgccagtcaagactacagttaaaaccccttgcactgcagcagtgcccacccccttcgtgcgattgtacagtattcaaaccttttcttatgtacagtaacttaccataggcaaaggctttattgtgttaaataacttagtatctcatatatacatatatatgcacctatataatgtgtatatatatagaaatgcagccattgctattgcaattcatttaataaagctttagtttaaaaaccaagcattgtgtacaggagctgtggcagcgcaggaggccttgtcaggtgaagaggcaggttgctttaatgtcactctgacctgcgttgtttgccaagagactttttataattcttgttattaaaacatccagggtgatttcatctttgttcctagatgtactcatttgaataggttttgcattcattattcagcagtgtataaagctaacctcgataattttaccttctgttaattatctaaacgggaaatgccatgagccgaaccccacacacagcacagagagcagagtttaaccgtagatcatggtaggttcaacgtcctcttccaaagctgcaagcgaatcactgtaactgaagctggggaggaggggaaaccccttcgaagtgtcgatgtggccttatatgtgtcatacatcaccctacagcagacacgtgacaaccatactgggctctcatctgaacccctcttcgg

SEQ ID NO: 1410 - protein, 1007 aa, Rattus norvegicus
  ref <308>: DATABASE ACCESSION NUMBER: Refseq / NP_077355
  ref <309>: DATABASE ENTRY DATE: 2003-01-13
MEVFPLLFFLSFWWSRTWDLATSDSIIHIGAIFDESAKKDDEVFRTAVGDLNQNEEILQTEKITFSVTFVDGNNPFQAVQEACELMNQGILALVSSIGCTSAGSLQSLADAMHIPHLFIQRSTAGTPRSGCGLTRSNRNDDYTLSVRPPVYLNEVILRVVTEYAWQKFIIFYDSEYDIRGIQEFLDKVSQQGMDVALQKVENNINKMITTLFDTMRIEELNRYRDTLRRAILVMNPATAKSFISEVVETNLVAFDCHWIIINEEINDVDVQELVRRSIGRLTIIRQTFPVPQNISQRCFRGNHRISSTLCDPKDPFAQNMEISNLYIYDTVLLLANAFHKKLQDRKWHSMASLSCIRKNSKPWQGGRSMLETIKKGGVNGLTGDLEFGENGGNPNVHFEILGTNYGEELGRGVRKLGCWNPVTGLNGSLTDKKLENNMRGVVLRVVTVLEEPFVMVSENVLGKPKKYQGFSIDVLDALSNYLGFNYEIYVAPDHKYGSPQEDGTWNGLVGELVFKRADIGISALTITPDRENVVDFTTRYMDYSVGVLLRRAEKTVDMFACLAPFDLSLWACIAGTVLLVGLLVYLLNWLNPPRLQMGSMTSTTLYNSMWFVYGSFVQQGGEVPYTTLATRMMMGAWWLFALIVISSYTANLAAFLTITRIESSIQSLQDLSKQTDIPYGTVLDSAVYQHVRMKGLNPFERDSMYSQMWRMINRSNGSENNVLESQAGIQKVKYGNYAFVWDAAVLEYVAINDPDCSFYTVGNTVADRGYGIALQHGSPYRDVFSQRILELQQSGDMDILKHKWWPKNGQCDLYSSVDAKQKGGALDIKSLAGVFCILAAGIVLSCLIAVLETWWSRRKGSRVPSKEDDKEIDLEHLHRRVNSLCTDDDSPHKQFSTSSIDLTPLDIDTLPTRQALEQISDFRNTHITTTTFIPEQIQTLSRTLSAKAAFGFTFGSVPEHRTGPFRHRAPNGGFFRSPIKTMSSIPYQPTPTLGLNLGNDPDRGTSI

SEQ ID NO: 1411 - DNA, 3024 bp, Homo sapiens
  ref <308>: DATABASE ACCESSION NUMBER: Refseq / NM_001510
  ref <309>: DATABASE ENTRY DATE: 2000-10-31
atggaagttttccccttgctcttggttttgtccgtctggtggtctcgaacctgggactcggcgaatgcggattcgatcattcacatcggagcaatttttgatgaatctgccaaaaaggatgatgaggtatttcgcactgcggttggtgaccttaaccagaatgaagagatcttacagactgagaaaatcacattttcagtgacgtttgttgatggcaacaaccctttccaagcagttcaagaagcctgtgaacttatgaatcaaggcatcttggccctggtcagctccattggctgcacgtcagcaggatccctccagtctttggcagacgccatgcatatcccccacctcttcattcagcgctcaacagctgggaccccaaggagtggctgtggactcacccggagcaacaggaatgatgactacactctctcagttcgcccacctgtctacttgcatgatgttatcctaagagtggtcacagagtatgcctggcagaaattcattatattctatgatagtgaatacgatatccgtggaatacaggagttcttggacaaagtctctcagcagggaatggatgttgcacttcagaaggtagaaaacaacatcaataaaatgattaccactctctttgacaccatgagaatagaagaactgaatcgctatcgagacactcttaggcgagcgatccttgttatgaatcctgctacagccaaatccttcattactgaggttgtggagactaatttggttgcttttgactgtcactggatcattataaatgaggaaataaacgatgtggacgtacaggaacttgtaagaaggtcaattggaaggttaacgattattcggcagacatttccaattccccagaacataagtcagcggtgtttccgtggcaaccatcgaatatcttcaacattgtgtgatccaaaggatccatttgctcagaatatggagatttccaacctttacatatatgacacggtgcttctgcttgctaatgcttttcataagaagctggaggaccgaaagtggcacagcatggcaagtctgtcatgtatcagaaagaactcaaagccctggcagggtgggcgctccatgttggagaccatcaagaagggtggagttagtgggttgactggagagctagaatttggagaaaatggaggcaatcccaatgtccactttgaaatccttggaaccaactatggagaagagcttggcagaggtgttcgaaaacttgggtgctggaatcctgtcacaggtctgaatgggtcactgactgacaagaaattggagaataacatgcgtggagtggttctacgtgtagtaactgttctggaagaaccttttgtgatggtctctgaaaatgtcttgtgtaagccgaagaaataccagggcttctccattgatgttttggatgccttatctaactacctgggttttaactacgaaatttacgtagcaccggatcacaaatacggaagcccacaagaagatgggacatggaatggcttggtaggagaacttgtctttaagagagccgacatagggatttctgctttaaccatcactccagatcgtgaaaatgtggtggactttacgacacgttacatggactactcagtgggggtactacttcgaagggctgaaaagacagtggatatgtttgcctgtcttgcaccatttgatctctctctatgggcttgcattgctggcacagtccttctggtgggtctactggtctacctcttgaactggcttaatcccccacgattacaaatgggatcaatgacgtctactactctctacaactccatgtggtttgtgtatggatcttttgtacaacaaggcggggaagtcccgtacacgactctggctacccgaatgatgatgggggcttggtggctatttgctttgattgttatctcatcttacacggcaaacctcgctgctttcctcactattacacgcattgaaagttccatccagtctctccaggacctttccaagcaaacagaaatcccttatggcacagtcctagactctgcggtatatgagcatgtccgcatgaaaggactgaatccttttgagagggacagcatgtattcccaaatgtggcggatgatcaaccgaagcaatggatcggagaacaatgttctggagtcccaggcaggcattcaaaaggtaaaatatggaaattatgctttcgtatgggatgcagctgtattggaatatgtggctatctatgacccagattgttccttttacaccattggaaatactgttgctgatcggggatatggaattgcattacaacatggcagtccttaccgagatgttttttcacaaaggatcctggagcttcagcagaatggtgacatggacatcctgaagcacaaatggtggcctaagaatggccagtgtgacctgtactcgtcagtggacacaaagcagaaaggaggcgccctggacataaagagctttgcaggggtcttttgtatcctggctgctggaattgtcctctcctgcttcatagccatgctggagacgtggtggaacaagaggaaaggctcccgggttccatcaaaagaggatgacaaggaaattgacctggagcacctccatagacgtgtaaatagcttgtgcacagatgacgacagcccccataaacagttttccacctcgtcaattgatttgacccctctggacattgacactttgccaacacgacaagcactggagcaaatcagtgatttcaggaacactcatattaccacaacaacctttatcccagagcagatccagactcttagccgcacactgtcagctaaagctgcttctggtttcacttttggcaacgtgcctgagcaccgaactggcccttttaggcacagggcacctaatgggggctttttcaggagtcctataaaaacaatgtcatctattccttatcaaccaactcctaccctggggctcaatctgggtaatgatccagaccgaggcacctccatatga

SEQ ID NO: 1412 - protein, 1007 aa, Homo sapiens
  ref <308>: DATABASE ACCESSION NUMBER: Refseq / NP_001501
  ref <309>: DATABASE ENTRY DATE: 2000-10-31
MEVFPLLLVLSVWWSRTWDSANADSIIHIGAIFDESAKKDDEVFRTAVGDLNQNEEILQTEKITFSVTFVDGNNPFQAVQEACELMNQGILALVSSIGCTSAGSLQSLADAMHIPHLFIQRSTAGTPRSGCGLTRSNRNDDYTLSVRPPVYLHDVILRVVTEYAWQKFIIFYDSEYDIRGIQEFLDKVSQQGMDVALQKVENNINKMITTLFDTMRIEELNRYRDTLRRAILVMNPATAKSFITEVVETNLVAFDCHWIIINEEINDVDVQELVRRSIGRLTIIRQTFPIPQNISQRCFRGNHRISSTLCDPKDPFAQNMEISNLYIYDTVLLLANAFHKKLEDRKWHSMASLSCIRKNSKPWQGGRSMLETIKKGGVSGLTGELEFGENGGNPNVHFEILGTNYGEELGRGVRKLGCWNPVTGLNGSLTDKKLENNMRGVVLRVVTVLEEPFVMVSENVLCKPKKYQGFSIDVLDALSNYLGFNYEIYVAPDHKYGSPQEDGTWNGLVGELVFKRADIGISALTITPDRENVVDFTTRYMDYSVGVLLRRAEKTVDMFACLAPFDLSLWACIAGTVLLVGLLVYLLNWLNPPRLQMGSMTSTTLYNSMWFVYGSFVQQGGEVPYTTLATRMMMGAWWLFALIVISSYTANLAAFLTITRIESSIQSLQDLSKQTEIPYGTVLDSAVYEHVRMKGLNPFERDSMYSQMWRMINRSNGSENNVLESQAGIQKVKYGNYAFVWDAAVLEYVAIYDPDCSFYTIGNTVADRGYGIALQHGSPYRDVFSQRILELQQNGDMDILKHKWWPKNGQCDLYSSVDTKQKGGALDIKSFAGVFCILAAGIVLSCFIAMLETWWNKRKGSRVPSKEDDKEIDLEHLHRRVNSLCTDDDSPHKQFSTSSIDLTPLDIDTLPTRQALEQISDFRNTHITTTTFIPEQIQTLSRTLSAKAASGFTFGNVPEHRTGPFRHRAPNGGFFRSPIKTMSSIPYQPTPTLGLNLGNDPDRGTSI

SEQ ID NO: 1413 - DNA, 3256 bp, Rattus norvegicus
  ref <308>: DATABASE ACCESSION NUMBER: Refseq / NM_012788
  ref <309>: DATABASE ENTRY DATE: 2003-01-14
cacgaggcgactgggggcgcggaagggaggcgaggttccgggggtggggcggcccggaggcgagcgggcgagcggggccgccgagcggcggcgagagggcaggcggcggcggccgaggcggagagagcggcgcggggtgcggccgccgagaggagctcctcccccgtcccctcaccccctcagctgagctcgagtcggggcggggcggggtacgtggagcggggccgggcggggagctgctccgagtctggccggagcgcacccggggcgcccgcgttcgccgctcgcgggaactttgcggcggacggtgtggaggccgcggaggggtgcatgagcggcgcagggcggcgcacagagcggcggctgtccggtccggcccctgctggagtcgccgccggaggaggcgagcgaggagccaggtgtgtgtgccttcttcctgcttctggaaaaaatgccggtccggaagcaagatacccagagagcattgcatctgttggaagaatatcggtcgaaactaagccaaaccgaagacagacagctcaggagttccatagagcgggttattagcatatttcagagcaacctctttcaggctttaatagacattcaagaattttatgaagtgaccttacttgataatccaaaatgtgtggatcattcaaagcagtgtgaaccggtccaacccgggaatccttgggagagtggcagcctttcaagtgctgctgtgacttcagagagcctgcccggcggccttagccctccagtagagaaataccggtatcaggacgaagaggtgctgccttcagagcggatttccccgcaagtcccaaatgaggtgctgggtccggagctggttcacgtctcggagaagagcctgtcagagattgagaatgtccacgggtttgtctctcactctcatatctcacccataaagcccacagaagctgttcctccctcctctcccattgtccctgtgacccctgccttgccagtccctgctgagagtcctgtcgtcctgccctccacaccacaggcaaatcctcctcctgtcctggtcaacacagacagcttggagacaccaacttatgttaatggtactgatgcagattatgaatatgaggaaatcacacttgaaaggggaaattcaggcttgggtttcagcattgcaggaggtacagacaacccacacattggagatgactcaagtattttcatcaccaaaattatcacgggaggagcagctgcccaggatggaagattgcgggtaaatgactgtatactgagagtaaatgaagcagatgttcgtgatgtaacccacagcaaagcagttgaagcattgaaagaagctggatcgatagtgcgattatatgtgaaaaggcggaaggccttcagaaaaaatcatgaaataaaacttattaaaggccctaaaggtcttgggttcagcattgctggaggtgttggaaaccagcacattcctggggataacagcatctatgtaaccaaaataattgaaggaggtgcagcacacaaggacggcaaacttcagattggagacaagcttctagcagtgaacagtgtctgtttagaagaagttactcatgaagaagcagtgactgccttaaagaatacatctgattttgtttatttgaaagcggcaaaaccaacaagtatgtatataaatgatggctatgcaccacccgacatcactaattcttcttctcagtctgttgacaaccatgttagcccgtcttcatacttgggccagactccagcgtcaccagccagatactcacccatttctaaagcagtgcttggagatgatgagatcactagggaacctagaaaagttgttcttcatcgtggctcaacgggacttggtttcaacattgtgggaggcgaagatggagaagggatttttatctctttcatccttgctgggggacctgctgacctaagcggagagctcagaaaaggagatcgcattatatcggtaaacagtgttgacctcagagctgcaagtcatgaacaagcagctgccgcattaaaaaacgcaggccaagctgtcactattgtcgcacagtatcggcctgaagagtacagtcgttttgaagctaaaattcacgacttgcgggagacgatgatgaacagcagtgtcagctcagggtcagggtctctccgaaccagccaaaagcggtccctctatgtcagagccctttttgattacgacaagactaaagacagtggccttcccagtcaagggttgaacttcaaattcggagatattctccatgttatcaatgcttctgatgacgagtggtggcaggccagacaggtgaccccagatggtgagagtgacgaagttggagtaattcctagtaaacgcagagttgagaagaaagaacgagcccgattaaaaacagtcaaattcaattctaaaacaagaggagataaaggggagatccctgacgacatgggatcaaaaggcctgaagcacgtaacttctaatgccagcgatagcgaaagtagttaccatgaatatggctgctcaaaaggtggtcaagaagaatatgttttatcgtatgagccggtgaatcagcaagaagttaattatacccgaccagtcatcatattaggacctatgaaagacagagtaaatgatgacttaatctcagaatttcctgacaaatttggatcctgtgtccctcatacaactagaccaaagcgtgactatgaggtggatggacgagattaccattttgtgacttcaagagaacagatggagaaagatatccaggagcataaattcattgaagctggccagtataacaaccatctatacggaacgagtgtccaatctgtgcgagcagtagcagagaagggcaagcattgtatccttgatgtgtctggaaatgccatcaagaggttgcagattgcacagctctatccaatatctatttttattaaacccaaatccatggaaaatatcatggaaatgaataaacgcctaacagacgaacaggccagaaaaacgtttgagagagcagtgagactggagcaggagttcactgagcatttcacagctattgtccagggagacacgctggaggacatttacaatcaagtgaagcagatcatagaagagcagtctggtccttacatctgggtcccagcaaaagaaaaattatgaagacagatgttgctctttctttttccatggtctcatctctctgccctgctctggaggtctgtcttcagc

SEQ ID NO: 1414 - protein, 911 aa, Rattus norvegicus
  ref <308>: DATABASE ACCESSION NUMBER: Refseq / NP_036920
  ref <309>: DATABASE ENTRY DATE: 2003-01-14
MPVRKQDTQRALHLLEEYRSKLSQTEDRQLRSSIERVISIFQSNLFQALIDIQEFYEVTLLDNPKCVDHSKQCEPVQPGNPWESGSLSSAAVTSESLPGGLSPPVEKYRYQDEEVLPSERISPQVPNEVLGPELVHVSEKSLSEIENVHGFVSHSHISPIKPTEAVPPSSPIVPVTPALPVPAESPVVLPSTPQANPPPVLVNTDSLETPTYVNGTDADYEYEEITLERGNSGLGFSIAGGTDNPHIGDDSSIFITKIITGGAAAQDGRLRVNDCILRVNEADVRDVTHSKAVEALKEAGSIVRLYVKRRKAFRKNHEIKLIKGPKGLGFSIAGGVGNQHIPGDNSIYVTKIIEGGAAHKDGKLQIGDKLLAVNSVCLEEVTHEEAVTALKNTSDFVYLKAAKPTSMYINDGYAPPDITNSSSQSVDNHVSPSSYLGQTPASPARYSPISKAVLGDDEITREPRKVVLHRGSTGLGFNIVGGEDGEGIFISFILAGGPADLSGELRKGDRIISVNSVDLRAASHEQAAAALKNAGQAVTIVAQYRPEEYSRFEAKIHDLRETMMNSSVSSGSGSLRTSQKRSLYVRALFDYDKTKDSGLPSQGLNFKFGDILHVINASDDEWWQARQVTPDGESDEVGVIPSKRRVEKKERARLKTVKFNSKTRGDKGEIPDDMGSKGLKHVTSNASDSESSYHEYGCSKGGQEEYVLSYEPVNQQEVNYTRPVIILGPMKDRVNDDLISEFPDKFGSCVPHTTRPKRDYEVDGRDYHFVTSREQMEKDIQEHKFIEAGQYNNHLYGTSVQSVRAVAEKGKHCILDVSGNAIKRLQIAQLYPISIFIKPKSMENIMEMNKRLTDEQARKTFERAVRLEQEFTEHFTAIVQGDTLEDIYNQVKQIIEEQSGPYIWVPAKEKL

SEQ ID NO: 1415 - DNA, 3770 bp, Rattus norvegicus
  ref <308>: DATABASE ACCESSION NUMBER: Refseq / NM_022863
  ref <309>: DATABASE ENTRY DATE: 2003-01-13
tgaggccggcgatggactccccaagtgcaggatacacctttgagtaccttattgaaacattaaatggcagttcacagaagaagttcttcaatgtacctaaacttggaggcaccaagtatgatattctgccttactcaatacgggtcctattggaagctgctgtacgaaattgtgatggatttttaatgaaaaaggaagatgttataaatattttggactggaaaaccaaacaaagcaatgttgaagtgccctttttccccgcccgtgttgttcttcaagatttcactggaataccggcaatggtggattttgctgctatgagggaggcaatgaaaactcttggaggtgatcctaagaaagtccaccctgcctgtccaacagatctcacagttgaccactctttacagattgacttcagtaaatgtgcaatacagaatgcaccaaatcctggaggtggtgacctacagaaagcaggaaagctctctccacttaaagtacagcctaagaagcttccatgtcgaggccagactacctgccggggatcgtgtgattctggagaactaagccgaaactcaggaacattttcttcgcagattgagaatacgcctgtcctgtgtccctttcatttgcaaccagtgcctgaacctgagacggtgttaaaaaatcaagaagtagaatttggcagaaatcgagagaggcttcaatttttcaagtggagctcaggagcttttaagaatgtggcagtcatccctcctggaactggaatggctcatcaagtgaacttagaacatttgtcgagagtagtgtttgaagaagccgacctgctcttcccagacagcgtaattggcacagattctcatataaccatggtgaatggattgggaattcttgggtggggagttggaggcattgagacagaggcagttatgcttggcctgccagttactcttactttaccagaggtggttggatgtgagctaactgggtcatccaatgcttttgttacatccatagatattgtcctaggcattacaaagcacctcaggcaagtaggcgtggctggaaagtttgttgagttctttggaagtggagtttcacaattatctattgtcgatagaactactatagcaaacatgtgtcccgagtatggtgctatcctcagctttttccctgttgacaatgtgacactacgacatttagaacatacaggttttgacaaaaccaaacttgagtcaatggaagaataccttaaagctgtgaaattgtttcgaaatgatgagaattcttcagaacctgaatattctcaggtgatacagattaatctgaattcaatagttgcatctgtcagtggtccaaaaaggcctcaggatagagttgctgtaacagatatgaaaagtgattttcaggcttgcttaaatgaaaaggttggatttaaaggcttccaagttgcagcagaaaaacaaagtgatactgtctcagttcgttatgatggaagtgagtataagctgtcccatgggtccgtggtcattgctgcggttatcagctgtaccaataactgcaatccatcagtgatgctcgctgcaggtcttttggctaaaaaggctgttgaaactggtctacgagttaaaccttatataagaacaagtttgtctccaggcagtgggatggttacacattacctcagttcaagtggagtgttaccctaccttagcaagctagggtttgaaatagttggctatggatgttcaacgtgtgtaggaaatacagcacctttatcagaagcaattttgaatgcagtaaaacagggtgatttggctacctgtggagttttatctggaaacaaaaatttcgaaggtcgtctttgtgattgtgtccgtgctaattatctcgcctctccacccttagtggtggcttacgccatagcaggcacagtgaatatagatttccagacagagccattaggtactgactctacaggcaagaacatttacctgcatgacatttggcctagtcgagaagaagttcatcagatagaagaagaacatgttattttgtccatgtttaaagcactgaaagagaaagtagagatgggaaataaacggtggaattccttagacgctccagattcagtgttgtttccatgggatgttaagtctacttacatcagatgcccttcattttttgataaacttaccaaagaaccagctgcatcccagcctattgaaaatgcccatgtcctgttgtacttgggagactctgtcactacagaccacatatcacctgctggaagcattgctaggagcagagctgctgctaagtacttgacaaacagaggccttactccccgagagttcaactcttatggagctcgaagaggtaatgatgctgtgatgacaagaggcacgtttgcaaacatcaagctttttaataagtttattgggaagccagctcccaaaacaattcattttccatcaggacagacgctcgatgtatttgaagctgcagaattataccaaaaagaaggtatcccactgataattttagcaggaaaaaaatatggttcaggaaattcaagagactgggctgcgaaaggaccctatttgctgggtgtaaaggctgttttggctgaaagctatgaaaagatacacaaagatcatttgattggaattggtatagcaccacttgagttcctcccaggagaaaatgcagattccttgggcctctccggcagagaagtattttctttatcatttcctgaagaactctttcctggaattacgttaaatataaagacgagcactggcaaagagttcagcgtgattgcagcatttgaaaatgatgtggagataactttgtacaaacatggaggattgttaaactttgtggctcgaaaattcttatagtatctactccccatggtatctttcatggctggtaactgcaaagccttcttctgtgctggacccaggaatcattgccatggaactgcagatgatttcagtatacttctctcctccatggatgtaaatgataacgaatcaacgtagtgactaaaatgaaatcttgattttaaataatatacgaatggtgctattaacattgctaaaatcaacgtgtgaaggtgtgttgtggaagagacctgtaagtatggggggtatattttatgagaacattttgtaaataaagacagaatttgaacttgtgttgaagattcatatgaatagccgttctaaagctgtttgttttgttttgcaccttaaaactggactactgtttgttggtttaagaatagcaagttgatttagaagaagccagactagatcctaaaattatggaaatgggtacctgatttagaaatgaatttttaaatgtttttctttccagaattgaattggacacaattggcatttccagtttgtaatgtaagtcaggtttggccttagtctcaatacatctgcaaggcatagaacctgccccagatcacagtccctctgaccagccaaaatgtcctccatgtctgcagataaatgactgtaaaatacagctgattgtgtggtaccgtgtattagtaagaatatatttcctgtggtatagccctgtaattttttcagtaacttgccactatgacccactcacaagcccaaatacggtgtattaatttggactagattttgctcattttacatgactgtaactcctgtaacctcaattaggaatcactagctgacattccacactccttttatgactgctggaaacaattgagtcaa

SEQ ID NO: 1416 - protein, 963 aa, Rattus norvegicus
  ref <308>: DATABASE ACCESSION NUMBER: Refseq / NP_074054
  ref <309>: DATABASE ENTRY DATE: 2003-01-13
MDSPSAGYTFEYLIETLNGSSQKKFFNVPKLGGTKYDILPYSIRVLLEAAVRNCDGFLMKKEDVINILDWKTKQSNVEVPFFPARVVLQDFTGIPAMVDFAAMREAMKTLGGDPKKVHPACPTDLTVDHSLQIDFSKCAIQNAPNPGGGDLQKAGKLSPLKVQPKKLPCRGQTTCRGSCDSGELSRNSGTFSSQIENTPVLCPFHLQPVPEPETVLKNQEVEFGRNRERLQFFKWSSGAFKNVAVIPPGTGMAHQVNLEHLSRVVFEEADLLFPDSVIGTDSHITMVNGLGILGWGVGGIETEAVMLGLPVTLTLPEVVGCELTGSSNAFVTSIDIVLGITKHLRQVGVAGKFVEFFGSGVSQLSIVDRTTIANMCPEYGAILSFFPVDNVTLRHLEHTGFDKTKLESMEEYLKAVKLFRNDENSSEPEYSQVIQINLNSIVASVSGPKRPQDRVAVTDMKSDFQACLNEKVGFKGFQVAAEKQSDTVSVRYDGSEYKLSHGSVVIAAVISCTNNCNPSVMLAAGLLAKKAVETGLRVKPYIRTSLSPGSGMVTHYLSSSGVLPYLSKLGFEIVGYGCSTCVGNTAPLSEAILNAVKQGDLATCGVLSGNKNFEGRLCDCVRANYLASPPLVVAYAIAGTVNIDFQTEPLGTDSTGKNIYLHDIWPSREEVHQIEEEHVILSMFKALKEKVEMGNKRWNSLDAPDSVLFPWDVKSTYIRCPSFFDKLTKEPAASQPIENAHVLLYLGDSVTTDHISPAGSIARSRAAAKYLTNRGLTPREFNSYGARRGNDAVMTRGTFANIKLFNKFIGKPAPKTIHFPSGQTLDVFEAAELYQKEGIPLIILAGKKYGSGNSRDWAAKGPYLLGVKAVLAESYEKIHKDHLIGIGIAPLEFLPGENADSLGLSGREVFSLSFPEELFPGITLNIKTSTGKEFSVIAAFENDVEITLYKHGGLLNFVARKFL

SEQ ID NO: 1417 - DNA, 3368 bp, Rattus norvegicus
  ref <308>: DATABASE ACCESSION NUMBER: Refseq / NM_012988
  ref <309>: DATABASE ENTRY DATE: 2002-11-14
cgaccgacctgcagttgagccgagttggaaatgtgaacgcaagaagcaggcttgatttttttttcctccccccctctcctagctctctcctcctctctctccctctcgcacccacactcacgcacacctccagcccgcacacagacgtgcacgcaccccccgccgcccggcagttatgtattctccgctctgtctcacccaggatgagtttcatcctttcattgaagcacttctgccccatgtccgcgccttcgcctacacatggttcaacctgcaggcccgaaagcggaaatacttcaaaaagcatgagaagcgcatgtcgaaagaagaggagagggctgtgaaggatgaactgctaagtgagaagcctgaggtcaagcaaaagtgggcttcccgacttctggccaagttacggaaagatatccgacccgagtaccgagaggattttgttcttacagttacagggaaaaaacctccatgctgtgttctttccaacccagaccagaaaggcaagatgcggagaattgactgcctccgccaggcagataaagtatggaggttggacctcgtcatggtgatcttgttcaaaggtattccgctggaaagtactgatggtgaacgccttgtgaagtccccacagtgctcgaatccagggctctgtgtccagccccatcacataggggtttctgtaaaggaactcgatttatatttggcatactttgtacatgcagcagattcaagtcaatctgaaagtcccagccaaccaagtgatgctgacattaaggaccagccagaaaatggacatttgggcttccaggacagcttcgtcacatcaggtgttttcagtgtgactgagctagtaagagtgtcacaaacaccaatagctgcaggaaccggccccaatttttctctctctgatttggaaagttcctcatactacagcatgagtccaggagcaatgaggaggtctctacccagcacatcctctaccagctctaccaagcgcctcaagtctgtggaggacgaaatggacagtcctggtgaagaaccattttacacaggccaagggcgctccccagggagtggcagccagtccagcggatggcatgaagtagagccaggcatgccatctccaaccactctgaagaagtctgagaagtctggtttcagcagcccctccccttcgcagacctcctccctcggaacagcattcacacagcatcaccgacctgtcataacaggaccgagagcaagcccacatgcgacgccatcgactctccactttccaacgtcacctatcatccagcagcctgggccttatttctcacacccagccatccgttaccaccctcaggagacgctgaaggagtttgtccaacttgtctgccccgatgctggtcagcaagctggacaggtggggttcctcaatcccaatggaagcagtcaaggcaaggtgcacaacccattcctccccaccccaatgttgccgccgccaccgccaccaccgatggccaggcctgtgcctctgcccatgccagacaccaagcctccaaccacatcaacagaaggcggtgcagcctcccccacctcaccgacctactcgacacccagcacctcccccgcaaaccgattcgtcagtgttggaccacgggatccaagctttgtaaatatccctcaacagacacagtcctggtacctgggataaaagttgcagcgtcccaccatcctccagacagaccacctgaccccttctcaactctgtaacatggacgcaacctcaacccggcgcagttacaacttcactgtcagtggaaggggagagacaccaactcgaatcaacttgtacatggaaacagcgaacgtcgtggtcaaacagcaaaggcccataacttttcgggattcttttttttttttaatactttagggactgtcgaattctctaaatatggtgctggaaatgcgttgggctgtgtgacatttgaagtgttccagtggtggtgtgagcagtaggtgaagcggctggtaggggatgagccttgctcacgaacttcctgttgtaacacttttgagcctggccttttcacagtatttcaagaatttgcccgcgcaggtgtgtgaccctcccggagcacttggagacacctggagaatgaaatctttcgtagtagctaagatctgtgatctgtaacttacaggacactcaagggcaatgtttttggggttttcttttttttctgtaacatattagaaaaagcaatgcagttaagttatctttcttttagtttggtttggttcagcagtcagcagttaaatacataacacaaccctcaaggacagtgaacccactcatgttgcagagcaatccaaaaagacagcaaagactactactactactctcagttcggttgtttgtttttttttttttttttttgtttttttattaagttttgaaatgctgcacttacatttaaaaaaaacattttcaacaatttcaacaatgacacaaaagttcacatggaaatggggaagatggtctgttttgacagaaactgacaggaatcaaaacaatcgaattttgaattgagtgaagtgcaatttcattggatagctaagtatctttgtaagatagagattgttgaaaattctatttttgtttttcaagtcctcccaccccaggactctaaattattggggttaaaaaaaaacagccttgcaagaaaaaggggagctatttttgctttttatgttttttattgttaaacttgtatccctttaaaaaaaaaaaccgaaggaaaatttaaaaaaaaagcaaaaaaaaaaaatacaaatctaatggtgcttttacctccaatatgttaactacattaaatgctaattaattattttctgttatcaaagcacataactcaaatgaaatcatggtatctgttaattttataagctagaaatcactataatgaattatgccaattctggaaaattttacacatgtatggcaacaccagatctatcggttttcaaacgcctcgtcgtaaccagacattgtccagaagtttcaaagacccttcgcaaaccctgaatcggctacgggaaatatatcagatcgataaggacataactgtgtgagccattcagatcaaagtacttgttaggaaaataaacaaacaaacaaaaacaaaatgttcacacacacacacaccccaaatgtcttgtatcttatgtttaaggaaaaagaaaagacaaaacggcacgagggtctgaccaccatgacaacctacagcaacaaggaccaaagctgagagaggcgtctcattcactcgtgaccttctggtggcaccgagcaggctgctctcttgcacagatggttg

SEQ ID NO: 1418 - protein, 509 aa, Rattus norvegicus
  ref <308>: DATABASE ACCESSION NUMBER: Refseq / NP_037120
  ref <309>: DATABASE ENTRY DATE: 2002-11-14
MYSPLCLTQDEFHPFIEALLPHVRAFAYTWFNLQARKRKYFKKHEKRMSKEEERAVKDELLSEKPEVKQKWASRLLAKLRKDIRPEYREDFVLTVTGKKPPCCVLSNPDQKGKMRRIDCLRQADKVWRLDLVMVILFKGIPLESTDGERLVKSPQCSNPGLCVQPHHIGVSVKELDLYLAYFVHAADSSQSESPSQPSDADIKDQPENGHLGFQDSFVTSGVFSVTELVRVSQTPIAAGTGPNFSLSDLESSSYYSMSPGAMRRSLPSTSSTSSTKRLKSVEDEMDSPGEEPFYTGQGRSPGSGSQSSGWHEVEPGMPSPTTLKKSEKSGFSSPSPSQTSSLGTAFTQHHRPVITGPRASPHATPSTLHFPTSPIIQQPGPYFSHPAIRYHPQETLKEFVQLVCPDAGQQAGQVGFLNPNGSSQGKVHNPFLPTPMLPPPPPPPMARPVPLPMPDTKPPTTSTEGGAASPTSPTYSTPSTSPANRFVSVGPRDPSFVNIPQQTQSWYLG

SEQ ID NO: 1419 - DNA, 3004 bp, Rattus norvegicus
  ref <308>: DATABASE ACCESSION NUMBER: Refseq / NM_138833
  ref <309>: DATABASE ENTRY DATE: 2003-01-13
caactactggtaacagagtgatctgtcatgcagttttgcaaggtatccattatgatgttgacaataaaggccttatctccagcagatatgctcatatgagaagacccacttcaagcactttttaagtatttccccttcattgaaccagcatggcagggttcaagcgaggctatgatggaaaaattgctggattgtatgatctggataaaaccttgggtcgaggtcacttcgcagtggtcaaactggccaggcatgtcttcacaggtgagaaggtggcagtgaaagtcattgacaagacaaagctggacactctagccactggtcacctcttccaggaagtcaggtgcatgaagctagtgcagcaccccaacatcgtgcgtctctatgaggtcatagacacccagaccaaactgtatctcattctagaacttggagatggaggagatatgtttgactacataatgaagcacgaggagggtcttaatgaagacttggcaaagaagtactttgctcagatagttcacgctatatcctattgccataaactccatgtggttcacagagacttgaaaccagagaatgtagtcttttttgaaaaacaaggtcttgtgaagttgacagactttggcttcagcaacaagtttcagcctggaaagaagctcactacaagctgtggatctcttgcgtactctgctccggaaatcctgcttggcgatgagtacgatgcccctgcagtagacatatggagcctgggtgtgatccttttcatgctggtgtgtgggcagccgcccttccaagaagccaacgacagtgagacgctgaccatgatcatggactgcaagtacactgtgccgccccgtgtgtctgcagggtgcagggacctcatcacacggatgctgcagagagaccccaaaaggagagcctctctggaagagattgaaagccacccttggctccagggagtggacccctcaccagccaccaagtataacattcccctcgtgtcctacaagaacctctcggaagaggagcacaatagcatcatccagcgcatggtgcttggggacatcgcagatcgagatgccatcgtagaagccctggaaaccaacaggtacaaccacatcaccgccacttacttcttacttgctgaaaggatcctgcgagaaaagcaagagaaagaaatacagaccaggtctgcaagccccagcaacatcaaggcccagttcaggcagtcgtggccaactaaaattgatgttccccaagaccttgaagatgatctcactgccacccctctgtcacatgccacagtcccgcagtctcctgctcgggctggtgacagtgtcctcaatggccacaggagcaaaggcctgtgtgaccctgccaagaaagatgagctcccggagctggcggggccagcactgtccactgttccacccgcaagcctgaagcccgcagccagtgggcggaagtgtctcttcagggtggaagaagatgaagaggaagatgaggaggacaagaagcctgtgtccctgtccacgcaggtggtgctgcgccggaagccatcagtcaccaaccgcctgacatctcgaaagagtgccccggtgctcaatcagatcttcgaggaaggcgagtctgacgacgagtttgacatggacgagaacctaccacccaagctgagccggctgaagatgaacatcgcgtcaccaggcacagtgcacaagcgctaccaccgcaggaaaagccagggccgtggctcgagctgcagcagctctgagaccagcgatgatgactctgagagccgccggcggctggacaaggacagtggcttggcttactcgtggcaccggcgtgacagcagtgaggggccaccaggcagtgagggcgatggtggcggtcagagcaaacctagcggcggtggtggtgtggacaaggcgagtccaggagagcagggcacgggcggcagtggccagggaggctcaggtgggaccccatcgggtacagcaggttcctccaggcgctgtgcaggccctgactcctcctcatcctcccccgcctctgccgctccacgtggtgcagagcttgtgcagagcctcaaactcgtgagcctgtgtctaggctcgcagctccatggcgccaagtacattctggacccgcagaaggccttgttgtccagcgtgaaggtgcaggagaggtccacttggaagatgtgcatcagtgccccaggccccggcccctctgctgaccttgaccctgtgaggaccaagaagctgaggaacaacgtgctccagctacctctgtgcgagaagaccatctccgtgaacatccaacgcagccgcaaggaagggctgctctgcgcctccagccccgccagctgctgccacgtcatctgagctgtagcgtgctcacttcatctgttctgacgtgacaatgcatggtctttgtgcatgctgctacacgctacttttcttttccagccgaaaagtctactgtgtgattttacattcatgattttcagtgtggatgaccaggatgaagttgtgtatctggaacccaacgtaatggagcgcttagaaattcatgttctgcacttaacctggagggaaatgctctcgtttccttgtgaaaagcccaaattcctgtcctgacctccggtgatagggaaactcgatgctctgaggcccactggtgcccgagacagaaccaaagcaataacgtggtgatgcgatgcccacaggccagccgcccggggcctgtgcaccgagaaccttagagccacagtctgagcgcccacacctgtttgtcttaaatgactgtgaacgcagttggggctctcatatcttcattgacagaagtgttcttgtttgtagtaggtgagatcagctacttagtttgtgaggcagcttaccccatagaattacaaggagacaatcttttgtgaggcgatgaggtgaactcaagtcttaactctatttagagtgtgtatgtctgtctgacagaacaaaaa

SEQ ID NO: 1420 - protein, 746 aa, Rattus norvegicus
  ref <308>: DATABASE ACCESSION NUMBER: Refseq / NP_620188
  ref <309>: DATABASE ENTRY DATE: 2003-01-13
MAGFKRGYDGKIAGLYDLDKTLGRGHFAVVKLARHVFTGEKVAVKVIDKTKLDTLATGHLFQEVRCMKLVQHPNIVRLYEVIDTQTKLYLILELGDGGDMFDYIMKHEEGLNEDLAKKYFAQIVHAISYCHKLHVVHRDLKPENVVFFEKQGLVKLTDFGFSNKFQPGKKLTTSCGSLAYSAPEILLGDEYDAPAVDIWSLGVILFMLVCGQPPFQEANDSETLTMIMDCKYTVPPRVSAGCRDLITRMLQRDPKRRASLEEIESHPWLQGVDPSPATKYNIPLVSYKNLSEEEHNSIIQRMVLGDIADRDAIVEALETNRYNHITATYFLLAERILREKQEKEIQTRSASPSNIKAQFRQSWPTKIDVPQDLEDDLTATPLSHATVPQSPARAGDSVLNGHRSKGLCDPAKKDELPELAGPALSTVPPASLKPAASGRKCLFRVEEDEEEDEEDKKPVSLSTQVVLRRKPSVTNRLTSRKSAPVLNQIFEEGESDDEFDMDENLPPKLSRLKMNIASPGTVHKRYHRRKSQGRGSSCSSSETSDDDSESRRRLDKDSGLAYSWHRRDSSEGPPGSEGDGGGQSKPSGGGGVDKASPGEQGTGGSGQGGSGGTPSGTAGSSRRCAGPDSSSSSPASAAPRGAELVQSLKLVSLCLGSQLHGAKYILDPQKALLSSVKVQERSTWKMCISAPGPGPSADLDPVRTKKLRNNVLQLPLCEKTISVNIQRSRKEGLLCASSPASCCHVI

SEQ ID NO: 1421 - DNA, 5519 bp, Homo sapiens
  ref <308>: DATABASE ACCESSION NUMBER: Refseq / NM_017719
  ref <309>: DATABASE ENTRY DATE: 2002-12-23
aagtactgactgttcaaagctcaggcaaaccatgcagatccacgtgttgttggaggaggcgctcccttcaggagaccacagagggggagtgactgtggctgaccatgtgggcagaggggctggcgggctggcccctgcgagaggcggactcagggctgctggatgctccgtccttggccgctttgatctggagccacgtgtcacccagagctttggcaaagtggtcgtccacggagcccgtgatggacacggagttgggtgccggctcgggctccttgtaattcttgcccaggctcctgcggaaatgctcctccaccacggggtcacaggtggtggcagcgctcggtggcctccggtagctggcaggcccgggcgcggcctcgtgccgaattcggcacgagggggtttcggcggccgggagggagttgtcggcgccgcggccgctgcggacggacgctcgcctgccggctgaggaaaaagaagcaactaacaaaacactgtgataataaggattattcagtatgcagtttgcaggatatccatgacgacattgaaaatgaattttttgtattcaccagatattcttatatgagaagatctattttaaacagtctaaatattttttcttctgttggaccagcatggcaggatttaagcgagggtatgatggaaagattgctggattatatgatctggataaaaccttgggtcgaggccattttgccgtggttaaacttgccaggcatgtctttacgggtgaaaaggtggcagtaaaagttattgacaagacaaaactggacactctagctactggtcatcttttccaggaagtgagatgcatgaaactagtgcagcatcctaacatcgtccgcctttatgaagttattgacacccagaccaaactatatcttattctagaacttggggatgaaggagatatgtttgattatataatgaaacatgaggagggtcttaatgaagacttgcccaagaagtattttgctcagatagttcatgctatatcttattgccataaactccatgtggttcacagagacttaaaaccagagaatgtagtcttctttgaaaaacaaggtcttgtaaagttgacagactttgggttcagcaacaaatttcaaccagggaagaagctcactacaagctgtggatctcttgcatattccgctccagaaattctgcttggtgatgagtatgatgcacctgcagtagatatttggagtctgggagtgatccttttcatgttggtgtgtgggcagccgccctttcaagaagccaatgacagtgaaacactgacaatgatcatggattgcaaatatacagtaccatcccatgtgtctaaagagtgtaaagacctaatcacacggatgctacagagagatcccaagagaagggcttctttagaagagattgaaaatcatccttggcttcagggagtggacccttcaccagctacaaagtataacattccccttgtgtcatacaaaaatctctcggaagaggagcacaacagcatcattcagcgcatggtgcttggggacatagcggatcgagacgccattgtagaagccctggaaaccaacaggtataaccatatcacagccacatacttcctgctggctgaaaggatcctgagagaaaagcaagagaaagaaatacagaccagatctgcaagcccgagcaatatcaaggcccagtttaggcagtcatggccaaccaaaattgatgtaccccaggaccttgaggatgacctcacggccactcctttgtcccacgcgactgtccctcagtctcctgctcgggctgctgacagtgtcctcaatggccacaggagcaaaggcctgtgtgactcagctaagaaagatgacctccctgagttggctggaccagcactctctacggtgccacccgcaagcttaaaacccacagccagtgggcggaagtgtctgttcagggtggaagaagatgaagaggaagatgaggaggacaagaaacccatgtccctctcaacacaagtggttttgcgccggaagccatctgtaaccaaccgcctgacatccaggaagagtgcgcccgtcctcaaccagatctttgaggaaggggaatctgatgatgagtttgacatggatgagaatctgcctcccaagttgagcaggttaaagatgaatatagcttctccaggtacagttcacaaacgctaccaccggaggaaaagtcagggccggggctccagctgcagtagttcggagaccagtgatgatgattctgaaagccggcggcggctcgataaagatagcgggttcacctactcctggcaccgacgggatagcagcgaggggccccctggcagtgagggggatggcgggggccagagcaagccgagcaatgccagtggaggggtggacaaggccagccccagtgagaacaatgctggtgggggcagtccctccagcggctcgggtggcaaccccaccaatacatcgggtaccacacgccgctgtgccggccccagcaactccatgcagctggcctctcgcagtgctggggagctcgttgagagcctcaaactcatgagcctctgcctcggctcccagcttcatgggagcaccaagtacattattgatccacagaatggcttgtcattttccagtgtgaaagtccaagagaaatctacgtggaaaatgtgcattagctccacagggaatgcagggcaggtccctgcagtgggcggcataaagtttttctctgaccacatggcagataccaccactgaattggaacggataaagagcaagaacctgaaaaataacgtgctgcagctacctctgtgcgaaaagaccatctctgtgaacatccagcggaaccctaaggaggggctgctgtgcgcatccagcccagccagctgttgccatgtcatctgactgtggccccatctggccgctagcacgcttcctgctcagagcagtgaagaccggctcacttcactgttccatttggttttactattttaaagtgggcgttaggagcaattatttattacctttccatttgttcgcctgatgatgtgacaatgcatggtctttgtgcatgctgctagacacttttctttcccagccgaaaagcctattatgtaatttttacattcataattttaatgtggatgatcaggattaaatcaagatatatatctggaacctcttataaatggagcacttagaaatttgttgttctgcacttaacctagagagagaaaaaatgcttttctttgtgaaaaatctgaattcctgtcctgaccttctgtgatgtggaaaccctaggctctgagacacactctctggtgtctgagacagaaccaaagcaataacgttgtgatgcccacaggcctggagccagctagcgaccttgtgccgcccagctgtccatggcccgtgcagagcagaggacagtgagtgtctgcactgagaaccttaaaccacagttgaacatacccacacctgtttgtcttaagctatagtgtaaaaacaaagtttgggctctgaaaatttaactgaaaaagatttccttgtttttgtaataggtgagataaagtacttagatttataaggcagcttcccctgtagtgataaattacaagcagacaatcttattttgtaatgtgatgaagtgatgatgtcttaactctacttagagagtgtatgtctgtctaacagaacaaaaagatgctctgtgtaaattccttcctgtagggcacactgcaggatttccatgtagatagaagaactatagggcctagtacagaaggtgcacacaaatgttggcaaagtcaaaccccatgaattaaaacctactggaatttggtttttaggagtttggtaattagattatctcttttgttattttcattcagttatatcctttggctcagctagctttgaaattggctgatgaaaaaatatacataaaagggtaaaattcacacatacagcaaacaaaaatgcacaaagcctgcttcgtaacttttttttctggaattgtttttcactttgcctttttctgccaaaacaataatcaaagaactcttgctttaacctattcctgtacaaagactgtttttgaccagataatcatctgttgtggcattctatcttgtaggacactgtatattgcaaattgctgattatggaaggggccagttgctgttttttcatgcagtgccctgggagtcttaaaagcagtgcttagcaacattggtgatagcatgtggctgggacccagggcccttccccactcttcagccccgagtcatgtgtctgaggtgacggactgagacgcatctggtcctgtaattcagagagtgggcacatcaccaaagaactgcattgctgtggtcactgtttcttcaagtacacactgactctgctactttaggataaatatattttactcagaactctgaatttcacagtatacttactaaactaagtaaaaatgatacttaaaatacttattttactttctagacctaggctagatgttttaagctacagctctagttcattgtgatatttataatttgaaagctatgagaatagatgtgtgggtgaagccatagaacatatttgcttgaaattcttgagcagggatcttataaagggccagaaataagatgtgtggttcacatagatagtgagcgtaacatctgtattaaacataggagagaagtttataaagggcattggcaataaactctttgttgcagctgttttccaagcagtgtaaatactttttcctgtgattatgtatagccttggaatggcaccttttaactaacccatatgtgtttggtttcaatggttttttatattcagatgtatatatggtgctcactttaggatcagcagtgttgaccatttatgctgcatagctgtattatagccttattagttgtgtggttgacccttggggtatacaaatgtcagtctgagtggtgtcttactcctttgtttataagtgaatgattgtgcatgttttgtatgtcatagtatgtcgtcacataaaagggagggagcgaaaaaccattacattaagataatattggaccaaactacttacttgctctaaacagttacttgtaccccttaacctgtcttcaaaagttgcatatagttacagtagtgtataaattaaatattgtggaaaaacagtcttgtatttttctgtatgtgtgtatatatatataattatgtacttctggcaattctatctgtatttaaagatgtgacaatcttgacaccaattttaagaatagctgtgagaccgaattaaagataatccctaccaagtgaaaattgatgtgtgttaagagggtacagaattatcaactgatttggtcagttgcttccaatgctggttgatttccctcattgtgtaaacattgacaggtatgtgacaaatgggaaaaaaaatccaaataataaagtgacatattggtgttcagcaat

SEQ ID NO: 1422 - protein, 765 aa, Homo sapiens
  ref <308>: DATABASE ACCESSION NUMBER: Refseq / NP_060189
  ref <309>: DATABASE ENTRY DATE: 2002-12-23
MAGFKRGYDGKIAGLYDLDKTLGRGHFAVVKLARHVFTGEKVAVKVIDKTKLDTLATGHLFQEVRCMKLVQHPNIVRLYEVIDTQTKLYLILELGDEGDMFDYIMKHEEGLNEDLPKKYFAQIVHAISYCHKLHVVHRDLKPENVVFFEKQGLVKLTDFGFSNKFQPGKKLTTSCGSLAYSAPEILLGDEYDAPAVDIWSLGVILFMLVCGQPPFQEANDSETLTMIMDCKYTVPSHVSKECKDLITRMLQRDPKRRASLEEIENHPWLQGVDPSPATKYNIPLVSYKNLSEEEHNSIIQRMVLGDIADRDAIVEALETNRYNHITATYFLLAERILREKQEKEIQTRSASPSNIKAQFRQSWPTKIDVPQDLEDDLTATPLSHATVPQSPARAADSVLNGHRSKGLCDSAKKDDLPELAGPALSTVPPASLKPTASGRKCLFRVEEDEEEDEEDKKPMSLSTQVVLRRKPSVTNRLTSRKSAPVLNQIFEEGESDDEFDMDENLPPKLSRLKMNIASPGTVHKRYHRRKSQGRGSSCSSSETSDDDSESRRRLDKDSGFTYSWHRRDSSEGPPGSEGDGGGQSKPSNASGGVDKASPSENNAGGGSPSSGSGGNPTNTSGTTRRCAGPSNSMQLASRSAGELVESLKLMSLCLGSQLHGSTKYIIDPQNGLSFSSVKVQEKSTWKMCISSTGNAGQVPAVGGIKFFSDHMADTTTELERIKSKNLKNNVLQLPLCEKTISVNIQRNPKEGLLCASSPASCCHVI

SEQ ID NO: 1423 - DNA, 2130 bp, Rattus norvegicus
  ref <308>: DATABASE ACCESSION NUMBER: Refseq / NM_031528
  ref <309>: DATABASE ENTRY DATE: 2003-01-13
gagacctcttcctccaacctgcacaacttcccgcttttcacctgggaccggcggagtgacctgcggacttaggcgcgggcaattctgggctgggcgccccgctgaggggccgcccatcggggcgaagggacttgtccctttgcccctctagccgacttgcacggatggcgccgcggctgagtgacgagagccccggtgcaggacttccccctcctggatcttcggccttcgcggggcaagatgtacgaaagtgtagaagtcggggggcttacccccgcccctaaccccttcctagtggtggacttttataaccagaaccgggcctgtttgctccaggagaaggggctccctgccccgggtccctactccaccccactccggactccgctttggaatggctcaaaccactccatcgagacccagagcagcagttcggaagagatagtgcccagccctccctcaccaccacccctgcctcgaatctacaagccttgctttgtttgtcaagacaagtcatccggctaccactatggggttagcgcctgtgagggctgtaagggcttcttccgacgcagtatccaaaagaacatggtgtatacgtgtcaccgggacaagaactgcatcatcaacaaggtgacccggaaccgctgccagtactgccggctgcagaaatgcttcgaagtgggcatgtccaaggagtcggtgcgaaacgaccgaaacaaaaagaagaaagaaacacccaagcccgagtgctcagagagctacacgctgacaccggaggtgggggaactcatcgagaaggtgcgcaaagccaaccaggagaccttcccggccctctgccagctgggcaagtacactacgaacaacagctcagaacaacgtgtctctctggacattgacctctgggacaagttcagtgaactctccaccaagtgtatcattaagactgtggagttcgccaagcagcttcccggcttcaccaccctcaccattgccgaccagattacccttctcaaggctgcctgcctggacatcctgattctgcgaatctgcacgcggtacacacctgagcaagacacaatgaccttctcagatggactgaccctgaaccggactcagatgcacaacgctggctttggccccctcaccgacttggtctttgccttcgccaaccagctgctgcccctggagatggacgatgctgagaccggactgctcagtgccatctgcctcatctgtggagaccgacaggacctggagcagccagacaaggtggacatgctgcaggagccgctgttggaagcactgaaagtctatgtccggaaacggaggcccagccagccccacatgttccccaagatgctgatgaagatcacggaccttcggagtatcagcgccaagggagctgaacgggtgatcacattgaagatggagatccctggttccatgccaccacttatccaggaaatgttggagaactctgagggcttggacactctaagcggacagtcggggggcggaacacgagatgggggtggcctggcccctcctccgggtagctgtagccccagcctcagtcccagctcccacagaagcagcccagccactcaatccccatgaccacctcgacacatggacagccctcacccctgccctggctttctctgccttcctactggccatgtgacctatcagcccagccctgcttgtccttccggacagaactggggaccttccaggggggacaggagggagaaggcagtgactctgtggacagaggcctggaccctgagatggactgctctctcctggcagcctgggctggcatcaggggccaggcattgagccacgtgaggacctgggcctgagccctcacccagcttgccatgtcttcatcaccagcaaacaccagggcctggctccctgtcctccgaactcaagccatcaccccccagttggggaacttccccctgcttcggatggtgacagaagatgcccagggtgggggagaccccctgtacatatcctgcgtaccaacccccagatattaattctcgatggttttgtttttattttaattttttttgttttgtttttttttaataagaattttcattttaagcacattta

SEQ ID NO: 1424 - protein, 459 aa, Rattus norvegicus
  ref <308>: DATABASE ACCESSION NUMBER: Refseq / NP_113716
  ref <309>: DATABASE ENTRY DATE: 2003-01-13
MYESVEVGGLTPAPNPFLVVDFYNQNRACLLQEKGLPAPGPYSTPLRTPLWNGSNHSIETQSSSSEEIVPSPPSPPPLPRIYKPCFVCQDKSSGYHYGVSACEGCKGFFRRSIQKNMVYTCHRDKNCIINKVTRNRCQYCRLQKCFEVGMSKESVRNDRNKKKKETPKPECSESYTLTPEVGELIEKVRKANQETFPALCQLGKYTTNNSSEQRVSLDIDLWDKFSELSTKCIIKTVEFAKQLPGFTTLTIADQITLLKAACLDILILRICTRYTPEQDTMTFSDGLTLNRTQMHNAGFGPLTDLVFAFANQLLPLEMDDAETGLLSAICLICGDRQDLEQPDKVDMLQEPLLEALKVYVRKRRPSQPHMFPKMLMKITDLRSISAKGAERVITLKMEIPGSMPPLIQEMLENSEGLDTLSGQSGGGTRDGGGLAPPPGSCSPSLSPSSHRSSPATQSP

SEQ ID NO: 1425 - DNA, 1376 bp, Rattus norvegicus
  ref <308>: DATABASE ACCESSION NUMBER: Refseq / NM_133283
  ref <309>: DATABASE ENTRY DATE: 2003-01-13
gggggtgccgcgccggccgcagagccctgatgctggcccggaggaagccggtgttaccggcactcaccatcaaccctaccatcgctgagggcccgtcccccaccagcgagggcgcctccgaggcacacctggtggacctccagaagaagttggaagagctggacctggatgaacagcagaggaagcggctggaggccttccttacccagaaggccaaggttggtgagctcaaggacgacgactttgagagaatctcagaactgggtgcaggcaatggcggcgtggtcacaaaggcccggcataggccctctggcctcatcatggccagaaagctgatccacctggagatcaagccagctgtccgcaaccagatcatccgggagctgcaggtgctgcatgagtgcaactcaccgtacatcgtgggcttttatggggccttctacagcgacggcgagatcagcatctgcatggagcacatggacggtggctcactggaccaggtactgaaggaggccaagcgcattcccgaggacatcttagggaaggtcagcattgcggtgctccggggcctggcgtacctccgcgagaagcaccagatcatgcatagagatgtgaagccctccaacattctggtgaactctcgtggagagattaagctgtgcgacttcggagtgagcggccagttgattgactccatggccaactcatttgtagggacacgctcctacatgtccccagaacggctgcagggcacccactactctgtgcagtcggacatctggagcatggggctgtcgctggtggagctggccatcgggaggtaccccatccccccacctgatgccaaggaactagaggccagctttggccggcctgtggtggacggggcagatggagagccccatagtgtctcaccgcggccccggccccctggacgccccatcagtggtcatgggatggacagccgaccagccatggccatctttgagctgctggactacatagtgaatgagccacctcccaagctgcccagtggtgtgttcagctcagacttccaggagtttgtgaataaatgtctcattaagaacccagcagagcgtgcagacctcaagctgctgacgaaccatgccttcatcaaacgctctgagggggaggacgtggacttcgctggctggctatgcagaaccctgcggctgaagcagcccagcacacccacgcgtactgcagtgtgacagccatcgctcagcagtctgtgtccttgtcctgtggcacagcggccgcctttggggacagcagtggtgtgtgttgtggcaggggacctgtgcctgtgcatttggaaaagcaaacaaagtggagaaagagagaaaaaaaaaaaa

SEQ ID NO: 1426 - protein, 400 aa, Rattus norvegicus
  ref <308>: DATABASE ACCESSION NUMBER: Refseq / NP_579817
  ref <309>: DATABASE ENTRY DATE: 2003-01-13
MLARRKPVLPALTINPTIAEGPSPTSEGASEAHLVDLQKKLEELDLDEQQRKRLEAFLTQKAKVGELKDDDFERISELGAGNGGVVTKARHRPSGLIMARKLIHLEIKPAVRNQIIRELQVLHECNSPYIVGFYGAFYSDGEISICMEHMDGGSLDQVLKEAKRIPEDILGKVSIAVLRGLAYLREKHQIMHRDVKPSNILVNSRGEIKLCDFGVSGQLIDSMANSFVGTRSYMSPERLQGTHYSVQSDIWSMGLSLVELAIGRYPIPPPDAKELEASFGRPVVDGADGEPHSVSPRPRPPGRPISGHGMDSRPAMAIFELLDYIVNEPPPKLPSGVFSSDFQEFVNKCLIKNPAERADLKLLTNHAFIKRSEGEDVDFAGWLCRTLRLKQPSTPTRTAV

SEQ ID NO: 1427 - DNA, 2629 bp, Rattus norvegicus
  ref <308>: DATABASE ACCESSION NUMBER: Refseq / NM_031830
  ref <309>: DATABASE ENTRY DATE: 2003-01-13
tggggcgcggccggtgctgcggacccgccacagccctccaggtcgctgcggacccaaggcctgcttgcctgccagcggcaccatgggcaattgccacacggtgggccccaacgaggcactggtggtctcagggggctgttgtggttctgactacaagcagtatgtgtttggcggctgggcttgggcctggtggtgtatctcggacactcagagactgtctctggaggttatgaccatcctgtgtcgctgtgagaatattgagacgtcggagggggtcccgctattcgtaacaggggttgcacaggtgaagatcatgacggagaaggagctcctggctgtagcctgtgaacagttcctgggcaagaacgtgcaggacattaagaacgtcgtactgcagaccctggaggggcatctacgctccatccttgggactctgactgtggagcagatttatcaggaccgagaccagtttgccaagctggtgcgggaagtggcagcccctgatgttggccgtatgggcatcgagatcctcagcttcaccatcaaggatgtctatgacaaagtagactatctgagctccctgggcaagacacagactgccgtggtacagagagatgcagacatcggtgtggcagaggcagagcgggacgcaggcatccgggaagccgagtgcaagaaggaaatgctagatgtgaagttcatggcagacaccaagattgctgactccaagagagcctttgagctgcaaaagtcagccttcagtgaggaggtcaacatcaagacagctgaggcccagttggcctatgagctacaaggggccagagagcaacagaagatccggcaggaagagattgagattgaggtagtacagcgcaagaagcagatcgccgtggaggcgcaggagatcctgcgcacagacaaggagctcatcgccacagtgcgccgccctgcagaggcagaggcccaccgcatccagcagattgctgaaggcgaaaaggtgaaacaagtcctcttggcacaagcagaagctgagaagattcgcaaaatcggggaggcagaggcagcagtcattgaggccatgggcaaggccgaggccgagcggatgaagcttaaagctgaggcctaccagaagtacggggatgcggccaagatggccctggtgctggaggccctgccccagattgctgccaagatctccgcacccctgactaaagtcgatgagattgtggttctcagtggggacaacagcaaggtgacatcagaagtgaaccggctgctagcagaactgcctgcttctgttcatgccctcactggtgtggacctctcaaagataccactgatcaagaatgccactggtgcgcaggtgtgaggctcctggcactcggcctccagcagctgcctgcccttctagcgcctgttttcaagtcatggggacagcgagaacattactgactctggtgccttatttcgtagggaccagaagtgctgcgagttcaggccatctctggctatcttcccttctctcctgtctgccttctcttttttttccacaccttcacgttaactgccacatccatctagcctgtctcctcatctgccatatgtgcctcttcctctggctctgtttttctcccttctcccaacttcacacacatcatctactttaactgaagttgaacttgtttatgataatcactgtctgtctgtctgtctgtctgtctgtctgtctgtctgtctgtgaggagtggccccgctgcttctcaaaattctggtgccttcaagttctacatgtatctgtctgtcctcgctggccctggcagagcccagcatgggtacaagggttctgcgtaggacacccactctcctctctcctggtctgaatctccaagcgctaaatgctgttccaggaagcccacatctcacacagtcttgccctttgaggcctaagtggccatggcctattggccgtagcataatgcccttcccacaccgaggcccgggcctgctgtcatacctgcccctgtcccctgcaccatagaggcacagaagcacggcctcctgtctgtagcagcttcctcagtgtactactgccttaggaggccctgcttgtgctcagggacatcccttccgttggcttgtccttgattggtgggtgggtcttaatctgatcccactaagtctttctgggtcactatctagctctgttgggacaggtaaagtttataggccttcttcctgctagtgaatggggctctcccagggggcaaggctgtgccaaccgtaagagaatcaagtgctgaagactggccaaacttcactccctctatgccattttcttcttggtcagcataatgggtttctagccatgggaagcagctaagtgttctgtgtctttgcacctgcaccactggtggcagaagaacccagtgcccaggtgtcctagtaagggtgcaagggtgtctgtcccatgggcccagtccccagccctggcctgccccggcctgtgtagctgtgctgcatgtgaatgctgcatgtctggtctggggtttggatattgcactgccccactgcctgtcccccgctggtgacaataaagatctcttatagccacaaaaaaaaaaaaaaaaaa

SEQ ID NO: 1428 - protein, 428 aa, Rattus norvegicus
  ref <308>: DATABASE ACCESSION NUMBER: Refseq / NP_114018
  ref <309>: DATABASE ENTRY DATE: 2003-01-13
MGNCHTVGPNEALVVSGGCCGSDYKQYVFGGWAWAWWCISDTQRLSLEVMTILCRCENIETSEGVPLFVTGVAQVKIMTEKELLAVACEQFLGKNVQDIKNVVLQTLEGHLRSILGTLTVEQIYQDRDQFAKLVREVAAPDVGRMGIEILSFTIKDVYDKVDYLSSLGKTQTAVVQRDADIGVAEAERDAGIREAECKKEMLDVKFMADTKIADSKRAFELQKSAFSEEVNIKTAEAQLAYELQGAREQQKIRQEEIEIEVVQRKKQIAVEAQEILRTDKELIATVRRPAEAEAHRIQQIAEGEKVKQVLLAQAEAEKIRKIGEAEAAVIEAMGKAEAERMKLKAEAYQKYGDAAKMALVLEALPQIAAKISAPLTKVDEIVVLSGDNSKVTSEVNRLLAELPASVHALTGVDLSKIPLIKNATGAQV

SEQ ID NO: 1429 - DNA, 247 bp, Rattus norvegicus
  ref <308>: DATABASE ACCESSION NUMBER: EMBL / M32783
  ref <309>: DATABASE ENTRY DATE: 2000-03-04
ttgtccactccagatacacttcaccatcttgtccttctctctctccaacagaagggtgatacagaatggcgtggtccaggctgatgctggcagcttgcctccttgtgatcccctctgaggttgcagcggactgcctgtccttgtgttccctgtgtgcagtgaggacgcaggatgggccccatcccatcaaccccctggtaggtttcagcaagacttctccatgttattctatttctgagtggagccc

SEQ ID NO: 1430 - DNA, 1454 bp, Rattus norvegicus
  ref <308>: DATABASE ACCESSION NUMBER: Refseq / NM_078623
  ref <309>: DATABASE ENTRY DATE: 2003-01-13
gtctctccgccatggcggccctgcgtgctctgctgcccagagcctgcaactcgctgttgtccccagttcgctgcccagaattccggcgcttcgcctcgggtgctaactttcagtacatcatcacggaaaagaaaggaaagaatagcagcgtggggctgatccagttgaaccgtcccaaagcactcaatgcactttgcaatggactgattgaggagctcaaccaagcactggagacctttgaggaagatcccgctgtgggcgccattgtgctcactggtggggagaaggcctttgcagccggagctgacatcaaggaaatgcagaaccggacatttcaggactgttactcaggcaagttcctgagccactgggaccatatcacccggatcaagaaaccggtcatcgcggctgtcaatggctatgctcttggtgggggctgtgaacttgccatgatgtgcgatatcatctatgctggtgagaaagcccagtttggacagccagaaatcctcctggggaccatcccaggtgcagggggcactcagagactcacccgagcagtcggcaaatcactagcaatggagatggtcctcactggtgaccgaatttcagcacaggatgccaagcaagcaggtcttgtaagcaagatttttcccgttgaaacactggttgaagaggccatccaatgtgcagaaaagatcgccaacaattccaagatcatagtagccatggcgaaagaatctgtgaatgcagcctttgaaatgacgttaacagaaggaaataagctggagaagaagctcttctattccacctttgccactgatgaccggagagaagggatgtctgcctttgtggagaaaaggaaggccaacttcaaagaccactgagagctggcagccatacctttctccaccctggagaggaaagctcagcctgtcagagggtagtagtgtctgccacagttcctaccgaagcttcaaggctgtggccacagcttgggtactcctggtgtggcctgcaaccttcaccagttgttggaagtcggtctctcacagttttctaaatcagaaatctgggaagctttcagggtgtcttgatttgtttaacttcactctaaaggcagggcacgcttgggccagccacttccctgtgcactatctgcagtgcatagctcaagatgtgagcttcaagagggaagtggccctgcctgctgattccaagcacgagaattcaatgaaagtaactccttcggtttagtttcgactcgcctgtagttgtctctctagagggtcaatatgttttttaattattattgctatgattttcttatgggtagggttttgctgtgtatccctggctgcctggaagttactgtatagaccaggttgaccttgaattcacagagatcaaccagcctctgcttcccaagtattgggattaaaggtatatgctaccac

SEQ ID NO: 1431 - protein, 290 aa, Rattus norvegicus
  ref <308>: DATABASE ACCESSION NUMBER: Refseq / NP_511178
  ref <309>: DATABASE ENTRY DATE: 2003-01-13
MAALRALLPRACNSLLSPVRCPEFRRFASGANFQYIITEKKGKNSSVGLIQLNRPKALNALCNGLIEELNQALETFEEDPAVGAIVLTGGEKAFAAGADIKEMQNRTFQDCYSGKFLSHWDHITRIKKPVIAAVNGYALGGGCELAMMCDIIYAGEKAQFGQPEILLGTIPGAGGTQRLTRAVGKSLAMEMVLTGDRISAQDAKQAGLVSKIFPVETLVEEAIQCAEKIANNSKIIVAMAKESVNAAFEMTLTEGNKLEKKLFYSTFATDDRREGMSAFVEKRKANFKDH

SEQ ID NO: 1432 - DNA, 414 bp, Rattus norvegicus
  ref <308>: DATABASE ACCESSION NUMBER: EMBL / AA893194
  ref <309>: DATABASE ENTRY DATE: 2000-03-03
ggcacgaggctgtcctgaagatggcgggcagctggaggctagcgatgcgcttgctttctgggtgcggctgggtgcgcggctcggactctgcggtgctgagccgcctgcgtgatgaggccgtagtgcatccaggcttcctgagccaggaggaagaggacacgctgacacgcgaactggagccccagctgcggcgccggcgctacgagtacgaccactgggactcggggttcagcccgatatgacttctcccatgagatccttagagatgaagaatcattttttggggcacaccgggtcccccggggccgacgcatctcagtgatttgccgctccctcccagaggggatggggccaggaaggccagaagagccacctccagcctgctaacctctccacatatcctctagacttgtg

SEQ ID NO: 1433 - DNA, 944 bp, Rattus norvegicus
  ref <308>: DATABASE ACCESSION NUMBER: EMBL / AB006450
  ref <309>: DATABASE ENTRY DATE: 1997-08-21
caagatggaggagtacgcgagagagccgtgcccctggagaattgtggatgactgtggcggtgcctttaccatgggtaccataggtggtggcatcttccaggccttcaaaggttttcgaaattctccagtgggagtaaaccacagactccgagggagtttaacagctattaaaaccagggccccacaattgggaggtagctttgcagtttggggaggcctgttttccacgattgactgtggtatggttcagataagaggcaaagaagacccctggaactccatcactagcggtgccttaacaggagccatcctggcagcaagaaatggaccggtagccatggttgggtcagctgcgatgggcggcattctcctagctttaattgaaggagctggtatcctgttgaccaggtttgcctctgcacagtttcctaatggccctcagtttgctgaagaccactcccagttgccttcaagccagttgccgtcctcaccatttggagactaccgacagtatcagtaggacttggtccccgggattcctggacctgggtggactgcagtttggtagggtttcagaagatcaagttacagtctgttgaaagccttaggtgggacaccggcggccaagcaggccatcaagagacatttagcacatttttctatttaaaagagactcagagtgtggaaaagataccgagtttatttattcatgcttggattgcgtctgtgatcaaaataaatgtctaataccatttaaagaatgtatatgaacttagaagataaaggaccaaaggccacataacagtgaaattcgactgtccttccttcgggacttttttgcctggtgtttatgtacagttgttcagacaataaaaggcttttgggacttgacctttccaaaaaaaaaaaaaaaaaaaaaaaaaaaagcggccgctgaattctag

SEQ ID NO: 1434 - protein, 172 aa, Rattus norvegicus
  misc_feature (1)..(172): Xaa=Unknown amino acid
MEEYAREPCPWRIVDDCGGAFTMGTIGGGIFQAFKGFRNSPVGVNHRLRGSLTAIKTRAPQLGGSFAVWGGLFSTIDCGMVQIRGKEDPWNSITSGALTGAILAARNGPVAMVGSAAMGGILLALIEGAGILLTRFASAQFPNGPQFAEDHSQLPSSQLPSSPFGDYRQYQX

SEQ ID NO: 1435 - DNA, 1645 bp, Homo sapiens
  ref <308>: DATABASE ACCESSION NUMBER: Refseq / NM_006335
  ref <309>: DATABASE ENTRY DATE: 2002-01-16
agtcaagatggaggagtacgcgcgagagccttgcccatggcgaattgtggatgactgtggtggggcctttacgatgggtaccattggtggtggtatctttcaagcaatcaaaggttttcgcaattctccagtgggagtaaaccacagactacgagggagtttgacagctattaaaaccagggctccacagttaggaggtagctttgcagtttggggagggctgttttccatgattgactgtagtatggttcaagtcagaggaaaggaagatccctggaactccatcacaagtggtgccttaacgggagccatactggcagcaagaaatggaccagtggccatggttgggtcagccgcaatgggtggcattctcctagctttaattgaaggagctggtatcttgttgacaagatttgcctctgcacagtttcccaatggtcctcagtttgcagaagacccctcccagttgccttcaactcagttaccttcctcaccttttggagactatcgacaatatcagtaggacttctttcctaggatttctttaacagaacgagttgtggttcgagaaggatttcagaagatcaagttacagtctgtttttaaaaccataggtgggacagctatggccaataggctataaagagacatttagcacttttttctatttaaaggaacaagcggggaagggtgctaaaagataatacgtttatttattcacacttgaattgcatttgtgatcaaaataaatgtttaaatcgctaaaggaaaatacagtaagtgcttgaaagatgaaggaccaaaaggccaaaaaacagtgaaatatgatcatcatctcttgcggacttctctgcctggttttgtgtgttctgttattcaaacaataaaaagctggtggaacttactctttcttttaagataagttgtagacttcgatgtttcatgctcatgtacttcaaataatgcatgttttatagttagtccctcatcacttgaagtgacttctgagaattatgcagagtcaacatggatcatttcacagtgagatgctttatggattgaaggatatggtaaaatgtttatagtttactttgaaagtaaaatatactatgtcttggttttgaggatattggatacaaaactctcttcctttagggctactgagtcttgattcctgatcatcagaaatttcaccagaaacaacttgcttccaatatacccaattctatatgaagaattcatggagagtgtactggcactggaagagtttagtgtttcttgtatgcttgaaaataaagtatgtactgttttgaatgtgttccaagtcctctgcataaacgatgtattttggggtctggttgggcctggaaaatggatgagcacttcagaacaggtcattttcctgatattggaagtgacatgtggccctataggaggcatgatgttagttaattacacatttgcctacatctgtgggaaatggagaacaaagccatgtgggtactgtaaacacacgtttatcttttggcccaatgccatacatatggtaggcatttaattactgattgtgtttggataatttgggaattttcgactgtggtaaaatatacataaaataatacttattaaaaaaaaaaaaaaaaaa

SEQ ID NO: 1436 - protein, 171 aa, Homo sapiens
  ref <308>: DATABASE ACCESSION NUMBER: Refseq / NP_006326
  ref <309>: DATABASE ENTRY DATE: 2002-01-16
MEEYAREPCPWRIVDDCGGAFTMGTIGGGIFQAIKGFRNSPVGVNHRLRGSLTAIKTRAPQLGGSFAVWGGLFSMIDCSMVQVRGKEDPWNSITSGALTGAILAARNGPVAMVGSAAMGGILLALIEGAGILLTRFASAQFPNGPQFAEDPSQLPSTQLPSSPFGDYRQYQ

SEQ ID NO: 1437 - DNA, 1102 bp, Rattus norvegicus
  ref <308>: DATABASE ACCESSION NUMBER: Refseq / NM_019352
  ref <309>: DATABASE ENTRY DATE: 2003-01-14
gcaacgcgggtcttcccgctgttgctgtcggggccacggccgagcacacgaccccggcctgaggtggtggtgggaagcccgccgctgtttgctgcgacctcatggagggtggcggaggaagtagcaacaaatccaccggcgggttagcgggcttcttcggagcgggaggagcgggttactcgaacgctgatttggccggcgtcccgctgactggtatgaaccccctgtctccttacttaaatgtggacccacgctatctcgttcaggatacagatgagtttattttgccaactggagctaataaaacccgaggcaggtttgaactagctttcttcaccattggaggatgctgcatgacaggggctgcattcggggcactgaacgggcttcgtttaggattgaaggaaactcagagcatgccctggtccaaaccaagaaatgtacagattttgaatatggtgactagacaaggggcactttgggctaatactctaggttccctggctttgctctatagtgcttttggcgttatcattgagaaaacacggggtgcagaagacgacttcaacacagtagcagctggaaccatgacaggaatgttatataaatgtacaggtggtcttcgaggaatagcacgtggtggcctggcgggactgacactgaccagtgtctatgcactgtataacaactgggagcacatgaaaggttccctgctccaacagtcactctgaagatgtctgccacctcaggaatgggggacacttcatagtcatccagatcaaggaataagtcagtctggagctgctttctctcttgcacctacaattactttgaacaattggagactctgatttgctgtgacaaagatcatggatgcttagcctggactgcactgcttgccctctgagtggaagccaaacccttggtggctcactgagaatgtgttctcttctcctttggagatgacctcgcacctcctgcccccaaactggaaaaccacttactctccaaatttattaccatgttaattcatttaaaaatctaaaacttaatattgccctgttttccaaataaagggtgaaaatacaaccaaagctaaaag

SEQ ID NO: 1438 - protein, 209 aa, Rattus norvegicus
  ref <308>: DATABASE ACCESSION NUMBER: Refseq / NP_062225
  ref <309>: DATABASE ENTRY DATE: 2003-01-14
MEGGGGSSNKSTGGLAGFFGAGGAGYSNADLAGVPLTGMNPLSPYLNVDPRYLVQDTDEFILPTGANKTRGRFELAFFTIGGCCMTGAAFGALNGLRLGLKETQSMPWSKPRNVQILNMVTRQGALWANTLGSLALLYSAFGVIIEKTRGAEDDFNTVAAGTMTGMLYKCTGGLRGIARGGLAGLTLTSVYALYNNWEHMKGSLLQQSL

SEQ ID NO: 1439 - DNA, 841 bp, Homo sapiens
  misc_feature (1)..(841): n=a, c, g or t
  ref <308>: DATABASE ACCESSION NUMBER: Refseq / NM_006327
  ref <309>: DATABASE ENTRY DATE: 2002-01-16
gaaggtcagcgtgtgaagtaggcgctggcaacgcggggttaccctgntntattgaggagtaacggcccagcggaccacccaggcttgaggcagcggcgggaaccactcggtttgctgcgataccatggaaggaggcgggggaagcggcaacaaaaccacagggggattggccggctttttcggagccggcggagcaggttactcgcacgcggatttggctggcgtcccgctaactggtatgaaccctctgtctccttatttaaatgtggatccacgatacctcgtgcaggatacagatgagtttattttacctaccggagctaataaaacccggggcagatttgagctggccttctttacgattggaggatgttgcatgacaggggctgcgtttggtgcaatgaatggtcttcggctaggattgaaggaaacccagaacatggcctggtccaaaccaagaaatgtacagattttgaatatggtgactaggcaaggggcactttgggctaatactctaggttctctggctttgctctatagtgcatttggtgtcatcattgagaaaacacgaggtgcagaagatgaccttaacacagtagcagctggaaccatgacaggcatgttgtataaatgtacaggtggtcttcgagggatagcacgaggtggtctgacaggactaacacttaccagcctctatgcactatataataactgggagcacatgaaaggctccttgctccaacagtcactctgaagattttgccaactcatgaatggaggacacttcagtagttcatctaggatccttttattaaggacagtttgggagttatttctctct

SEQ ID NO: 1440 - protein, 209 aa, Homo sapiens
  ref <308>: DATABASE ACCESSION NUMBER: Refseq / NP_006318
  ref <309>: DATABASE ENTRY DATE: 2002-01-16
MEGGGGSGNKTTGGLAGFFGAGGAGYSHADLAGVPLTGMNPLSPYLNVDPRYLVQDTDEFILPTGANKTRGRFELAFFTIGGCCMTGAAFGAMNGLRLGLKETQNMAWSKPRNVQILNMVTRQGALWANTLGSLALLYSAFGVIIEKTRGAEDDLNTVAAGTMTGMLYKCTGGLRGIARGGLTGLTLTSLYALYNNWEHMKGSLLQQSL

SEQ ID NO: 1441 - DNA, 3730 bp, Rattus norvegicus
  ref <308>: DATABASE ACCESSION NUMBER: Refseq / NM_053543
  ref <309>: DATABASE ENTRY DATE: 2003-02-21
gaattccggtctgaatgttgtgtgaaaagagaggaaagatgggctcttcaagactcttggacttctagaaagtcagcttttgagcctaatttttggtagatctcattacagcgtgggctctctctctctctctctctctctctctctctctctccatccctcccttcaagccctcccctgcatctcagccggagcctctccgaaccggcgctgatcgatgccgagactccccagggaccctatcgcgactccatcgtgccatatctcgacatcaccgtaccctgtcgagactccattttgtcacaacccctttcaatatttatctattatatatatttttaaaatttgccctatcatatttgggggctgtccccttcatgtcgtgatttcgctgtgatctctccgtgacatcaccgcgccatcgtgaagtgtgatctcatcgctgccctgtcgttcgacttcatcaatgtcgtgttgtgacctggctgcggcgggacagttgggcaaggcgggcatcatggcctcggattgtgagccagctctgaaccaggcagagagccgaaaccccaccctggagcgctacctgggagccctccgtgaggccaagaatgacagcgagcagtttgcagccctgctgctagtaaccaaggcagtcaaagcaggtgacattgacgccaaaactcgacgtaggatctttgatgctgttgggttcacctttcccaaccgactcctgactactaaggaggcccctgatggctgccctgaccacgttctccgggccctgggcgtggccctgctggcctgtttctgcagcgaccctgaactagccagccatccccaggtcctgaacaagatccccatcctttgcacattcctgacagcccgaggggatcctgatgatgctgcccgccgctccatgattgatgacacctaccagtgcctgacagctgttgcaggcacaccccgagggccccgacacctcattgctggtggcacagtgtctgccctgtgccaggcatacctggggcatggctatggctttgaccaggccctggcactcctggtggggctgctggctgctgcagagacacagtgctggaaggaggcagagcccgacctgctggctgtgttgcgaggcctcagcgaggatttccaaagagctgaagatgccagcaagtttgagctctgccagctgctgccccttttcctgcccccaacaactgtgccccctgaatgccaccgggatctgcaggctgggctggcacgcatcctaggaagcaagttgagctcctggcagcgcaatcctgcactgaagctggcagcccgcctggctcatgcctgcggctccgactggatcccagtgggcagctctgggagcaagtttctggccctcctggtgaatctggcctgcgtggaggtgcgactggctctcgaggagacaggcacagaggtgaaagaagacgtggtaactgcctgctatgcccttatggagttggggatccaggagtgtacccgctgtgagcagtccctgctgaaggagccccagaaagttcagctcgtgagcatcatgaaagaggccatcggagctgtcattcactacctgctgcaggtggggccagagaagcagaaagagccctttgtgtttgcctctgtacggatcctgggtgcctggctggcggaggagacctcatccctgcgtaaggaggtgtgccaactgctgcccttccttgtccgatatgccaagacactctatgaggaggctgaggaggccagtgacatttcgcagcaggtggctaacttggccatctctcccactacaccagggcctgcttggccaggggatgctctccggctcctccttcctggctggtgccacctgactgttgaagatggtccccgggagattttgatcaaggaaggagccccctcacttctgtgcaagtacttcctgcagcagtgggaactcacatcccctggccatgatacctcagtgctgccagacagcgtggagatcggcctacagacctgttgccacatcttcctcaacctggtggtcaccgctcccgggctgatcaagcgcgacgcctgcttcacatcccttatgaacaccctgatgacgtcactgccctcactagtgcagcagcaaggaagactgcttctagctgccaacgtggccaccttgggcctcctaatggcccggctccttagcacctctccagctctccaaggaactccggcctcccgaggtttcttcgcagctgccatcctctttctgtcacagtcccatgtggcacgggccacccctggctctgaccaggcggtgttggccctgtcccctgactatgagggcatctgggccgacttgcaagagctctggttcttgggcatgcaggccttcacaggttgtgtccctctgttgccctggctggcccctgccgccctgcgctcccgctggccacaggagctgctacagctgctaggtagtgtaagccccaactctgtcaagcccgagatggtggctgcctaccagggcgtgctcgtggaattggcgcgggcaaaccggctatgccgggaggccatgaggctgcaggcgggtgaagaaacagccagccattaccgcatggctgctttggagcagtgcctgtcagagccctgaggggcatccagtgggtatagacccaggggcgggcagcgagggaaggagggaggaggcatcttccctgaagcccccaaactggaccccttcttcagacccccacaaacaccccagctttctggcttttctgagggctagggcgtgatgcccacctctcaagtataagaaactgcatcctgcctccagcccccttggggcagggattggcttggaacagaggttggccccgccaggccggggaaggttggagaagtccccaggaagagggcaactaagtgtcattatacccagcgtctggctccctgacaggagggaggtcccagggtaggagcgggctggcaggcgcagactgcctcagcccatgtgccctgccggccagggcgtggcctccccaaggctgtggtgccccttctggctcccccaggccaggtccgcgccctttaaattggccgtttggcttttgcttcggtccttttggacagagagcaggctcaggccattgacatcacagttcttcctttcaactctagtgacccggggtccgagttgcccctatgcttccagggcaatttggagcagacagaccagtggggggcggggaacctccttccacctgcgcttccttgaggggaccggagtgcccttggtcccaggtctcttcaccttttgtgtcatgttgcagcagagtgaagatgggggttgggggttatttattttgcttgtccttatctctgcttggacacctgagcatcagctccctgtgcccctgctcccatctggcctggctggagccaggaacaggaggtcacatcaccctagaatccccatgttttccctgtgattgcactccactgccaccgtggtgcctggcttcagttcccctcccccccgtccctgctaagactcttctctgcagggagacgcgactggcggctccagcaggaactacctttctgaacccgtggagacccgcatacacctgaccccttgcttccgcccctccccccagtgcgttctgtgatcgccaagttcaaagctgtgcacatgtggacactcaataaatgtttattggtg

SEQ ID NO: 1442 - protein, 729 aa, Rattus norvegicus
  ref <308>: DATABASE ACCESSION NUMBER: Refseq / NP_445995
  ref <309>: DATABASE ENTRY DATE: 2003-02-21
MSCCDLAAAGQLGKAGIMASDCEPALNQAESRNPTLERYLGALREAKNDSEQFAALLLVTKAVKAGDIDAKTRRRIFDAVGFTFPNRLLTTKEAPDGCPDHVLRALGVALLACFCSDPELASHPQVLNKIPILCTFLTARGDPDDAARRSMIDDTYQCLTAVAGTPRGPRHLIAGGTVSALCQAYLGHGYGFDQALALLVGLLAAAETQCWKEAEPDLLAVLRGLSEDFQRAEDASKFELCQLLPLFLPPTTVPPECHRDLQAGLARILGSKLSSWQRNPALKLAARLAHACGSDWIPVGSSGSKFLALLVNLACVEVRLALEETGTEVKEDVVTACYALMELGIQECTRCEQSLLKEPQKVQLVSIMKEAIGAVIHYLLQVGPEKQKEPFVFASVRILGAWLAEETSSLRKEVCQLLPFLVRYAKTLYEEAEEASDISQQVANLAISPTTPGPAWPGDALRLLLPGWCHLTVEDGPREILIKEGAPSLLCKYFLQQWELTSPGHDTSVLPDSVEIGLQTCCHIFLNLVVTAPGLIKRDACFTSLMNTLMTSLPSLVQQQGRLLLAANVATLGLLMARLLSTSPALQGTPASRGFFAAAILFLSQSHVARATPGSDQAVLALSPDYEGIWADLQELWFLGMQAFTGCVPLLPWLAPAALRSRWPQELLQLLGSVSPNSVKPEMVAAYQGVLVELARANRLCREAMRLQAGEETASHYRMAALEQCLSEP

SEQ ID NO: 1443 - DNA, 1940 bp, Rattus norvegicus
  ref <308>: DATABASE ACCESSION NUMBER: Refseq / NM_019283
  ref <309>: DATABASE ENTRY DATE: 2003-01-13
cacaaccaccaaatatatccacacgttgacgtgatttcttgcccttactcacactaagcccgcgtgtcgatccatctctatggatcccgaacctactgaacactccaccggcggcggctcggttccccgccagccgcccagcgcgcagacggggcttgatgtccaggttgtcagcgcagctggcgactcaggtaccatgagccaggacaccgaagtggacatgaaagatgtggagctgaacgagctggaaccggagaagcagcctatgaatgcagcggacggggcggcagccggggagaagaacggtctggtgaagattaaggtggccgaagacgaggcggaagccggggtcaagttcacaggcttatccaaggaggagctattgaaggtagctggcagcccgggctgggtgcgcacccgctgggcgctgctgctgctcttctggctcggttggctgggtatgctggcgggcgccgtggttatcatcgttcgggcgccacgctgccgtgagctgccggtacagagatggtggcacaagggcgccctctaccgcatcggcgaccttcaggccttcgtaggcccggaagcgagaggcatagctggtctgaagaaccatctggagtacttgagcaccctgaaggtgaagggcctagttttgggcccaattcacaagaaccagaaggatgaagtcaatgaaaccgacttgaaacagattgatcccgatttaggctcccaggaagattttaaagaccttctacaaagtgccaagaaaaagagcattcacatcattttggacctcactcccaactataagggccagaatgcatggttcctccctcctcaggctgacattgtagccaccaaaatgaaggaggctctgagttcttggttgcaggacggtgtggatgggttccaagttcgggatgtgggaaagctggcgaatgcatccttgtacttggctgagtggcagaatatcaccaagaacttcagtgaggacaggcttttgattgcagggaccgcgtcctctgacctgcaacaaattgtcaacatacttgaatccaccagcgatctgctgctgaccagctcatacctgtcacagcccgttttcactggggagcatgcagaactcctagtgattaagtatttgaatgccactggcagccgctggtgcagctggagtgtgtcgcaggcaggactcctgacatcctttataccggctcagtttctccgactctaccagctgctgctcttcactctgccaggaactcctgttttcagctatggggatgagcttggccttcaggcagttgcccttcctggacagcctatggaggctccattcatgctgtggaatgagtctagcaactcccaaacctcaagtcctgtaagcctcaacatgacagtgaagggccaaaatgaagaccccggctccctcctcacccagttccggcgactgagtgacctccgtggtaaggagcgctctctgttacacggtgactttgatgcactgtcttcctcatctggcctcttctcctacgtccgccactgggaccagaatgagcgttacctggtggtgctcaacttccaggatgtgggcctgtcagccagggtaggagcctccaacctccctgctggcataagcctgccagccagtgctaaccttttgcttagtactgacagcacccggctaagccgtgaggagggcacctccctgagcctggaaaacctgagcctgaatccttatgagggcttgttgttacagttcccttttgtggcctgatccctctacacagaacctgccacccttctttcctctctcaggcctttggaattctggtctttctctccttattttgtttttgtttttaaacttttgcagattacatatgaattcttacactgggtgtttttgtcttcaaaataaaaaaaatcacccctgc

SEQ ID NO: 1444 - protein, 527 aa, Rattus norvegicus
  ref <308>: DATABASE ACCESSION NUMBER: Refseq / NP_062156
  ref <309>: DATABASE ENTRY DATE: 2003-01-13
MSQDTEVDMKDVELNELEPEKQPMNAADGAAAGEKNGLVKIKVAEDEAEAGVKFTGLSKEELLKVAGSPGWVRTRWALLLLFWLGWLGMLAGAVVIIVRAPRCRELPVQRWWHKGALYRIGDLQAFVGPEARGIAGLKNHLEYLSTLKVKGLVLGPIHKNQKDEVNETDLKQIDPDLGSQEDFKDLLQSAKKKSIHIILDLTPNYKGQNAWFLPPQADIVATKMKEALSSWLQDGVDGFQVRDVGKLANASLYLAEWQNITKNFSEDRLLIAGTASSDLQQIVNILESTSDLLLTSSYLSQPVFTGEHAELLVIKYLNATGSRWCSWSVSQAGLLTSFIPAQFLRLYQLLLFTLPGTPVFSYGDELGLQAVALPGQPMEAPFMLWNESSNSQTSSPVSLNMTVKGQNEDPGSLLTQFRRLSDLRGKERSLLHGDFDALSSSSGLFSYVRHWDQNERYLVVLNFQDVGLSARVGASNLPAGISLPASANLLLSTDSTRLSREEGTSLSLENLSLNPYEGLLLQFPFVA

SEQ ID NO: 1445 - DNA, 1334 bp, Rattus norvegicus
  ref <308>: DATABASE ACCESSION NUMBER: Refseq / NM_031331
  ref <309>: DATABASE ENTRY DATE: 2003-01-13
gagcgccaggccaatcggaggtgctgttgtttgtcagtcccggagccggtccgcaaaggaaaggtggcaagatggtgttggagagcactatggtttgtgtggacaacagtgagtacatgcggaatggagacttccttcccacccggctgcaggcccagcaggatgctgtcaacattgtatgtcactcaaagacccgaagcaaccctgagaataacgtgggcttgatcacgctggccaatgactgtgaggtgctgaccacactcacccctgacactggccgaatcctctccaagctccacactgtccagcccaaaggcaagatcaccttctgcactggcatccgcgtggcccatctggctctgaagcaccggcagggcaagaatcacaagatgcgcatcatcgccttcgtgggtagccctgtggaggacaacgagaaggatctggtgaaactagctaaacgccttaagaaagaaaaagtgaatgttgacatcatcaattttggggaagaggaggtgaacacagagaagctgacagcctttgtgaacacattaaacggcaaggacggaactggatcacatctagtgacagtgcctcctgggcccagcctggccgatgctctcatcagttctcctattctagctggggaaggcggcgccatgctgggtcttggtgccagtgactttgagtttggagtagatcccagtgctgatcctgaattggccctggcccttcgtgtctctatggaagagcagcggcagcggcaggaggaggaggcacgacgggctgctgcagcctctgcagctgaggctggaattgccacacctgggactgaaggtgaacgagactcagatgatgccctactgaagatgaccatcagccagcaggagtttggccgtgcggggcttcctgacctaagcagcatgacagaggaagagcagattgcctatgccatgcagatgtccctgcagggagcagagtttggccaagcagaatcaggggacatcgatgccagctcagccatggacacatctgagccagtcaaggaggaggatgactatgacgtgatgcaggacccagagttccttcagagcgtcctagagaaccttcccggtgtggatcccaacaatgaagccattcgaaatgcaatgggctctctggcctcccaggccaccaaggatggcaagaaggacaagaaagaggaagagaagaagtgaggccggagggaggggtagccgagtctgccctggggactgtaaggatggggttggataaagacttagatgtgctctgcggccttgacaacggaataaagcttggagttttccctttgcttc

SEQ ID NO: 1446 - protein, 380 aa, Rattus norvegicus
  ref <308>: DATABASE ACCESSION NUMBER: Refseq / NP_112621
  ref <309>: DATABASE ENTRY DATE: 2003-01-13
MVLESTMVCVDNSEYMRNGDFLPTRLQAQQDAVNIVCHSKTRSNPENNVGLITLANDCEVLTTLTPDTGRILSKLHTVQPKGKITFCTGIRVAHLALKHRQGKNHKMRIIAFVGSPVEDNEKDLVKLAKRLKKEKVNVDIINFGEEEVNTEKLTAFVNTLNGKDGTGSHLVTVPPGPSLADALISSPILAGEGGAMLGLGASDFEFGVDPSADPELALALRVSMEEQRQRQEEEARRAAAASAAEAGIATPGTEGERDSDDALLKMTISQQEFGRAGLPDLSSMTEEEQIAYAMQMSLQGAEFGQAESGDIDASSAMDTSEPVKEEDDYDVMQDPEFLQSVLENLPGVDPNNEAIRNAMGSLASQATKDGKKDKKEEEKK

SEQ ID NO: 1447 - DNA, 1313 bp, Homo sapiens
  ref <308>: DATABASE ACCESSION NUMBER: Refseq / NM_002810
  ref <309>: DATABASE ENTRY DATE: 2002-12-23
aattggaggagttgttgttaggccgtcccggagacccggtcgggagggaggaaggtggcaagatggtgttggaaagcactatggtgtgtgtggacaacagtgagtatatgcggaatggagacttcttacccaccaggctgcaggcccagcaggatgctgtcaacatagtttgtcattcaaagacccgcagcaaccctgagaacaacgtgggccttatcacactggctaatgactgtgaagtgctgaccacactcaccccagacactggccgtatcctgtccaagctacatactgtccaacccaagggcaagatcaccttctgcacgggcatccgcgtggcccatctggctctgaagcaccgacaaggcaagaatcacaagatgcgcatcattgcctttgtgggaagcccagtggaggacaatgagaaggatctggtgaaactggctaaacgcctcaagaaggagaaagtaaatgttgacattatcaattttggggaagaggaggtgaacacagaaaagctgacagcctttgtaaacacgttgaatggcaaagatggaaccggttctcatctggtgacagtgcctcctgggcccagtttggctgatgctctcatcagttctccgattttggctggtgaaggtggtgccatgctgggtcttggtgccagtgactttgaatttggagtagatcccagtgctgatcctgagctggccttggcccttcgtgtatctatggaagagcagcggcagcggcaggaggaggaggcccggcgggcagctgcagcttctgctgctgaggccgggattgctacgactgggactgaagactcagacgatgccctgctgaagatgaccatcagccagcaagagtttggccgcactgggcttcctgacctaagcagtatgactgaggaagagcagattgcttatgccatgcagatgtccctgcagggagcagagtttggccaggcggaatcagcagacattgatgccagctcagctatggacacatctgagccagccaaggaggaggatgattacgacgtgatgcaggaccccgagttccttcagagtgtcctagagaacctcccaggtgtggatcccaacaatgaagccattcgaaatgctatgggctccctggcctcccaggccaccaaggacggcaagaaggacaagaaggaggaagacaagaagtgagactggagggaaagggtagctgagtctgcttaggggactgcatgggaagcacggaatatagggttagatgtgtgttatctgtaaccattacagcctaaataaagcttggcaactttt

SEQ ID NO: 1448 - protein, 377 aa, Homo sapiens
  ref <308>: DATABASE ACCESSION NUMBER: Refseq / NP_002801
  ref <309>: DATABASE ENTRY DATE: 2002-12-23
MVLESTMVCVDNSEYMRNGDFLPTRLQAQQDAVNIVCHSKTRSNPENNVGLITLANDCEVLTTLTPDTGRILSKLHTVQPKGKITFCTGIRVAHLALKHRQGKNHKMRIIAFVGSPVEDNEKDLVKLAKRLKKEKVNVDIINFGEEEVNTEKLTAFVNTLNGKDGTGSHLVTVPPGPSLADALISSPILAGEGGAMLGLGASDFEFGVDPSADPELALALRVSMEEQRQRQEEEARRAAAASAAEAGIATTGTEDSDDALLKMTISQQEFGRTGLPDLSSMTEEEQIAYAMQMSLQGAEFGQAESADIDASSAMDTSEPAKEEDDYDVMQDPEFLQSVLENLPGVDPNNEAIRNAMGSLASQATKDGKKDKKEEDKK

SEQ ID NO: 1449 - DNA, 1334 bp, Rattus norvegicus; identical to SEQ ID NO: 1445
  ref <308>: DATABASE ACCESSION NUMBER: Refseq / NM_031331
  ref <309>: DATABASE ENTRY DATE: 2003-01-13

SEQ ID NO: 1450 - protein, 380 aa, Rattus norvegicus; identical to SEQ ID NO: 1446
  ref <308>: DATABASE ACCESSION NUMBER: Refseq / NP_112621
  ref <309>: DATABASE ENTRY DATE: 2003-01-13

SEQ ID NO: 1451 - DNA, 1313 bp, Homo sapiens; identical to SEQ ID NO: 1447
  ref <308>: DATABASE ACCESSION NUMBER: Refseq / NM_002810
  ref <309>: DATABASE ENTRY DATE: 2002-12-23

SEQ ID NO: 1452 - protein, 377 aa, Homo sapiens; identical to SEQ ID NO: 1448
  ref <308>: DATABASE ACCESSION NUMBER: Refseq / NP_002801
  ref <309>: DATABASE ENTRY DATE: 2002-12-23

SEQ ID NO: 1453 - DNA, 751 bp, Rattus norvegicus
  ref <308>: DATABASE ACCESSION NUMBER: Refseq / NM_022245
  ref <309>: DATABASE ENTRY DATE: 2003-01-13
tccggcccgggacattgcactaccctgcaagctgtgttgcagggcccggaaggctcactgttccgaaatggccgagcagtcagacaaggatgtgaagtactacactctggaggagattcagaagcacaaagacagcaagagcacctgggtgatcctacatcataaggtgtacgatctgaccaagtttctcgaagagcatcctggtggggaagaagtcctaagagagcaagctgggggtgatgctactgagaactttgaggacgtcgggcactctacggatgcacgagaactgtccaaaacatacatcatcggggagctccatccagatgacagatcaaagatagccaagccttcggaaacccttatcactactgtcgagtctaattccagttggtggaccaactgggtgatcccagccatctcagccctggtggtagctctgatgtatcgcctctacatggcagaagattaacctgtctgtccgaagccaaggaaggaaaagactgccccagagaggggagaaaagaagccagtgttaatcacttccactgacagaaaccctccccctgagaatgtaattgtaatatatctgtctccctctcctcctatgctaggagaacaaagatgggactctttgtactcttaaactttcaaatgtgcctttttactcaacttcattttgacatttcttcactacgtaatttacttattgtaaacatgatctttttaaataatatctggcttgtaaagt

SEQ ID NO: 1454 - protein, 134 aa, Rattus norvegicus
  ref <308>: DATABASE ACCESSION NUMBER: Refseq / NP_071581
  ref <309>: DATABASE ENTRY DATE: 2003-01-13
MAEQSDKDVKYYTLEEIQKHKDSKSTWVILHHKVYDLTKFLEEHPGGEEVLREQAGGDATENFEDVGHSTDARELSKTYIIGELHPDDRSKIAKPSETLITTVESNSSWWTNWVIPAISALVVALMYRLYMAED

SEQ ID NO: 1455 - DNA, 889 bp, Rattus norvegicus
  ref <308>: DATABASE ACCESSION NUMBER: Refseq / NM_054008
  ref <309>: DATABASE ENTRY DATE: 2001-11-07
tgaacacccgagcggaccgcagtgcaggcggcagccaccagggccaacacctctcagcatctctactacacgtgtcactgagcaacctctccatgaagccgccctccacgcagagcagccccgcggccgtggcggccgcagccccggccatggactccgcggccgctgcagacctgacggacgtgctgtgcgagttcgacgcggtgctggccgacttcgcgtcgcccttccacgagcgccacttccactatgaggagcacctggagcgcatgaagcggcgcagcagcgccagcgtcagtgacagcagcggcttcagcgactccgagagtgcagactcgttgtacagggacagcttcaccttcagtgatgagaagctgaattctccgacggactccactccagccctcttgtcctccgctgtcactcctcggaaagccaaattaggtgacactaaagagctcgaagacttcatcgctgatctggacagaaccttagcaagtatgtgaagcaaggagtttgagattcttatgccacaagagtgaaactccagaaggctacgccaggccctggcaaaatcggctactaagtctgctgtgggagcgggcagagctcgcggcatccggccgttcttggttcgccataactttagccattgggtccatctctgggcagttcagataatgaggctgactttgtttacctgcctgcaccatattcaacagatgatctatctaatgtgtttttactccttaaacatagctcttctataaattaaagtgcttttatggaaatatttgtaattacttatatatagttggaggtcataataagctttcccatcataatatatttttgtatacaaataaaatttaaactgggatctgtacct

SEQ ID NO: 1456 - protein, 137 aa, Rattus norvegicus
  ref <308>: DATABASE ACCESSION NUMBER: Refseq / NP_446460
  ref <309>: DATABASE ENTRY DATE: 2001-11-07
MKPPSTQSSPAAVAAAAPAMDSAAAADLTDVLCEFDAVLADFASPFHERHFHYEEHLERMKRRSSASVSDSSGFSDSESADSLYRDSFTFSDEKLNSPTDSTPALLSSAVTPRKAKLGDTKELEDFIADLDRTLASM

SEQ ID NO: 1457 - DNA, 426 bp, Homo sapiens
  ref <308>: DATABASE ACCESSION NUMBER: EMBL / AI199918
  ref <309>: DATABASE ENTRY DATE: 2000-03-03
gctgtgcgagtttgacgcggtgctggccgacttcgcgtcgcccttccacgagcgccacttccactacgaggagcacctggagcgcatgaagcggcgcagcagcgccagtgtcagcgacagcagcggcttcagcgactcggagagtaagtgcggcccccgctaggatggcgccgggatctcccagctcccaggacctgccccgcgaaggctgcggcctcagttttcttatcagtaaactgaggaatggtttcctgaagctcaacgcagtaggccgagtggtggcggggcccctgacgataatcacgggaaaggtcgctggagggcaggttggttcacttgccgcccacgggtgtgtcaccaggcaggcgagtttaagcagcttgtcccgactcagccagacaggactccctggacctgcaccaggcc

SEQ ID NO: 1458 - DNA, 2541 bp, Rattus norvegicus
  ref <308>: DATABASE ACCESSION NUMBER: Refseq / NM_031657
  ref <309>: DATABASE ENTRY DATE: 2003-01-15
tgcagcccatggagctcgagaacatcgtagcgaacacggtgctactcaaggcccgggaaggtggtggcgggaatcgtaaaggcaagagcaagaaatggcgccagatgctgcagttcccccacatcagccagtgtgaagagctccggctcagccttgaacgtgactaccacagcctgtgtgagcgtcacgccattgggcgcctgttatttcgtgagttctgcgctacgaggcctgagctgacccgctgtactgccttcctggatggggtggctgagtatgaggtgaccccagatgagaaacggaaggcatgtgggcgtcggctaatgcagaattttctgagccacacgggtcctgacctcatccctgaagttccccggcagctggtgagtaactgtgcccagcggctagagcagggaccctgcaaagacctcttccaggagctgacccggctgacccatgagtacctaagcatggccccttttgccgactacctcgacagcatctacttcaaccgtttcctgcagtggaagtggctggaaaggcagccagtgaccaaaaacacctttaggcagtaccgagtcctgggcaaaggtggctttggggaggtgtgtgcctgccaggtgcgggcaacaggcaagatgtatgcgtgcaaaaaactggaaaagaaacgaataaagaagcggaagggggaggccatggctctcaacgagaagcagatcctggagaaagtgaacagtaggtttgtagtgagcttagcctacgcatatgagaccaaggatgcactgtgcctggtgctgacattgatgaatggaggcgacctcaagttccacatctaccacatgggccaggctggctttcccgaagcacgtgctgtcttctatgctgccgagatctgctgtggtctggaggacttacaccgggaacgcatcgtgtacagggacctaaagccagagaatatccttctggatgaccatggccacattcgaatctccgacctgggcctggctgtgcatgttcctgagggccagaccatcaaaggccgtgtgggcactgtgggctacatggctccagaggtggtgaagaatgagcgctacacattcagtcctgactggtgggcgctaggctgcctcctgtacgagatgattgcgggacagtcgcccttccagcagaggaagaagaagatcaagcgggaggaggtggagcggctggtcaaggaggtggctgaggagtacaccgaccgcttctccccacaggcacgctcactctgttctcagcttctcaacaaggaccctgctgagcgcctggggtgtcgtggaggtggtgcccgtgaggtaaaggagcacccccttttcaagaaactgaatttcaagcggctgggagctggaatgctagaaccaccttttaaacctgacccccaggccatttactgcaaggacgtgctggacattgaacagttctccacagttaaaggtgtggatctggagcccacagaccaagacttctaccagaagtttgccacgggtagtgtgtccatcccctggcagaacgagatggtggagactgagtgcttccaggaactaaatgtctttgggctggatgggtctgttcccccagacctggactggaagggccagcccactgcaccccccaagaagggattgctacagagactcttcagtagacaaaggattgctgtgggaactgcagcgacagtgaagaagagctccccacccgcctctagcccccaggccgaggcccccaccggcggctggcggtagcagctactcagtgactgacgttgacagttttgcacagtgctgtttccagttgtccacgccagtcgtggtctgtggaacacagccggaactgtccccagtgtcctccgttcctcagccactggcccagctgagtttgacgaggcctgggccatcttgggacaaaggtgcgtcccttcagctcttctctgtggagctcggggctttatgtgtttatgtatttgtacgaatgtatatagctaccagagcgttcttaactccaccctgggtctggcaccccagggcaactagccctggccaggagagccaggagctggcaagaggaaccagtgccaacctccaggctaatggggcccagtccagatgagcaagcagagtgtgggccaggtcagacctctgaccacagcattgctccggccaccatcagactcaagtgagactcgtgcctgtctgttgtggactgaggccaccatgctccagttgcccaatgctttcattccgtctcagtgtttgtcagagctggagacgggggctttgtgttctccgggcctgggtcacagtgtgactgcaaactgagctgacggggacctatcacaccactgccccagatgggttgctttttgccttccagctcccagagcacattggtccttattctgggtcatatccaggccataagaggggttagaattagccctccaacattccagaatccctcataaaagtagacatgtgcccagcaataatccaaccttcctgtgtgtgc

SEQ ID NO: 1459 - protein, 589 aa, Rattus norvegicus
  ref <308>: DATABASE ACCESSION NUMBER: Refseq / NP_113845
  ref <309>: DATABASE ENTRY DATE: 2003-01-15
MELENIVANTVLLKAREGGGGNRKGKSKKWRQMLQFPHISQCEELRLSLERDYHSLCERHAIGRLLFREFCATRPELTRCTAFLDGVAEYEVTPDEKRKACGRRLMQNFLSHTGPDLIPEVPRQLVSNCAQRLEQGPCKDLFQELTRLTHEYLSMAPFADYLDSIYFNRFLQWKWLERQPVTKNTFRQYRVLGKGGFGEVCACQVRATGKMYACKKLEKKRIKKRKGEAMALNEKQILEKVNSRFVVSLAYAYETKDALCLVLTLMNGGDLKFHIYHMGQAGFPEARAVFYAAEICCGLEDLHRERIVYRDLKPENILLDDHGHIRISDLGLAVHVPEGQTIKGRVGTVGYMAPEVVKNERYTFSPDWWALGCLLYEMIAGQSPFQQRKKKIKREEVERLVKEVAEEYTDRFSPQARSLCSQLLNKDPAERLGCRGGGAREVKEHPLFKKLNFKRLGAGMLEPPFKPDPQAIYCKDVLDIEQFSTVKGVDLEPTDQDFYQKFATGSVSIPWQNEMVETECFQELNVFGLDGSVPPDLDWKGQPTAPPKKGLLQRLFSRQRIAVGTAATVKKSSPPASSPQAEAPTGGWR

SEQ ID NO: 1460 - DNA, 345 bp, Rattus norvegicus
  ref <308>: DATABASE ACCESSION NUMBER: EMBL / AF087437
  ref <309>: DATABASE ENTRY DATE: 2000-03-03
gcagtaaaaagttcacatggtactcctgttgttgccatccctctgtaaatagtgaatgtttcttactagttctgcactgcttctgtctgtcttaatgctggcgttaagatcatatactccttttctccggtagtgcaggttttgaaaattacttttaagttattgatgcaatttcatattttttcataatctatatttaagatgacatcattgcatcattttttctaaattcatctccattaaaacttgccttaagctaccagattgctttgctattagctttactgtacatctgtatgttttatttactttcacattaaaattctgtgtagtgaaaaaaaaaaa

SEQ ID NO: 1461 - DNA, 2002 bp, Rattus norvegicus
  ref <308>: DATABASE ACCESSION NUMBER: EMBL / AJ000347
  ref <309>: DATABASE ENTRY DATE: 1999-06-24
taggggacgccaggctgactgttgatcatggcttccagccacaatgtgttgatgcggctggtagcctccgcatactctatcgctcagaaggcaggaaccatcgtcaggtgtgtcatcgctgaaggagacctgggcatcgtgcagaagacctcagccactgacctgcagaccaaagcagaccgcatggtacagatgagcatatgctcttccctgtcccggaaattcccgaagctgacgatcatcggggaagaggacctgcctcctggagaagtggatcaagaactgattgaagacgggcagtcggaggagatcctgaagcagccgtgcccatcgcagtacagtgcaatcaaggaggaagaccttgtggtttgggttgaccccgtagatggtaccaaggaatacactgaaggtcttcttgacaatgtaacagtgctcattgggattgcttatgaaggaaaggccatcgcaggcatcatcaaccagccatattacaactaccaggcaggaccggacgccgtgctgggcaggaccatctggggagtcctgggtttgggtgcctttgggtttcagctgaaagaagcccctgctgggaagcacatcatcaccaccaccagatcccatagcaacaagctggtcacagactgcattgcagccatgaaccctgacaacgtgctgcgagtgggaggagcaggaaacaagattatccagctgattgaaggcaaagcctctgcttatgtatttgcaagtcctggatgtaagaaatgggatacttgtgccccagaagttatcttacatgctgtaggagggaagttgacagacatccacgggaatcccctgcagtacgacaaggaggtgaaacacatgaactctgctggagttctggctgcactgcggaattatgagtactatgcaagccgcgtaccagagtctgtcaaaagtgcactcattccctgaaggggtctcacttacttacccaggggcctcggttcaaagtaacatatcttagaactgattaactgattgaacaattagaactccacttgcattcatcattgatcaatgatttattagtaggtagggatagaagatggaattaaagaattgtcttaggtatataacacaattgtcatttctcctgcctaaaaaaaaaaaaattagccaagtggtagcacttatgacagtcatggccattccagtggctgagctaggagggttgcttgagcccagggccccgagactagcctccttcacatagcaagacatagcccaaaaacaaagaagaaaaacaaaaaaggaatttacacttgatcttagccaaaaggccgagaagcgatcaaaaaaggaatttagttttaccaattagctaactagacctgttttgttgttgatgttgttgttgtttggttttttgagacagggtttctctgtgcagtcctggctgtactgaaatttacttagtagacaaagctggccttgagctcagtgattcccctgcttctgcctcctgagggcagggattaagggcttgccccaccatacctggcagaaatgttactgtttttaagtgaagaaatgaaaaagggttagttctgaatgacagtccaggtcatttgtggaatcaacattcctgctggtaaccagatttcttcagggcacagttactccagaatttcagtttgttttcttttcatggtaatgttttaaatttctgattccaaatgagaatgcatataatattatttatgttgatagatttatggggaaagtttgtccaagatacttagtcctatctctttatgttatatatcagatttttttcaaaagtatttgaaaattataaatactgtgaggattaatttattctcttgccattaaaagctatcatcagaaaaaaaaaaaaaaaaaattcctgcggccgcgaattcttccctttagagcacactggcggccgctctagaactagtggatcccccgggctgcaggaattcgatatcaagcttat

SEQ ID NO: 1462 - protein, 309 aa, Rattus norvegicus
  misc_feature (1)..(309): Xaa=Unknown amino acid
MASSHNVLMRLVASAYSIAQKAGTIVRCVIAEGDLGIVQKTSATDLQTKADRMVQMSICSSLSRKFPKLTIIGEEDLPPGEVDQELIEDGQSEEILKQPCPSQYSAIKEEDLVVWVDPVDGTKEYTEGLLDNVTVLIGIAYEGKAIAGIINQPYYNYQAGPDAVLGRTIWGVLGLGAFGFQLKEAPAGKHIITTTRSHSNKLVTDCIAAMNPDNVLRVGGAGNKIIQLIEGKASAYVFASPGCKKWDTCAPEVILHAVGGKLTDIHGNPLQYDKEVKHMNSAGVLAALRNYEYYASRVPESVKSALIPX

SEQ ID NO: 1463 - DNA, 970 bp, Rattus norvegicus
  ref <308>: DATABASE ACCESSION NUMBER: Refseq / NM_017282
  ref <309>: DATABASE ENTRY DATE: 2003-01-14
gcggtgtggttgagtagggtgctgctttcagtcgtgtggcctttggaactccgcgtagcactgccgcctcctcctgtcctcgccatgttcctcactcggtccgagtacgacaggggtgtgaacactttttctcctgaaggaagattatttcaagtggaatatgccattgagggccataagcttggttctacggccattggcatccagacatcagagggtgtatgtctagctgtggagaagagaattacctcgccactaatggagcctagcagcattgagaaaatcgtagagattgatgctcatataggttgtgccatgagtgggctaattgctgatgctaaaactttaattgataaagccagagtggagacacagaaccactggttcacctataatgagacaatgacagttgagagtgttacccaggctgtgtccaatctggctttgcagttcggagaagaagatgcagatccaggtgctatgtctcgtccctttggagtagcattgttgtttggaggagttgatgagaaagggccccaactgtttcacatggacccatctgggaccttcgtacagtgtgatgctcgagcaattggttctgcgtcagagggtgcccagagctccttgcaggaagtttaccacaagtctacgactctgaaggaggccatcaagtcttcactcatcatcctcaagcaagtcatggaggagaagctgaacgcaactaacatcgagctggccacagtgcagcctggtcagaatttccacatgttcacaaaggaagaactggaggaggtgatcaaggacatttaaggaggggccatcctcgaacttctgtgggacagtttcagttctaatggctcttagactttatttccaactccacgtcgtgaaaatatccagtatatgtatgtgtgtttttttatgatgtctgtacataacagcaattctgaaataaaaaaaatttacaaat

SEQ ID NO: 1464 - protein, 241 aa, Rattus norvegicus
  ref <308>: DATABASE ACCESSION NUMBER: Refseq / NP_058978
  ref <309>: DATABASE ENTRY DATE: 2003-01-14
MFLTRSEYDRGVNTFSPEGRLFQVEYAIEGHKLGSTAIGIQTSEGVCLAVEKRITSPLMEPSSIEKIVEIDAHIGCAMSGLIADAKTLIDKARVETQNHWFTYNETMTVESVTQAVSNLALQFGEEDADPGAMSRPFGVALLFGGVDEKGPQLFHMDPSGTFVQCDARAIGSASEGAQSSLQEVYHKSTTLKEAIKSSLIILKQVMEEKLNATNIELATVQPGQNFHMFTKEELEEVIKDI

SEQ ID NO: 1465 - DNA, 561 bp, Rattus norvegicus
  ref <308>: DATABASE ACCESSION NUMBER: Refseq / NM_017311
  ref <309>: DATABASE ENTRY DATE: 2003-01-14
gtgtgctgtgggccgagcaggggctgcaggggagtgggagtgcagattgaaaaatgcagaccacgaaggcactgctcatttctccagttctgatccgctcctgtaccaggggtctaatcaggcctgtgtctgcctccctcctgagtagaccagaggctccatctaaaaagccttcctgctgcagctcccctctccaggtggccagacgggaattccagaccagtgttatttcccgggacattgacacagcagccaagtttattggtgctggggccgccacagttggtgtggctggatcaggggctggcattggcacagtgtttggtagcttgattattggctatgccaggaacccgtctctcaagcagcagctcttctcctatgccatcctgggctttgccctgtctgaggccatggggctcttctgtttgatggtcgccttcctcatcctcttcgccatgtgaggctccatggggtcacccggccgtccctgctgctttgactccatgccagtcctggtgctggagtgtgctgagctttaccattaaactacgtttctct

SEQ ID NO: 1466 - protein, 136 aa, Rattus norvegicus
  ref <308>: DATABASE ACCESSION NUMBER: Refseq / NP_059007
  ref <309>: DATABASE ENTRY DATE: 2003-01-14
MQTTKALLISPVLIRSCTRGLIRPVSASLLSRPEAPSKKPSCCSSPLQVARREFQTSVISRDIDTAAKFIGAGAATVGVAGSGAGIGTVFGSLIIGYARNPSLKQQLFSYAILGFALSEAMGLFCLMVAFLILFAM

SEQ ID NO: 1467 - DNA, 593 bp, Rattus norvegicus
  ref <308>: DATABASE ACCESSION NUMBER: Refseq / NM_133556
  ref <309>: DATABASE ENTRY DATE: 2003-01-13
gcccctcacccctgaaaaatgtatgcctgctccaagttcgtctctacccgctccctgatcaggagcacctctcagctgctgagccgtccgctctctgcagtggagttgaagcgaccacagatgcccacagatgagggcctcagttgcttggcagtccggcggcctctgacctcgcttatccctagccgcagcttccaaaccagcgccatttcaagggacattgacacagctgccaagttcattggagctggggctgctacagttggggtggccggttctggagcaggaattgggactgtttttgggagtctcatcattggctatgccaggaacccctctctgaagcagcaactcttctcctatgcgattctggggtttgccctctctgaggccatggggctcttttgcctaatggtggccttcctcatcctcttcgccatgtgaagcagctgtctccacgtccacctcccatggttcttccgtgtctcgtctgcccagtgtgttccttttcctgtgcctccccaacaagtctggggaaagtacttggctcagggtttgacagagagaagacaaataaatactgtattaataag

SEQ ID NO: 1468 - protein, 141 aa, Rattus norvegicus
  ref <308>: DATABASE ACCESSION NUMBER: Refseq / NP_598240
  ref <309>: DATABASE ENTRY DATE: 2003-01-13
MYACSKFVSTRSLIRSTSQLLSRPLSAVELKRPQMPTDEGLSCLAVRRPLTSLIPSRSFQTSAISRDIDTAAKFIGAGAATVGVAGSGAGIGTVFGSLIIGYARNPSLKQQLFSYAILGFALSEAMGLFCLMVAFLILFAM

SEQ ID NO: 1469 - DNA, 1689 bp, Rattus norvegicus
  ref <308>: DATABASE ACCESSION NUMBER: Refseq / NM_013052
  ref <309>: DATABASE ENTRY DATE: 2003-01-14
tgcagccagctagcgagaaggcgcgagcggcggcgcagccagcagcctcccgccagccggcgagccagtgcgcgtgcgcggcggcggcctcggcggcgaccgggaagcggacgggcgggcgaggcgagcgaggcaggcggtgcgggcgtgcgaggcgaggccgatcgcgagcgacatgggggaccgagagcagctgctgcagcgggcgcgactggcggagcaggcggagcgctacgacgacatggcctccgccatgaaggcggtgacagagctgaatgaacctctatctaatgaagatagaaatctcctctctgtggcctacaagaatgtagttggtgccaggcgatcttcttggagggttattagtagcattgagcagaaaaccatggcagatgggaatgagaagaagctggagaaagtcaaagcctatcgggagaagattgagaaggagctggagacagtttgcaatgatgtcttggctctgctcgacaagttccttatcaagaactgcaatgattttcagtacgagagcaaggtgttctacctgaaaatgaagggcgattactaccgctacctggcagaggtggcttctggggagaagaaaaacagtgtggttgaagcttctgaggcagcgtataaggaagccttcgaaatcagcaaagagcacatgcagccaacacaccccatccggcttggcctggccctcaatttttctgtgttctactatgagatccagaatgcaccagagcaggcctgcctcttagccaaacaagccttcgatgatgctatagctgagctggacacattaaacgaggattcctataaggactccactctcatcatgcagttgctgcgagacaacctcaccctctggacgagcgaccagcaggatgaagaagccggagaaggcaactgaagacccatcaggtccctggcccttcctttacccaccacccccattatcactgattcttccttgccacaatcactatatctagtgctaaacctatctgtattggcagcacagctattcagatctgccctcctgtcccttggaagcagtttcagataaaccttcatgggcatttgctggactgatggttgctttgagccacagagcgctccctttttgaattgtgcagagaagtgtgttctgaacgaggcattttattatgtctgttgatctgtagcaaatccatgtgatggtaattgagtgtagaaaggagaattagccaacacaggctatggctgctatttaaaacaagctgatagtgtgttgttaagcagtacatctcgtgcatgcaaaaatgaatttgaccctctcaccccttctttcagctaatggaaactgacacacgacaacttgttccttcaccatcagctttataaactgtttctcgtgagctttcaggcccctgctgtgcctctttaaattatgatgtgcgcacaccttcttttcaatgcaatgcatcagaggtttttgatatgtgtaacttttttttttggttgtgattaagaatcatggatttattttttgtaactctttggctattgttcttgtgtaccctgacagcatcatgtgtgtcaacctgtgtcaatcatgatgggtggttatgaaatgccagattgctaaaataaatgttttggacttaaaaagagtaaataaatgctgctttggggatattaaaa

SEQ ID NO: 1470 - protein, 246 aa, Rattus norvegicus
  ref <308>: DATABASE ACCESSION NUMBER: Refseq / NP_037184
  ref <309>: DATABASE ENTRY DATE: 2003-01-14
MGDREQLLQRARLAEQAERYDDMASAMKAVTELNEPLSNEDRNLLSVAYKNVVGARRSSWRVISSIEQKTMADGNEKKLEKVKAYREKIEKELETVCNDVLALLDKFLIKNCNDFQYESKVFYLKMKGDYYRYLAEVASGEKKNSVVEASEAAYKEAFEISKEHMQPTHPIRLGLALNFSVFYYEIQNAPEQACLLAKQAFDDAIAELDTLNEDSYKDSTLIMQLLRDNLTLWTSDQQDEEAGEGN

SEQ ID NO: 1471 - DNA, 1154 bp, Rattus norvegicus
  ref <308>: DATABASE ACCESSION NUMBER: Refseq / NM_022501
  ref <309>: DATABASE ENTRY DATE: 2003-01-13
cggcggcgcagagaggagcgcgggtggagggcgcggaccgaccgagcgcaccgaccatggcctccaagtgtcccaagtgtgacaagaccgtgtacttcgccgagaaggtgagctccctgggcaaggactggcacaagttctgcctcaagtgtgagcgctgcaacaagacactgacgcctggcggccatgctgagcatgatgggaaacccttctgccacaagccctgttatgccacactgtttggacccaaaggcgtgaatatcgggggcgctggttcctacatctacgagaagcctccgacggaggcccctcaggtcactggccccatcgaggtccctgtggtacgaactgaagagcggaagaccagcgggccgcccaagggtcccagcaaagcctctagtgtcaccacgttcactggggagcccaacatgtgccctcgatgcaacaagagagtgtacttcgctgagaaggtgacctccctgggcaaggactggcaccgaccctgcctgcgctgtgagcgctgctccaagacactgaccccaggcgggcatgctgagcatgatggccaaccctactgccacaagccctgctatggaatactctttggacccaaaggagtgaatactggtgctgtgggcagctacatctacgacaaggacccggaaggcacagttcagccttagatctgcagatgctgcccctcgcggtcccctatttgaccctgagggagagtgatctgctgcctagtcctgcctcagtgtgtctcgcctgcaattccagcacctaagtgatggaggagaaagcccagctagtcctagaatttcagctcccttggtcaccttggcatgtcctatgttgcccgtggtttactttctgtctgtgtgtctccatagcaccatgggtcctgtgtccccatgtccctgataactctccaaggtggctgtcctatgatatccctttgcccacactcgcccgccagtattatttatgctctgcttgccggtgatgggcatgagctagctcacagcattcccggggtgacggcaccccagcaaggagccctttgctggttcccacactactccctacttaccctcacatggttcacagctatggagatttgctgtcaataaatagtttggtttaaagattgc

SEQ ID NO: 1472 - protein, 208 aa, Rattus norvegicus
  ref <308>: DATABASE ACCESSION NUMBER: Refseq / NP_071946
  ref <309>: DATABASE ENTRY DATE: 2003-01-13
MASKCPKCDKTVYFAEKVSSLGKDWHKFCLKCERCNKTLTPGGHAEHDGKPFCHKPCYATLFGPKGVNIGGAGSYIYEKPPTEAPQVTGPIEVPVVRTEERKTSGPPKGPSKASSVTTFTGEPNMCPRCNKRVYFAEKVTSLGKDWHRPCLRCERCSKTLTPGGHAEHDGQPYCHKPCYGILFGPKGVNTGAVGSYIYDKDPEGTVQP

SEQ ID NO: 1473 - DNA, 901 bp, Homo sapiens
  ref <308>: DATABASE ACCESSION NUMBER: Refseq / NM_001321
  ref <309>: DATABASE ENTRY DATE: 2000-10-31
gggatctcggactccctggaccctccctccagcccagcctcgctagctccgcctgcggtacgtgctcccgcctccgactcaaaatgcctgtctggggaggtggaaacaagtgtggggcctgtgggaggaccgtgtaccacgcagaagaggtgcagtgtgatggcaggagcttccaccgctgctgctttctctgcatggtttgcaggaaaaatttagatagcacaacagtggcaattcacgatgaagagatctactgcaaatcctgctacggaaagaagtatgggccaaaaggctacggttatggccagggcgctggcacgcttaacatggaccgtggcgagaggctgggcatcaaaccagagagtgttcagcctcacaggcctacaacaaatccaaacacttctaaatttgctcagaaatatggaggtgctgagaagtgttccagatgtggggattctgtatatgctgccgagaagataattggagctggaaagccctggcacaaaaactgtttccgatgtgcaaagtgtgggaagagtcttgaatcaacaactctgactgaaaaagaaggtgaaatctattgtaaaggatgctatgcaaagaactttgggcccaagggatttggctatggccaaggagcaggggctcttgttcatgcccagtaagatgtaaaccctgaactaaacatcacacactgagaatctcttcataatctaggcacagataatctttaacactaaactactgtgaaattctaccagcattaagtactgtatatcgccctgtacttggataggctggctaactcgtaggaagagagcactgtatggtatccttttgctttattcaccagcattttgggggaacatttcttttacattttaaataaaacttcagcttg

SEQ ID NO: 1474 - protein, 193 aa, Homo sapiens
  ref <308>: DATABASE ACCESSION NUMBER: Refseq / NP_001312
  ref <309>: DATABASE ENTRY DATE: 2000-10-31
MPVWGGGNKCGACGRTVYHAEEVQCDGRSFHRCCFLCMVCRKNLDSTTVAIHDEEIYCKSCYGKKYGPKGYGYGQGAGTLNMDRGERLGIKPESVQPHRPTTNPNTSKFAQKYGGAEKCSRCGDSVYAAEKIIGAGKPWHKNCFRCAKCGKSLESTTLTEKEGEIYCKGCYAKNFGPKGFGYGQGAGALVHAQ

SEQ ID NO: 1475 - DNA, 792 bp, Rattus norvegicus
  ref <308>: DATABASE ACCESSION NUMBER: Refseq / NM_017284
  ref <309>: DATABASE ENTRY DATE: 2003-01-14
cgcgtacccgggaagtccccgtgtgtgtgtaccttgcagcctcccgcttcccggaaccatggagtacctcattggcatccagggtcctgactatgtcctggtcgcttctgatcgggtggccgccagcaatattgtccagatgaaggacgatcatgacaagatgtttaagatgagtgaaaaaatcttactcctatgtgttggagaggctggagacactgtacagtttgcagaatatatccagaaaaacgtgcagctttataaaatgcggaatggatatgaattgtcccccacagcagcagctaatttcacacgccgaaacctggccgactgtcttcggagtcggaccccttatcatgtgaacctcctcctggctggctatgacgagcatgaggggccagcactttactacatggactacctagcagccttggccaaggctccttttgcagctcatggctatggtgccttcctgaccctcagcatccttgaccgatactacacaccaactatctcacgtgagagggcagtggagcttcttaggaagtgtctggaggagctccagaagcgcttcatcttgaatctgcccaccttcagcgttcgggtcattgacaaagatggcatccacaatctggagaacattaccttcactaagcggagttcctaacatcatgttcttccctcccacttaccagggacctttttttgatgggttccttttatttttttctactcttttgacgttcactctcaatagatggttaattcaaaataaagctgaacacagctaaattg

SEQ ID NO: 1476 - protein, 201 aa, Rattus norvegicus
  ref <308>: DATABASE ACCESSION NUMBER: Refseq / NP_058980
  ref <309>: DATABASE ENTRY DATE: 2003-01-14
MEYLIGIQGPDYVLVASDRVAASNIVQMKDDHDKMFKMSEKILLLCVGEAGDTVQFAEYIQKNVQLYKMRNGYELSPTAAANFTRRNLADCLRSRTPYHVNLLLAGYDEHEGPALYYMDYLAALAKAPFAAHGYGAFLTLSILDRYYTPTISRERAVELLRKCLEELQKRFILNLPTFSVRVIDKDGIHNLENITFTKRSS

SEQ ID NO: 1477 - DNA, 1018 bp, Rattus norvegicus
  ref <308>: DATABASE ACCESSION NUMBER: Refseq / NM_017138
  ref <309>: DATABASE ENTRY DATE: 2003-01-14
gctggaacgggtccgtacggcgttgttcttggttcccatcgtaacttaaaagggaaacttacacaatgtccggaggccttgacgtcctgcagatgaaggaggaggatgtcctcaaattccttgctgcaggaacccacttaggtggcaccaaccttgactttcagatggagcagtacatctacaaaaggaaaagtgacggtatctacatcatcaacctgaagaggacttgggagaagctgttgttagccgctcgagctattgttgccattgagaaccctgctgatgtcagcgtcatctcctccaggaacactggccagcgagctgtgctgaagtttgccgctgccacaggagccactccaattgctggccgcttcacacctgggaccttcactaaccagatccaagcagccttcagggagccccggcttctagtggtgactgatccccgggctgaccaccagcccctcacagaggcctcttacgtcaacctgcccaccattgctctttgtaacacagattctcccctgcgctatgtggacattgccatcccatgcaacaacaagggagctcactcagtgggtctcatgtggtggatgctggccagggaagtactccgcatgcgaggaaccatctcccgggagcacccatgggaggttatgcctgatctttacttctacagggacccagaggagattgagaaggaggagcaggctgccgctgagaaggctgtgaccaaggaggaattccagggtgaatggacggcaccagcgcctgagttcactgctgctcagcctgaggtggccgactggtctgagggtgtgcaggtgccctctgtgcccattcagcagttccccacagaagactggagtgcacagccggccactgaggactggtcagcagctcccacagcacaggctactgagtgggttggagccaccactgagtggtcctgagctcctctgcaggtgcctgagcgaagggaaaaaaggtggaaggaaaataaagttcctgaaagctg

SEQ ID NO: 1478 - protein, 295 aa, Rattus norvegicus
  ref <308>: DATABASE ACCESSION NUMBER: Refseq / NP_058834
  ref <309>: DATABASE ENTRY DATE: 2003-01-14
MSGGLDVLQMKEEDVLKFLAAGTHLGGTNLDFQMEQYIYKRKSDGIYIINLKRTWEKLLLAARAIVAIENPADVSVISSRNTGQRAVLKFAAATGATPIAGRFTPGTFTNQIQAAFREPRLLVVTDPRADHQPLTEASYVNLPTIALCNTDSPLRYVDIAIPCNNKGAHSVGLMWWMLAREVLRMRGTISREHPWEVMPDLYFYRDPEEIEKEEQAAAEKAVTKEEFQGEWTAPAPEFTAAQPEVADWSEGVQVPSVPIQQFPTEDWSAQPATEDWSAAPTAQATEWVGATTEWS

SEQ ID NO: 1479 - DNA, 2275 bp, Rattus norvegicus
  ref <308>: DATABASE ACCESSION NUMBER: Refseq / NM_017055
  ref <309>: DATABASE ENTRY DATE: 2003-01-14
ccacacacaccgagaggatgaggttcgctgtgggtgccctgctggcttgtgccgccctgggactgtgtctggctgtccctgacaaaacggtcaaatggtgcgcagtgtctgagcatgagaacaccaagtgtatcagtttccgtgaccacatgaaaaccgtccttccagctgatggcccccgcttgccctgtgtgaagaaaacctcctatcaagattgcatcaaggccatttctggaggtgaagctgatgccattaccttggatgggggttgggtgtacgatgcaggcctgactcccaacaacctgaagcctgtggcagcagagttttatggatcacttgaacatcgacagacccactacttggctgtggccgtggtgaagaagggaacagacttccagctgaaccagctccagggcaagaagtcctgccacactggcctgggcaggtctgcaggctggattatccccattggcttacttttctgtaacttgccagagccccgcaagcctcttgagaaagctgtggccagtttcttctcgggcagttgtgtcccctgtgcagatccagtggccttcccccagctgtgtcaactgtgtccaggctgtggctgctccccgactcaaccgttctttggctacgtaggcgccttcaagtgtctgagagatggaggtggagatgtggcctttgtcaagcatacaaccatatttgaggtcttgccacagaaggctgacagggatcaatatgagctgctctgccttgacaatacccgcaagccagtggatcagtatgaggactgctacctagcccggatcccttctcatgctgttgtggctcgaaatggagatggcaaagaggacttgatctgggagatcctcaaagtggctcaggaacactttggcaaaggcaaatcaaaagacttccaactgttcggctctcctcttgggaaagacctgctgtttaaggattctcgctttgggctgttacgtgcccccaaggatggactacaggctgtacctcggccacagctatgtcactgccattcgaaatcagcgggaagctgtccggatgccatcgacagcgcgccagtgaaatggtgtgcactgagtcaccaagagagagccaagtgtgatgagtggagcgtcacaggcaatgggcagatagagtgtgagtcagcagagagcactgaggactgcattgacaagattgtgaatggagaagcagatgccatgagcttggatggaggtcatgcctacatagcaggccagtgtggactagtgcccgtcatggcagagaactatgatatctcttcgtgtacaaacccacaatcagatgtctttcctaaagggtattatgccgtggctgtggtgaaggcatcagactccagcatcaactggaacaacctgaaaggcaagaagtcctgccatactggagtagacagaaccgccggctggaacatccctatgggcctgctgttcagcaggatcaaccactgcaagttcgatgaatttttcagtcaaggctgtgctcctggctataagaagaattccaccctctgtgacctgtgtattggcccagcaaaatgtgctccgaacaacagagagggatataatggttatacaggggctttccagtgcctcgttgagaagggagacgtagcctttgtgaagcaccagactgtcctggaaaacacgaacggaaagaacactgctgcatgggctaaggatctgaagcaggaagacttccagctgctgtgccctgatggtaccaagaagcctgtaaccgagttcgccacctgccacctggcccaagctccaaaccatgttgtggtctcacgaaaagagaaggcagcccgggttagcactgtgctgactgcccagaaggatttattttggaaaggtgacaaggactgcactggcaatttctgtttgttccggtcttccaccaaggaccttctgttcagagatgacaccaagtgtttgactaaacttccagaaggtaccacatatgaagagtacttaggagcagagtacttgcaagctgttggaaacataaggaagtgttcaacctcacgactcctagaagcctgcactttccacaaaagttaaaatccaagaggtgggtgccactgtggtggaggaggatgcccccgtgatccatgggcttctcctggcctccatgccctgagcggctggggctaactgtgtccgtcttcactgctgtgtgttaccacatacacagagcacaaaataaaaaatgactgttgactttaaaaaaa

SEQ ID NO: 1480 - protein, 695 aa, Rattus norvegicus
  ref <308>: DATABASE ACCESSION NUMBER: Refseq / NP_058751
  ref <309>: DATABASE ENTRY DATE: 2003-01-14
MRFAVGALLACAALGLCLAVPDKTVKWCAVSEHENTKCISFRDHMKTVLPADGPRLPCVKKTSYQDCIKAISGGEADAITLDGGWVYDAGLTPNNLKPVAAEFYGSLEHRQTHYLAVAVVKKGTDFQLNQLQGKKSCHTGLGRSAGWIIPIGLLFCNLPEPRKPLEKAVASFFSGSCVPCADPVAFPQLCQLCPGCGCSPTQPFFGYVGAFKCLRDGGGDVAFVKHTTIFEVLPQKADRDQYELLCLDNTRKPVDQYEDCYLARIPSHAVVARNGDGKEDLIWEILKVAQEHFGKGKSKDFQLFGSPLGKDLLFKDSRFGLLRAPKDGLQAVPRPQLCHCHSKSAGSCPDAIDSAPVKWCALSHQERAKCDEWSVTGNGQIECESAESTEDCIDKIVNGEADAMSLDGGHAYIAGQCGLVPVMAENYDISSCTNPQSDVFPKGYYAVAVVKASDSSINWNNLKGKKSCHTGVDRTAGWNIPMGLLFSRINHCKFDEFFSQGCAPGYKKNSTLCDLCIGPAKCAPNNREGYNGYTGAFQCLVEKGDVAFVKHQTVLENTNGKNTAAWAKDLKQEDFQLLCPDGTKKPVTEFATCHLAQAPNHVVVSRKEKAARVSTVLTAQKDLFWKGDKDCTGNFCLFRSSTKDLLFRDDTKCLTKLPEGTTYEEYLGAEYLQAVGNIRKCSTSRLLEACTFHKS

SEQ ID NO: 1481 - DNA, 846 bp, Rattus norvegicus
  ref <308>: DATABASE ACCESSION NUMBER: EMBL / D45247
  ref <309>: DATABASE ENTRY DATE: 1999-01-21
cgttgctgtcgggcgctggccagcgtgttgcagcggccgatgccggtgaatcagcacgggttttttggactcggaggtcgtgcagatctgctggacttgggtccggggagtcctggtgatgggctgagcctagccgcgccgagctggggtgtcccggaggagccacgaatcgaaatgcttcatggaaccaccaccctggccttcaagtttcagcatggagtcattgttgcagcggattcccgggccaccgcaggtccctacattgcttcccagacagtgaagaaagtgatagagatcaacccttaccttctgggcaccatggctgggggtgcagcggattgcagcttctgggagcggttgttggctcgacagtgtcgaatctatgagcttcgcaacaaggaacgcatctcggtcgcggcggcctccaaactgcttgccaacatggtgtatcagtacaaaggcatggggctgtccatgggcaccatgatctgtggctgggataagagaggcccgggcctctactatgtagacagtgaggggaacaggatctctggaaccgccttctcagtgggatctggctccgtgtatgcgtttggagtcatggatcgaggctactcctatgacctacaagtggaggaggcctatgacctggcccgccgagccatctaccaagccacctacagagatgcctactccggaggagcagtcaacctctaccatgtgcgggaggatggctggatccgtgtctccagtgacaatgtagctgacttacatgacaagtatacttcatctatcccctgagggaaggtggagtgccctggttataataaataatagtacccgttc

SEQ ID NO: 1482 - protein, 209 aa, Rattus norvegicus
  misc_feature (1)..(209): Xaa=Unknown amino acid
MLHGTTTLAFKFQHGVIVAADSRATAGPYIASQTVKKVIEINPYLLGTMAGGAADCSFWERLLARQCRIYELRNKERISVAAASKLLANMVYQYKGMGLSMGTMICGWDKRGPGLYYVDSEGNRISGTAFSVGSGSVYAFGVMDRGYSYDLQVEEAYDLARRAIYQATYRDAYSGGAVNLYHVREDGWIRVSSDNVADLHDKYTSSIPX

SEQ ID NO: 1483 - DNA, 3465 bp, Rattus norvegicus
  ref <308>: DATABASE ACCESSION NUMBER: Refseq / NM_019124
  ref <309>: DATABASE ENTRY DATE: 2003-01-14
acgctgcttccccgcccatccccgttctccaggccgcccactggccatggcgcagccgggcccggctccccagcctgacgtttctcttcagcaacgggtagcagaattggaaaaaattaatgcagaatttttacgtgcacagcagcagcttgagcaagaatttaatcaaaagagagcaaaatttaaggagctgtatttggctaaagaggaggatctgaagcggcaaaatgcagtattgcaagctgcgcaggatgacttgggtcaccttcggacacagctgtgggaggcgcaggcagaaatggagaatatcaaggcgatcgccacagtctctgagaacactaagcaagaagctatagatgaagttaaaaggcagtggagagaagaagttgcttcacttcaggctgtaatgaaagagactgtgcgtgactatgagcatcagtttcacctgaggctggagcaggaacgagcgcagtgggcacagtatcgagagtctgcagaccgggagatagctgacctaagaagaaggttgtctgaaggtcaagaggaagaaaatttagaaaatgaaatgaaaaaggcccaagaggatgccgagaagcttcgctctgtcgtgatgcccatggagaaggaaattgcagccctgaaagataaactgacagaagctgaagacaagattaaagagctggaggcctcaaaggttaaggaactgaatcattatctggaggccgagaagtcttgcaggactgatctggagatgtatgtagctgttttgaacacccagaaatctgttctacaggaagatgctgagaaattgaggaaagaactgcatgaagtttgccatctcttggagcaagagcgacaacaacacaaccagttaaaacacacgtggcagaaggccaacgaccagtttttggaatctcagcgcttgctgatgagagacatgcagcgaatggagatcgtgttaacttcagaacagctacgacaagttgaagaactgaagaagaaagatcaggaggaggatgaacaacaaaggatcaataagggaaaagataacaagaaaatagacactgaagaagaagtaaaaataccagtagtatgtgctttaactcaagaagaatcttcaaccccactatcaaatgaagaggagcatttagacagcacccatgggtcagtccattccttagatgcagacttgctgttaccatctggagatccattcagtaaatcggacaatgacatgtttaaagagggactccggagagctcagtctacagacagcttgggaacctcaagctcattgcaatccaaagctttaggctataactacaaagcaaaatctgctggaaatttggatgagtcggattttggaccactggttggagcagattctgtgtctgagaactttgatactgtgtcccttgggtcactgcagatgccaagtggatttatgttaaccaaagatcaagaaagagcaattaaggcaatgacacctgaacaggaggagacagcatccctcctctcaagtgtcacacagggtatggagagtgcatatgtctctcctagtggttaccgcttagtgagtgaaacggaatggaatctcctgcagaaagaggtacataatgctggaaataagcttggtagacgttgtgatatgtgttccaattatgaaaaacagttacaaggaattcagattcaggaagctgagacaagagaccaggtgaaaaaactgcagttaatgctcaggcaagctaatgaccagctagagaagacaatgaaagagaaacaggagctagaggacttcctcaggcagagtgccgaggactcaagccaccagatatctgcacttgttttaagagcccaagcctctgaggtattacttgaagagttacaacagagtttttcccaagcaaagagggatgttcaggagcagatggcagtgctgatgcagtcacgtgaacaggtctcagaagagctggtgaggttacagaaagacaatgacagcctccagggaaagcatagcttgcatgtgtcattacaactagcagaagacttcattcttccagatactgtgcaggtgctccgggaactggttttaaaatatcgtgagaacattgttcatgtgcggacagcagcagaccacatggaagagaagctgaaggctgaaatactttttctaaaagagcaaattcaggcggaacagtgtttaaaagaaaaccttgaagagacattacagctggaaattgaaaactgcaaggaggaaatagcttccatttctagtctaaaagctgaattagaaagaataaaagttgaaaagggacagttggaatctacattaagagagaagtcgcaacaacttgagagcctccaagaaataaaagttaatttagaggaacagttaaagaaggaaactgctgctaaggccactgttgaacagctcatgtttgaagagaagaacaaagctcagaggttgcagacagaattagatgtcagtgaacaagtccagagagattttgtaaaactttctcagactcttcaggtgcagttagagaggatccggcaagcagactccctggagaggatccgggcaattctgaatgataccaaactgacagacattaaccagctccctgagacatgacaccctgatggcaggattctgacctgcattttgggtttttaactcatctttagaataacattaattattatttaactcttaatggaagaagtcacagcaaaaggaggactggagaaatgcagttctggagggagaaggctgctgtgtgcagggacagccaacagacgtttcaaagggaacactaatgagacactggactcgattccaacaggcgtgggatcagattgggtgccagaaaagtgctgtttccttgcctgcttcctccagcgtggactctggaacataattcctgccatgaaagcaacttcccaatagtgtttggaattacgttttctgttcatacaaactgggagagaaaagtttctttctcctgtggtctggggctcatcagtagcagtgttcagctagcagagaggtgtagtgcgctgtgtgagtattttatattaaaatgtggagtgagagcaggccattggctattgattgtgtttcccttgttcaatgcattttgtttcctttttaaccattccttctattggaagaccttaaatgctattgtaacttgcttgagaactataggaccatggcaaacaaaagcaattaaaattaggagaatctgaatctttggctgaggccaatatatattatatatatatcaatttatggaaaaaaagcacaaataaccttggaagcactttgtctgcacaccatgatgaacttcctgggcccaaaggtaccagggcaaataactggcaccatctaccctttcgaagtgttttagttactggatcagtggaaaataatactaataaaacaagctatctcttacatct

SEQ ID NO: 1484 - protein, 862 aa, Rattus norvegicus
  ref <308>: DATABASE ACCESSION NUMBER: Refseq / NP_061997
  ref <309>: DATABASE ENTRY DATE: 2003-01-14
MAQPGPAPQPDVSLQQRVAELEKINAEFLRAQQQLEQEFNQKRAKFKELYLAKEEDLKRQNAVLQAAQDDLGHLRTQLWEAQAEMENIKAIATVSENTKQEAIDEVKRQWREEVASLQAVMKETVRDYEHQFHLRLEQERAQWAQYRESADREIADLRRRLSEGQEEENLENEMKKAQEDAEKLRSVVMPMEKEIAALKDKLTEAEDKIKELEASKVKELNHYLEAEKSCRTDLEMYVAVLNTQKSVLQEDAEKLRKELHEVCHLLEQERQQHNQLKHTWQKANDQFLESQRLLMRDMQRMEIVLTSEQLRQVEELKKKDQEEDEQQRINKGKDNKKIDTEEEVKIPVVCALTQEESSTPLSNEEEHLDSTHGSVHSLDADLLLPSGDPFSKSDNDMFKEGLRRAQSTDSLGTSSSLQSKALGYNYKAKSAGNLDESDFGPLVGADSVSENFDTVSLGSLQMPSGFMLTKDQERAIKAMTPEQEETASLLSSVTQGMESAYVSPSGYRLVSETEWNLLQKEVHNAGNKLGRRCDMCSNYEKQLQGIQIQEAETRDQVKKLQLMLRQANDQLEKTMKEKQELEDFLRQSAEDSSHQISALVLRAQASEVLLEELQQSFSQAKRDVQEQMAVLMQSREQVSEELVRLQKDNDSLQGKHSLHVSLQLAEDFILPDTVQVLRELVLKYRENIVHVRTAADHMEEKLKAEILFLKEQIQAEQCLKENLEETLQLEIENCKEEIASISSLKAELERIKVEKGQLESTLREKSQQLESLQEIKVNLEEQLKKETAAKATVEQLMFEEKNKAQRLQTELDVSEQVQRDFVKLSQTLQVQLERIRQADSLERIRAILNDTKLTDINQLPET

SEQ ID NO: 1485 - DNA, 2965 bp, Homo sapiens
  ref <308>: DATABASE ACCESSION NUMBER: Refseq / NM_004703
  ref <309>: DATABASE ENTRY DATE: 2002-05-14
gcggaggtcggcggtcgggtccgtctctgcccgcggctgtggcggcgccggcggatccagccttagcgttcctctctgggcggcggcggcggcggctcggttgacgcctcctccgccagctgagcccgcgggagcccaggacgccgcttccccgcccatccccgctccccgaggccggccgcctggtcatggcgcagccgggcccggcttcccagcctgacgtttctcttcagcaacgggtagcagaattggaaaaaattaatgcagaatttttacgtgcacaacagcagcttgaacaagaatttaatcaaaagagagcaaaatttaaggagttatatttggctaaagaggaggatctgaagaggcaaaatgcagtattacaagctgcacaagatgatttgggacaccttcgaacccagctgtgggaagctcaagcagagatggagaatattaaggcgattgccacagtctctgagaacaccaagcaagaagctatagatgaagtgaaaagacagtggagagaagaagttgcttcacttcaggctgttatgaaagaaacagttcgtgactatgagcaccagttccaccttaggctggagcaggagcgaacacagtgggcacagtatagagaatacgcagagagggaaatagctgatttaagaagaaggctgtctgaaggtcaagaggaggaaaatttagaaaatgaaatgaaaaaggcccaagaggatgctgagaaacttcggtccgttgtgatgccaatggaaaaggaaattgcagctttgaaggataaactgacagaggctgaagacaaaattaaagagctggaggcctcaaaggttaaagaactgaatcattatctggaagctgagaaatcttgtaggactgatctagagatgtatgtagctgttttgaatactcagaaatctgttctacaggaagatgctgagaaactgcggaaagaattgcatgaagtttgccatctcttggagcaagagcgacaacaacacaaccagttaaaacatacgtggcagaaggccaatgaccagtttctggaatctcagcgtttactgatgagagacatgcagcgaatggagattgtgctaacttcagaacagctccgacaagttgaagaactgaagaagaaagatcaggaggatgatgaacaacaaagactcaataagagaaaggatcacaaaaaagcagatgttgaggaagaaataaaaataccagtagtgtgtgctttaactcaagaagaatcttcagcccagttatcaaatgaagaggagcatttagacagcacccgtggctcagttcattccttagatgcaggcttgctgttgccatctggagatcctttcagtaaatcggacaatgacatgtttaaagatggactcaggagagcacagtctacagacagcttgggaacctcgggctcattgcaatccaaagctttaggctataactacaaagcaaaatctgctggaaacctggacgagtcagattttggaccactggtaggagcagattcagtgtctgagaactttgatactgcatcccttgggtcactccagatgccaagtgggtttatgttaaccaaagatcaggaaagagcaatcaaggcgatgacaccagaacaagaagagacagcgtccctcctctccagcgttacccagggcatggagagtgcctatgtgtcccctagtggttatcgtttagttagtgaaacagaatggaatctcttgcagaaagaggtacataatgctggaaataaacttggtagacgttgtgatatgtgttccaattacgaaaaacagttacaaggaattcagattcaggaggctgaaacgagagaccaggtgaaaaaactacagctgatgctaaggcaagctaatgaccagttagagaagacaatgaaagataagcaggagctggaagacttcataaagcaaagcagcgaagattcgagtcaccagatctctgcactcgtcctaagagcccaggcctccgagatcttacttgaagagttacagcaggggctttcccaggcaaagagggatgttcaggaacagatggcggtgctgatgcagtcacgggaacaggtttcagaagagctggtgaggttacagaaagataatgacagtctccagggaaagcacagcctgcatgtgtcattacagcaagcagaagacttcatcctcccagacactacagaggcactgcgggagttggtattaaaataccgtgaggacatcattaatgtgcggacagcagcagaccacgtagaagaaaagctgaaggctgagatacttttcctaaaagagcagatccaagcagaacagtgtttaaaagaaaatcttgaagaaactctgcaactagaaatagaaaactgcaaggaggaaatagcttctatttctagcctaaaagctgaattagaaagaataaaagtggaaaaaggacagttggagtccacattaagagagaagtctcaacagcttgagagtcttcaggaaataaagatcagtttggaagagcagttaaagaaagagactgctgctaaggctaccgttgaacagctaatgtttgaagagaagaacaaagctcagagattacagacagaattagatgtcagtgagcaagtccagagagattttgtaaagctttcacagacccttcaggtgcagttagagcggatccggcaagctgactccttggagagaatccgggcaattctgaatgatactaaactgacagacattaaccagcttcctgagacatgacaccctcatggcaggattctagcctgcactttgggtttttaactcatctttagagcaacagtaattattatttaactcttaactgaagaaagagaagtcacaacaaaaggaagactggagaaatgcttacttctagagggagaagactgtgcggcacaggaaacagcaaacagtggggtgatctgcag

SEQ ID NO: 1486 - protein, 862 aa, Homo sapiens
  ref <308>: DATABASE ACCESSION NUMBER: Refseq / NP_004694
  ref <309>: DATABASE ENTRY DATE: 2002-05-14
MAQPGPASQPDVSLQQRVAELEKINAEFLRAQQQLEQEFNQKRAKFKELYLAKEEDLKRQNAVLQAAQDDLGHLRTQLWEAQAEMENIKAIATVSENTKQEAIDEVKRQWREEVASLQAVMKETVRDYEHQFHLRLEQERTQWAQYREYAEREIADLRRRLSEGQEEENLENEMKKAQEDAEKLRSVVMPMEKEIAALKDKLTEAEDKIKELEASKVKELNHYLEAEKSCRTDLEMYVAVLNTQKSVLQEDAEKLRKELHEVCHLLEQERQQHNQLKHTWQKANDQFLESQRLLMRDMQRMEIVLTSEQLRQVEELKKKDQEDDEQQRLNKRKDHKKADVEEEIKIPVVCALTQEESSAQLSNEEEHLDSTRGSVHSLDAGLLLPSGDPFSKSDNDMFKDGLRRAQSTDSLGTSGSLQSKALGYNYKAKSAGNLDESDFGPLVGADSVSENFDTASLGSLQMPSGFMLTKDQERAIKAMTPEQEETASLLSSVTQGMESAYVSPSGYRLVSETEWNLLQKEVHNAGNKLGRRCDMCSNYEKQLQGIQIQEAETRDQVKKLQLMLRQANDQLEKTMKDKQELEDFIKQSSEDSSHQISALVLRAQASEILLEELQQGLSQAKRDVQEQMAVLMQSREQVSEELVRLQKDNDSLQGKHSLHVSLQQAEDFILPDTTEALRELVLKYREDIINVRTAADHVEEKLKAEILFLKEQIQAEQCLKENLEETLQLEIENCKEEIASISSLKAELERIKVEKGQLESTLREKSQQLESLQEIKISLEEQLKKETAAKATVEQLMFEEKNKAQRLQTELDVSEQVQRDFVKLSQTLQVQLERIRQADSLERIRAILNDTKLTDINQLPET

SEQ ID NO: 1487 - DNA, 2337 bp, Rattus norvegicus
  ref <308>: DATABASE ACCESSION NUMBER: Refseq / NM_017041
  ref <309>: DATABASE ENTRY DATE: 2002-11-05
cgggaggaggagtgaaggcggcggcggcggaggagggacgcgcggagccggcagtaactttcgagccagcccagagcccggagctccagccgagcggtttgcagcgcggcggcgcggcgctgagtgtctggcccgccggtgcggtcggggtgtgcagtcggacgggaccagcagcgcgtcgctgtccccccctcccggtgactggagatgtccgagcccaaggcgattgatcccaagttgtcgactacggacagggtggtgaaagccgttccatttccgccaagtcaccggctgacagcaaaggaagtgtttgataacgatgggaagcctcgtgtggatatcttaaaagcacatctcatgaaggaaggcaggctggaagaaagtgtcgcgttgagaataataacagagggtgcttcgattctccgacaggaaaaaaacttgctggatattgatgccccagtcacagtttgcggggacatccatggacaattctttgacttgatgaagctctttgaagtgggaggatctcctgccaacactcgctacctcttcttaggggactatgttgacagagggtacttcagtatcgaatgtgtgctgtatttgtgggccttgaaaattctttaccccaaaacactgtttttacttcgtggaaaccatgaatgtaggcacctaacagagtatttcacgtttaaacaagaatgtaaaataaagtattcagaacgcgtttatgacgcctgtatggatgccttcgactgccttcccctggctgcgctgatgaaccaacaattcctgtgtgtacacggtggtttgtctccagagattaacactctagatgacatcagaaaattagaccgattcaaagaaccacctgcttatgggcctatgtgtgacatcttgtggtcagaccccctggaggactttggaaatgagaagactcaggaacatttcactcacaacacagtcaggggttgttcgtacttctacagttacccggctgtatgtgacttcctgcagcacaataatttgttgtccatactccgagcccacgaagcccaggacgcagggtaccgcatgtacaggaaaagccaaacaactggcttcccgtctctaattacgatcttctcggcaccaaattacttagatgtgtacaataataaagctgcagtgttgaagtacgagaacaacgtgatgaacatcaggcagttcaactgctccccccatccgtactggctcccaaatttcatggatgttttcacctggtcgctgccatttgttggggagaaagtgactgagatgctggtaaacgtcctgaacatctgctcagatgatgaactggggtcagaagaagatggatttgacggagccacggctgcagcccggaaggaggtcatcaggaacaagatccgagcaataggcaaaatggccagagtattctcagttctcagagaagagagtgagagcgttctaactctgaagggcctgaccccgactggcatgctccccagcggagtgctctctggcgggaaacaaactctgcaaagcgctactgttgaggccattgaggctgatgaagccatcaaaggattctcaccacaacataagattaccagcttcgaggaggccaagggcttagaccgaattaacgagaggatgccgcctcgcagagacgccatgccttccgacgccaaccttaactccatcaacaaggctctcgcctcagagactaacggcacagacagcaacggcagtaatagcagcaatattcagtgaccacttcctgttcactttttttttttgagctgcagggcatgatgggtttgctgcatctcagcagttggatgttcttgcctctgacggtagcttgtttgctctgggggggccaggaattggattcagtttacactatcatgaaaaaaaaaaagagggagagagagagagataataaaactatattttggtgagggtggtgattaaacacctcttttgggtatgcctttaaaaatgcttctaggaaaaaaaaagttttaaaaagaaagctaatgctagtctatacttcaatgttaggggaatgaacacgttttcctagcgcactggggacttttagataggttaatgaaaggccttttattctgttactggacacgaaaactttgtctaatttcttatactctattgtacgtttacagtcgcagcactaaaaatggatgacatcaaacatttttaaacagaaaaaaaagatgtacaaactaaataaggactatttattgataatgttttgctactcttgtcagacaatggctataaactgaattaggcagtcttaaaaaaaaaccg

SEQ ID NO: 1488 - protein, 521 aa, Rattus norvegicus
  ref <308>: DATABASE ACCESSION NUMBER: Refseq / NP_058737
  ref <309>: DATABASE ENTRY DATE: 2002-11-05
MSEPKAIDPKLSTTDRVVKAVPFPPSHRLTAKEVFDNDGKPRVDILKAHLMKEGRLEESVALRIITEGASILRQEKNLLDIDAPVTVCGDIHGQFFDLMKLFEVGGSPANTRYLFLGDYVDRGYFSIECVLYLWALKILYPKTLFLLRGNHECRHLTEYFTFKQECKIKYSERVYDACMDAFDCLPLAALMNQQFLCVHGGLSPEINTLDDIRKLDRFKEPPAYGPMCDILWSDPLEDFGNEKTQEHFTHNTVRGCSYFYSYPAVCDFLQHNNLLSILRAHEAQDAGYRMYRKSQTTGFPSLITIFSAPNYLDVYNNKAAVLKYENNVMNIRQFNCSPHPYWLPNFMDVFTWSLPFVGEKVTEMLVNVLNICSDDELGSEEDGFDGATAAARKEVIRNKIRAIGKMARVFSVLREESESVLTLKGLTPTGMLPSGVLSGGKQTLQSATVEAIEADEAIKGFSPQHKITSFEEAKGLDRINERMPPRRDAMPSDANLNSINKALASETNGTDSNGSNSSNIQ

SEQ ID NO: 1489 - DNA, 6071 bp, Rattus norvegicus
  ref <308>: DATABASE ACCESSION NUMBER: Refseq / NM_019299
  ref <309>: DATABASE ENTRY DATE: 2003-01-14
ccctcccttccccttctcctcctctcccttggagagcccgggcaggcactgccctgcagccccagtgacaggaggagaccatactccccgacagcgccatggcccagattctgccaattcgctttcaggagcatctccagctccagaacctgggtatcaacccagcaaacattggcttcagtaccctgactatggagtcagacaaattcatctgcattagagaaaaagtgggagagcaggctcaggtggtgatcattgacatgaatgatccaagtaatccgattcgaagaccaatctcagcagacagtgccatcatgaatcctgccagcaaagtgattgcactgaaagctggaaaaactctacagatatttaacattgaaatgaaaagtaaaatgaaggcccacaccatgaccgatgatgtcaccttctggaaatggatctctctgaatacggttgctcttgttacggataatgcagtttatcactggagcatggagggggagtctcagccagtgaagatgtttgatcgtcattccagcctcgcagggtgccagatcatcaattaccgtacagatgctaagcagaagtggttgctcctgactggcatatctgcacagcaaaatcgcgtggttggagctatgcagctgtattctgtagacaggaaagtctctcagcccattgaagggcatgcggcgagttttgcacaatttaagatggaaggaaacgcagaagaatcgacgttattttgttttgctgtgcggggtcaggcaggggggaagttacatatcattgaagttggtacaccacccacaggaaaccaaccctttccaaagaaggcagtggatgtcttctttcctccagaagcacaaaatgattttcctgttgcaatgcagatcagtgaaaagcatgacgtggtgttcctgattaccaagtatggttatattcacctctatgaccttgagactggcacgtgcatctacatgaacagaatcagtggagaaaccatctttgttactgctcctcatgaagccacagctggaataataggagtcaacagaaagggacaagtcctatcagtttgtgtggaagaagagaacataattccttacatcaccaatgtcctacaaaatcctgatttggctctgagaatggctgtgcggaacaacctagctggtgcagaagagctcttcgcccggaaatttaatgctctcttcgcccagggaaactactcagaggctgcaaaggtggctgctaatgcaccgaagggaatccttcgtactccagataccatccgtcgattccagagtgtcccagctcagccaggtcaaacttcacctctgcttcagtattttggaatccttttggaccaaggccagctgaacaaatacgagtccttagagttatgtagacctgtccttcagcaagggcggaaacaacttttggagaaatggctgaaagaagataagctggaatgttctgaagaactgggtgatctcgtaaaatctgtggacccaacgttagcactgagtgtatacctcagggccaatgtccctaataaagtcatccagtgctttgcagagacaggtcaagtccagaagattgttttatatgctaaaaaagttggctatactccagactggatctttctcctgagaaatgtcatgcggatcagtccagatcaaggacagcagtttgcccaaatgttagttcaggacgaagaacctcttgctgatatcacacagattgtggatgtctttatggaatacaatctaatccaacaatgtactgccttcttacttgatgctttgaagaataatcgcccttctgaaggtcctttgcagacgcgattgcttgagatgaaccttatgcacgcacctcaagttgcagatgccattctagggaatcagatgttcacccactatgaccgggctcacatcgcccagctgtgtgagaaggcgggcctactgcagcgtgcattagaacatttcaccgacttatatgatataaaacgagcagtcgttcatacccatcttctcaaccccgagtggttagtgaattactttgggtccttatcagttgaagattccctagaatgtctcagagccatgctgtctgctaatattcgtcaaaatctacagatctgggttcaggtcgcttctaaatatcatgaacagctgtcaactcagtccctgattgaactcttcgagtcattcaagagttttgaaggcctcttttattttctggggtccattgttaacttcagtcaagacccagatgtgcactttaaatatattcaggcggcttgcaagactggacaaatcaaagaggtggaaagaatctgcagagagagcaactgctatgatccagagcgcgtcaagaatttcctcaaggaggcgaaactcacagatcagttgccactcatcatcgtctgtgaccgctttgacttcgtccatgacctggtgctgtatttatacagaaacagtcttcagaagtacatagagatatatgtccagaaagtaaatccaagtcgacttcctgtggttattggaggattgctggatgttgactgctctgaagatgtcattaaaaatttgattcttgttgtgagaggtcaattctctactgatgagcttgttgctgaagttgagaaaagaaacagattgaagctgcttcttccttggcttgaggctagaattcatgagggctgtgaggagcctgctacacacaatgcgttagccaaaatatacatcgacagcaataacaacccagagagattccttcgtgaaaacccctactatgacagtcgtgtcgtgggaaagtactgtgagaagagagacccacatctggcctgtgttgcttatgaacgtggccagtgtgatctggaactaatcaacgtttgcaatgagaattccctcttcaaaagtctttctcgctacctggtccgtcgaaaggatccagagttgtggggtagtgtgctactggaaagcaatccatacagaagaccattaattgaccaggtcgtacagacagccttgtctgaaactcaggacccagaagaagtgtcagtaactgtcaaggcttttatgacagcagatcttcctaatgaactcattgagctgctggagaaaattgtccttgataactctgtattcagtgaacacaggaatctgcaaaacctcctcatcctcactgcaattaaggctgaccgaacccgagttatggagtatattaaccgcctggacaattatgatgcgccagatattgccaacattgccatcagcaatgagctcttcgaagaagcatttgctattttccggaagtttgatgtcaatacttcagcagtgcaggtgttaattgaacatattggaaacctggatcgtgcatatgagtttgctgaacgctgcaatgagcctgctgtttggagtcaactcgcaaaagctcagttgcagaaagggatggtgaaggaagccattgattcttacatcaaagcagatgatccttcgtcttacatggaagttgttcaggccgccaatactagtggaaactgggaagaattggtgaagtatttgcagatggcacgcaagaaggcccgagagtcctacgtggagacagaattgatatttgcactggctaaaacaaaccgtcttgcagaattagaagagttcatcaatgggccaaataatgctcatattcagcaagttggtgaccgttgttatgatgagaaaatgtatgatgctgctaagttgttgtacaataatgtttctaactttggacgtttggcgtctaccctagttcaccttggcgagtatcaggcagcagttgatggtgctagaaaagctaatagtactcgaacatggaaagaggtctgctttgcctgtgtagatgggaaagagtttcgccttgctcagatgtgtggactccatattgttgtgcatgcagatgaattagaggagcttatcaactactatcaggatcgtggatattttgaagaactcatcaccatgttggaggcagccttgggactagagcgagctcacatgggaatgttcacagagctagcaattttgtattctaaattcaagccacagaaaatgagggaacacctagagttgttttggtcaagagtgaatattcctaaggtgctgagagccgcagagcaagcccatctttgggcagagctggtgtttctgtatgacaagtatgaagagtatgataatgccatcatcactatgatgaatcaccccaccgacgcatggaaggaagggcagttcaaagacatcatcaccaaggtggctaatgtggaactgtactacaaagcaatccagttctacttagaattcaagcccttgttgttaaatgacttgctcatggtgctgtctccacggttggctcatactcgtgcagtcaattatttcagcaaggttaaacagctaccactggtgaaaccatatttacgctcagttcagaaccacaacaacaagtccgtgaacgaatccctgaacaacctctttatcacagaggaggattaccaggctctgcgaacatcaatagatgcttatgacaactttgacaacatctcacttgctcaacgtttggaaaaacatgaactcattgaattcagaagaattgctgcttatctcttcaaaggaaacaatcgctggaaacagagtgtggagctgtgcaagaaagacagcctttacaaggatgcaatgcagtatgcctctgaatcgaaagacacagaattggctgaagaactcctgcagtggtttctgcaggaagagaagagagaatgctttggagcttgtctcttcacctgctacgatcttttaaggccagatgttgtcctggaaactgcatggagacataatatcatggattttgccatgccctatttcatccaggtcatgaaggagtatttgaccaaggtggataaattagatgcttcggagtcactgagaaaagaagaagaacaagctacagagacacagcccattgtttatggtcagccccagctgatgctaacagccggacccagtgtggcagtccctccccaggcaccttttggttatggttatactgcaccaccatatgggcagccacagcctggctttgggtacagcatgtgagacggaagctgatcccgtagtctcctattttcatactgaagcatcgtccacccacttctcagtttataaacgggaaacaggcaacgtgttcttgtaacctttacttcatgaaggactacctttttgttctaactatagactcggatcgcctaggttaaaactttattttcacattccgcatcattagaccttcttttcaaaggggaatagtactcacgtgggctttttctccccctcattctttgaagaactgattactattcaatctattgtgaagaacctgatttgcactctgtagtgtttaaagaaacaaagaaactctaatattgaatctcttaaatttagtgtatgtaaacagctttcactatgtattctgtaaatgcaccccattctcttttattcaaagaaaagctaacgtgaaaatactgctatgtgaccatgcaagactgtcagagccaacaaagacaacactaatcagcatatcttacattggaatcacagcgctctccaaattatttgaaaatgcatacagacaacttgcctgattttttttttttttaaaacgagtatcacaggccctgtaacctatgcaggtttccccattatgcatatagaaaatgctagtgtgttgctcacttcatgtgtaacaggtgccctcatgttgtgctgtatcctgtgctttttctgtgggaccattccattcaggaacaaagagcaccatgactgcacacgtgtgtatttactaacccttccctgaggtgtgtgtatgttggatattgtggtgttttagatcactgagtgtacagaagagagaattcaaacaagatattgctgttcttcagttttgttcgtggaatttgaaattactccaatttaaaataaattactggactgtggaaataacatgtagaattgcagttttaattaaatacatctcaaaaccag

SEQ ID NO: 1490 - protein, 1675 aa, Rattus norvegicus
  ref <308>: DATABASE ACCESSION NUMBER: Refseq / NP_062172
  ref <309>: DATABASE ENTRY DATE: 2003-01-14
MAQILPIRFQEHLQLQNLGINPANIGFSTLTMESDKFICIREKVGEQAQVVIIDMNDPSNPIRRPISADSAIMNPASKVIALKAGKTLQIFNIEMKSKMKAHTMTDDVTFWKWISLNTVALVTDNAVYHWSMEGESQPVKMFDRHSSLAGCQIINYRTDAKQKWLLLTGISAQQNRVVGAMQLYSVDRKVSQPIEGHAASFAQFKMEGNAEESTLFCFAVRGQAGGKLHIIEVGTPPTGNQPFPKKAVDVFFPPEAQNDFPVAMQISEKHDVVFLITKYGYIHLYDLETGTCIYMNRISGETIFVTAPHEATAGIIGVNRKGQVLSVCVEEENIIPYITNVLQNPDLALRMAVRNNLAGAEELFARKFNALFAQGNYSEAAKVAANAPKGILRTPDTIRRFQSVPAQPGQTSPLLQYFGILLDQGQLNKYESLELCRPVLQQGRKQLLEKWLKEDKLECSEELGDLVKSVDPTLALSVYLRANVPNKVIQCFAETGQVQKIVLYAKKVGYTPDWIFLLRNVMRISPDQGQQFAQMLVQDEEPLADITQIVDVFMEYNLIQQCTAFLLDALKNNRPSEGPLQTRLLEMNLMHAPQVADAILGNQMFTHYDRAHIAQLCEKAGLLQRALEHFTDLYDIKRAVVHTHLLNPEWLVNYFGSLSVEDSLECLRAMLSANIRQNLQIWVQVASKYHEQLSTQSLIELFESFKSFEGLFYFLGSIVNFSQDPDVHFKYIQAACKTGQIKEVERICRESNCYDPERVKNFLKEAKLTDQLPLIIVCDRFDFVHDLVLYLYRNSLQKYIEIYVQKVNPSRLPVVIGGLLDVDCSEDVIKNLILVVRGQFSTDELVAEVEKRNRLKLLLPWLEARIHEGCEEPATHNALAKIYIDSNNNPERFLRENPYYDSRVVGKYCEKRDPHLACVAYERGQCDLELINVCNENSLFKSLSRYLVRRKDPELWGSVLLESNPYRRPLIDQVVQTALSETQDPEEVSVTVKAFMTADLPNELIELLEKIVLDNSVFSEHRNLQNLLILTAIKADRTRVMEYINRLDNYDAPDIANIAISNELFEEAFAIFRKFDVNTSAVQVLIEHIGNLDRAYEFAERCNEPAVWSQLAKAQLQKGMVKEAIDSYIKADDPSSYMEVVQAANTSGNWEELVKYLQMARKKARESYVETELIFALAKTNRLAELEEFINGPNNAHIQQVGDRCYDEKMYDAAKLLYNNVSNFGRLASTLVHLGEYQAAVDGARKANSTRTWKEVCFACVDGKEFRLAQMCGLHIVVHADELEELINYYQDRGYFEELITMLEAALGLERAHMGMFTELAILYSKFKPQKMREHLELFWSRVNIPKVLRAAEQAHLWAELVFLYDKYEEYDNAIITMMNHPTDAWKEGQFKDIITKVANVELYYKAIQFYLEFKPLLLNDLLMVLSPRLAHTRAVNYFSKVKQLPLVKPYLRSVQNHNNKSVNESLNNLFITEEDYQALRTSIDAYDNFDNISLAQRLEKHELIEFRRIAAYLFKGNNRWKQSVELCKKDSLYKDAMQYASESKDTELAEELLQWFLQEEKRECFGACLFTCYDLLRPDVVLETAWRHNIMDFAMPYFIQVMKEYLTKVDKLDASESLRKEEEQATETQPIVYGQPQLMLTAGPSVAVPPQAPFGYGYTAPPYGQPQPGFGYSM

SEQ ID NO: 1491 - DNA, 573 bp, Rattus norvegicus
  ref <308>: DATABASE ACCESSION NUMBER: Refseq / NM_031114
  ref <309>: DATABASE ENTRY DATE: 2002-02-01
aagactgcagcgcctcagggcccaggtttcaacagattcttcaaaatgccatcccaaatggagcatgccatggaaaccatgatgcttacatttcacaggtttgcaggggaaaaaaactacttgacaaaggaggacctgagagtgctcatggaaagggagttccctgggtttttggaaaatcaaaaggaccctctggctgtggacaaaataatgaaagacctggaccagtgccgagatggaaaagtgggcttccagagctttctatcactagtggcggggctcatcattgcatgcaatgactattttgtagtacacatgaagcagaagaagtaggccaactggagccctggtacccacaccttgatgcgtcctctcccatggggtcaactgaggaatctgccccactgcttcctgtgagcagatcaggacccttaggaaatgtgcaaataacatccaactccaattcgacaagcagagaaagaaaagttaatccaatgacagaggagctttcgagttttatattgtttgcatccggttgccctcaataaagaaagtctttttttttaagttccg

SEQ ID NO: 1492 - protein, 95 aa, Rattus norvegicus
  ref <308>: DATABASE ACCESSION NUMBER: Refseq / NP_112376
  ref <309>: DATABASE ENTRY DATE: 2002-02-01
MPSQMEHAMETMMLTFHRFAGEKNYLTKEDLRVLMEREFPGFLENQKDPLAVDKIMKDLDQCRDGKVGFQSFLSLVAGLIIACNDYFVVHMKQKK

SEQ ID NO: 1493 - DNA, 588 bp, Homo sapiens
  ref <308>: DATABASE ACCESSION NUMBER: EMBL / BG311149
  ref <309>: DATABASE ENTRY DATE: 2002-03-15
ttccaggactgctgcgcttcggggcccaggtttcgacagactcttcaaaatgccatcccaaatggagcacgccatggaaaccatgatgcttacgtttcacaggtttgcaggcgacaaagaccacttgacaaaggaggacctgagagtgctcatggaacgggagttccctgggtttttggaaaatcaaaaggatcctctggctgtggacaaaataatgaaggacctggaccggtgccgagatggcaaagtgggcttccagagctttctatcactagtggcggggctcaccattgcatgcaatgactattttgtagtaaacatgaagcagaaggggaagaaataggccaactggagcactggtacccccaccctggtgcgtgttcacccacggggtcacttgaggaatctgccccactgcttcttgtgagcagatcaggacccttaggaaatgtgcaaatgagatccaactccaattcaacaatctgagagagaaaacttaatccaatggcagagaagcttctgagttttatattgtttgcatcccattgccctcaataaagaaagtcctttttttaaaaaaaaaaaaaa

SEQ ID NO: 1494 - DNA, 615 bp, Rattus norvegicus; identical to SEQ ID NO: 839
  ref <308>: DATABASE ACCESSION NUMBER: EMBL / K02816
  ref <309>: DATABASE ENTRY DATE: 2000-03-04

SEQ ID NO: 1495 - DNA, 8806 bp, Rattus norvegicus
  ref <308>: DATABASE ACCESSION NUMBER: Refseq / NM_013138
  ref <309>: DATABASE ENTRY DATE: 2002-11-14
ccggatcgtccaagtcgccgggctgcgaggtggcactgcgctcctttccgcccagcgcgcctcagtcctctgcaccgagcctggcagctcgcttctgggcgactttgccgcctcgagccccggaggccaaagccatgaatgaaatgtccagctttcttcacatcggggacattgtgtccctgtacgccgagggctctgtcaacggcttcatcagcactttggggctggtggatgaccgttgtgtggtggagcctgcagctggggacctggacaacccccccaagaagttccgagattgcctcttcaaagtgtgccccatgaaccgctactccgcacagaagcagtactggaaagccaagcagactaagcaggacaaagagaagatcgccgatgtggtgttgctgcagaagctgcagcatgcagcccagatggagcagaagcaaaacgacacagagaacaagaaggtgcacggggacgtggtgaagtacggcagcgtgattcagcttctgcacatgaagagcaacaaatacttaacggtgaacaagcggctgccggccctgctggagaagaacgccatgcgggtgacgctggacgcgacgggcaacgagggctcctggctcttcatccagcccttctggaagcttcggagcaatggggataacgtggttgtgggggacaaggtgatcctgaaccctgtcaacgcagggcagcctctacacgccagcaactatgagcttagtgataacgttggctgcaaggaggtcaactctgtcaactgcaacaccagctggaagatcaacttattcatgcagttccgggaccatctggaggaggtgttgaaggggggagacgtggtgcggctgttccatgcagagcaggagaagttcctgacctgtgacgagtaccggggcaagcttcaggtgttcctgaggaccacgctgcgtcagtccgccacctcggccaccagctccaacgcgctctgggaggtggaggtggtccaccatgacccctgccgcggcggagcgggacactggaatggtctgtacaggttcaagcacctggccacgggcaactatctggcggctgaggaaaaccccagctacaagggtgatgtctcagatcctaaggcagcaggaccaggggcccagagccgcacaggccgcagaaacgccggcgagaagatcaagtaccgtctggtggctgtgccacatggcaacgacatcgcgtctctcttcgagctggaccccaccacgctgcagaaaaccgactccttcgtgccccggaactcctacgtgcggctgcggcacctctgtaccaacacctggatccagagcacgaacgcgcccatcgacgtggaggaggaacggcctatccggctcatgttgggcacgtgccccaccaaggaggacaaggaggcctttgccattgtgtcggttcccgtgtctgagatccgcgacctggactttgccaacgatgcaagctccatgctggccagcgctgtggagaaactcaacgagggcttcatcagccagaacgaccgcaggtttgtcatccagctgttggaggacttggtgttttttgtcagcgatgttcccaacaatgggcagaatgtcctggacatcatggtcaccaaacccaaccgagagcggcagaagctgatgcgggacgagaacatacttaagcagatctttggcatcctgaaggctccattccgtgacaaggggggtgaagggccattggtgcgtctggaggaactgtctgaccagaagaacgccccctaccagtacatgttccgcctgtgttaccgggtgctccggcactcccaggaggactaccgtaagaaccaggagcacatagccaagcagttcgggatgatgcagtcacagattggctatgacatcctggccgaagacaccatcacggccctgctgcacaacaaccggaagctgctggagaagcacatcaccaagaccgaggtggaaaccttcgtgagcctcgtgcgcaagaacagggagcccaggttcctggactacctctccgacctgtgcgtgtccaaccgcattgccatccccgtcacccaggagctgatttgcaagtgtgtgctggaccccaagaacagtgacatccttatccagactgagcttcggcccgtgaaggagatggctcagtctcacgagtacctcagcatcgagtactcggaggaggaggtgtggctcacatggacggacaggaacaacgagcatcacgagaagagtgtgaggcagctggcccaggaggcaagggccggcaacgcacacgacgagaacgtgctcagctactacaggtaccagttgaagctgtttgcccgcatgtgcctagaccgccagtacctggccatcgacgagatctccaagcaactgggtgtggagctgcttttcctatgcatggcggacgagatgctgccctttgacctccgcgcctcattctgccacctgatgctacatgtgcacgtggaccgtgacccccaggagctggtgacccctgtcaagtttgcccgcctctggacagagatccccacggccatcaccatcaaagactatgattccaatctcaacgcctcccgagatgacaagaaaaacaagtttgccagcaccatggagttcgtggaggattaccttaacaacgtggtcggcgaggccgtgccctttgccaacgatgagaagaacatactgacctttgaggtggtcagcctggcacacaacctcatctacttcgggttctacagcttcagcgagctgctgcgactcacacgcacgttgctgggcatcatcgactgcattcaggcaccagccgctgtgctgcaggcctatgaggagcctggcggcaagaacgtgcggaggtccatccagggggtgggacacatgatgtccaccatggtgctaagccgcaagcagtctgtatttggtgcctccagcctgcctactggagtgggtgtccccgagcagctggacagaagcaaatttgaggacaatgaacacaccgtggtgatggagaccaagctgaagatcctggagatcctgcagttcatcctcaacgtgcgcctagactaccgcatctcctacctgctgtcggtcttcaagaaggagtttgtggaggtctttcccatgcaggacagcggggcagacggcacagcccccgccttcgattcctctactgccaacatgaatctggaccgcatcggggagcaggcagaggccatgtttggagtagggaagaccagcagcatgctagaggtggatgacgaagggggtcgcatgttcctgcgagtgctgctgcacctcaccatgcacgactacccacctctggtctccggcgccctgcagctgctcttcaaacatttcagccagcgccaggaggccatgcacaccttcaagcaggtgcagctgctcatctcagcccaggatgtggagaactacaaagtgatcaagtcggaactggatcgactgcggacgatggtggagaagtcggagctgtgggtggacaagaaaggcagcgtcaagggcgaggagggggaggcgggcgccagcaaggataagaaggagcggccctcggatgaggagggatttctgcagccacacggggagaagagcagtgagaactaccagattgtcaaaggcatcctggagaggctgaacaagatgtgtggggtcggggagcagatgcgaaagaagcaacagagactgctgaagaacatggacgcccacaaggtcatgctggacctgctgcagatcccttatgacaagaacgacaacaagatgatggagatcctgcgctacacacaccagttcctacagaagttctgtgccgggaaccctggcaaccaggcccttctgcacaagcacttgcagctcttcctcacgcccgggctcctggaggctgagaccatgcagcacattttcctcaacaactatcagctgtgctctgagatcagcgagccggtgctgcaacacttcgtgcactgctggccgacacacgggcgccacgtgcagtacctggacttcctgcataccgtcatcaaggccgagggcaagtacgtgaagaagtgtcaggacatgatcatgaccgagctgaccaacgcaggcgacgacgtggtggtgttctacaatgacaaggcctctctggcccatctgctggacatgatgaaggcagcccgagatggcgtggaggaccacagccccctcatgtaccacatctccctggtggacttgctggctgcctgtgcagaaggcaaaaatgtctacacagagatcaagtgcacttccctgctgcctctagaggacgtggtgtcggtggtgacccacgaggactgcatcacggaggttaaaatggcgtatgtgaacttcgtgaaccactgctatgtagacacggaggtggagatgaaggagatctataccagcaaccacatctggacgctcttcgagaacttcaccctggacatggctctggtctgtaacaagcgggagaagcgcctgtcagaccccacccttgagaagtacgtgctcaccgtggtgctggacaccatcagcgccttcttcagttccccattttcagagaacagcacatccctacagacgcatcagacaattgtggttcagctgctgcagtccaccacccggctgctcgagtgtccttggctgcagcagcagcacaagggctcggtggaggcctgtgtccgcaccctcgccatggtggccaagagtagagccatcttgctgccgatggatctggatgcccacatgagcgctctgctcagcagtgggggcagctgctcagccgcggcccaacgcagcgctgccaactacaagacggccacgaggaccttccctcgggtcatccccaccgccaaccagtgggactacaagaacatcattgagaagttacaggacatcatcacggccctagaagagcggctgaagcctctggtgcaggccgagctctcggtgctggtggacatgctgcactggcccgagctgctctttctagagggcagtgaggcctaccagcgctgcgagagtggcggcttcctgtccaagctcatccgtcacaccaagggtctcatggagtcggaggagaagctgtgcgtgaaggtgctgcggacgctgcagcagatgctgcagaagaagagcaagtatggggaccggggcaaccagctaaggaagatgctgctgcagaattacctccagaaccggaagtccggtccccggggcgagctcactgaccccacaggctctggcgtggatcaggactggtccgccatcgcagccacccagtgccggctggacaaggagggggccaccaagttggtgtgtgatctcatcaccagcaccaagaacgagaagatcttccaggagagcatcggcctggccatccgcctgctggacgggggcaacactgagatccagaagtctttctacaacctgatgacaagtgacaagaagtcagagcgcttcttcaaagtgctgcatgaccgcatgaagcgtgcccagcaggagaccaagtccacagttgccgtcaacatgagtgacctgggcagccagcctcgtgaggaccgtgagccagcagaccctaccaccaaaggtcgcgtgtcctccttctccatgcccagctcctcccgatattcgctgggccctggcttgcaccgggggcacgacgtgagcgagcgtgcgcagaacaacgagatggggacctcggtgctcatcatgcggcccatcctgcgcttcctgcagctgctgtgtgagaaccataaccgggacctgcagaacttcctgcgctgtcagaacaacaagaccaactacaacctcgtgtgtgagaccctgcagttcctggacatcatgtgtggcagcaccacagggggcctggggctgctggggctctacatcaacgaggacaatgtgggcctggtcatccagaccttggagaccctcacagagtactgccagggcccgtgccatgagaaccagacctgcatcgtgactcacgagtccaacggcattgacatcatcacggcgctgatcctcaatgacatcagcccgctctgcaagtaccgcatggacctggtgctgcagctcaaggacaatgcctccaagctgctcctggctctgatggagagtcgacatgacagcgagaatgcagaacgcatcctcatcagccttcggcctcaggagctggtggacgtgatcaagaaggcctacctgcaggaggaggagcgggaaaattccgaagtgagcccacgtgaagtgggccacaacatctacatcctggcactgcagctttccaggcacaacaagcagctacagcacctgctgaagccggtgaagcgcatccaggaggaggaggccgagggcatctcttccatgctcagcctcaacaacaagcagctctctcagatgctcaagtcctcagcccctgcccaagaggaggaggaagacccgctggcctactatgagaaccacacctcgcagattgagattgtgcggcaagaccgaagcatggagcagatcgtgttcccggtacctgccatctgccagttcctgacagaggagaccaagcaccggctcttcaccaccacggagcaggacgagcagggcagcaaagtgagcgacttcttcgaccagtcctccttcctgcacaacgagatggagtggcagcgccggcttcgcagcatgccgctcatctactggttctcccgccgcatgacgctgtggggtagcatctccttcaacctggcagtgttcatcaacatcatcattgccttcttctacccctacgtggaaggcgcgtccacgggcgtgctgggctccccactcatctcgctcctcttctggatcctcatctgcttctccattgccgcgctgttcaccaagcactacagcgtccgtcccctcattgtggcactggtccttcgctccatctactacctgggcattgggcccacgctcaacatcctgggtgctctcaatctgaccaacaagatcgtgtttgtggtgagctttgtgggcaaccgcggcaccttcatccgtggctataaagcaatggtcatggacatggagttcctgtatcacgtgggctacatcctgacgagtgtcctgggcctctttgctcatgagctcttctacagtatcctgctctttgacctcatctaccgagaggagacgctgtttaatgtcatcaagagcgtgacccgcaatggccgctccatcctgctaactgccctgctggccctcatccttgtctacctcttctccatcgtgggcttcctcttcctcaaggatgacttcatcctggaggtggaccggctgcctgggaaccactccagagccagcaccctggggatgccacacggagctgccacatttatgggcacatgtagtggggacaagatggactgtgtctctgaggtctcggtgcctgagatcctagaagaggacgaggagctggacagcacagagcgggcctgtgatactctgcttatgtgtattgtcaccgtcatgaaccacggactgaggaacggtggcggcgtgggcgacatcctccgcaagccctccaaagacgagtcgctcttcccagccagggtggtgtacgacctcctgttcttcttcattgtcatcattattgtcctgaacctcatctttggggtgatcatcgacaccttcgccgacctgcgcagcgagaagcagaagaaagaggaaatcctcaagaccacgtgcttcatctgtggtctggagagggacaagtttgacaacaagacagtgtcctttgaagagcacatcaaactggagcacaacatgtggaactacctgtacttcattgtgctggtccgtgtcaagaacaagacagactacacgggccccgagagctacgtggctcagatgatcaagaacaagaacctggactggttcccacggatgcgcgccatgtccttggtgagcggcgagggcgagggcgagcagaacgagatccgcatcctgcaggagaagcttggctccaccatgaagctggtctcgcacctcaccgcccagctcaatgagctcaaggaacagatgacggagcagcggaagcggaggcaacgtctgggcttcgtggacgtgcagaactgcatgagccgctgagcagagcggagcctcggaggcccccacgggaggccggcttgcccacagctgccgcccttccttcaggtcaggtagaagccaggtgcctgccccatcttcagctcagctgccaccctccctccccaagccaggctctggccagcgggagtgccagagcagagcacggtcctgcttagtaagtacccttgaagagactcggtttaccttagtgccttaggggatgcaagttctccagactgctgtccttcgaagcagtgactggcatttctcagtggccctggcaggtggttaaaagtgggctggctctcacctccaagcactacattgtggctgtcccctgcctgccaccctggctaggaaggtggtagcctgctgttattagcttcctagggctttgatatttaacttattctgggggccatcccaacctcctgtggcctgctggggacagtgtggccccgtcccaggagcctcatgactcaggtggaccttgctcccaggactttctctaggctttgtaggcaagcctcacaagcccagcaacaggcctgggctgtgtgacagtggcttctctctttttggtgtaatgttttacatgtcctgtgtcctggagactaatgtgttaattgccttaaataaattaatagactccaaaaaaa

SEQ ID NO: 1496 - protein, 2670 aa, Rattus norvegicus
  ref <308>: DATABASE ACCESSION NUMBER: Refseq / NP_037270
  ref <309>: DATABASE ENTRY DATE: 2002-11-14
MNEMSSFLHIGDIVSLYAEGSVNGFISTLGLVDDRCVVEPAAGDLDNPPKKFRDCLFKVCPMNRYSAQKQYWKAKQTKQDKEKIADVVLLQKLQHAAQMEQKQNDTENKKVHGDVVKYGSVIQLLHMKSNKYLTVNKRLPALLEKNAMRVTLDATGNEGSWLFIQPFWKLRSNGDNVVVGDKVILNPVNAGQPLHASNYELSDNVGCKEVNSVNCNTSWKINLFMQFRDHLEEVLKGGDVVRLFHAEQEKFLTCDEYRGKLQVFLRTTLRQSATSATSSNALWEVEVVHHDPCRGGAGHWNGLYRFKHLATGNYLAAEENPSYKGDVSDPKAAGPGAQSRTGRRNAGEKIKYRLVAVPHGNDIASLFELDPTTLQKTDSFVPRNSYVRLRHLCTNTWIQSTNAPIDVEEERPIRLMLGTCPTKEDKEAFAIVSVPVSEIRDLDFANDASSMLASAVEKLNEGFISQNDRRFVIQLLEDLVFFVSDVPNNGQNVLDIMVTKPNRERQKLMRDENILKQIFGILKAPFRDKGGEGPLVRLEELSDQKNAPYQYMFRLCYRVLRHSQEDYRKNQEHIAKQFGMMQSQIGYDILAEDTITALLHNNRKLLEKHITKTEVETFVSLVRKNREPRFLDYLSDLCVSNRIAIPVTQELICKCVLDPKNSDILIQTELRPVKEMAQSHEYLSIEYSEEEVWLTWTDRNNEHHEKSVRQLAQEARAGNAHDENVLSYYRYQLKLFARMCLDRQYLAIDEISKQLGVELLFLCMADEMLPFDLRASFCHLMLHVHVDRDPQELVTPVKFARLWTEIPTAITIKDYDSNLNASRDDKKNKFASTMEFVEDYLNNVVGEAVPFANDEKNILTFEVVSLAHNLIYFGFYSFSELLRLTRTLLGIIDCIQAPAAVLQAYEEPGGKNVRRSIQGVGHMMSTMVLSRKQSVFGASSLPTGVGVPEQLDRSKFEDNEHTVVMETKLKILEILQFILNVRLDYRISYLLSVFKKEFVEVFPMQDSGADGTAPAFDSSTANMNLDRIGEQAEAMFGVGKTSSMLEVDDEGGRMFLRVLLHLTMHDYPPLVSGALQLLFKHFSQRQEAMHTFKQVQLLISAQDVENYKVIKSELDRLRTMVEKSELWVDKKGSVKGEEGEAGASKDKKERPSDEEGFLQPHGEKSSENYQIVKGILERLNKMCGVGEQMRKKQQRLLKNMDAHKVMLDLLQIPYDKNDNKMMEILRYTHQFLQKFCAGNPGNQALLHKHLQLFLTPGLLEAETMQHIFLNNYQLCSEISEPVLQHFVHCWPTHGRHVQYLDFLHTVIKAEGKYVKKCQDMIMTELTNAGDDVVVFYNDKASLAHLLDMMKAARDGVEDHSPLMYHISLVDLLAACAEGKNVYTEIKCTSLLPLEDVVSVVTHEDCITEVKMAYVNFVNHCYVDTEVEMKEIYTSNHIWTLFENFTLDMALVCNKREKRLSDPTLEKYVLTVVLDTISAFFSSPFSENSTSLQTHQTIVVQLLQSTTRLLECPWLQQQHKGSVEACVRTLAMVAKSRAILLPMDLDAHMSALLSSGGSCSAAAQRSAANYKTATRTFPRVIPTANQWDYKNIIEKLQDIITALEERLKPLVQAELSVLVDMLHWPELLFLEGSEAYQRCESGGFLSKLIRHTKGLMESEEKLCVKVLRTLQQMLQKKSKYGDRGNQLRKMLLQNYLQNRKSGPRGELTDPTGSGVDQDWSAIAATQCRLDKEGATKLVCDLITSTKNEKIFQESIGLAIRLLDGGNTEIQKSFYNLMTSDKKSERFFKVLHDRMKRAQQETKSTVAVNMSDLGSQPREDREPADPTTKGRVSSFSMPSSSRYSLGPGLHRGHDVSERAQNNEMGTSVLIMRPILRFLQLLCENHNRDLQNFLRCQNNKTNYNLVCETLQFLDIMCGSTTGGLGLLGLYINEDNVGLVIQTLETLTEYCQGPCHENQTCIVTHESNGIDIITALILNDISPLCKYRMDLVLQLKDNASKLLLALMESRHDSENAERILISLRPQELVDVIKKAYLQEEERENSEVSPREVGHNIYILALQLSRHNKQLQHLLKPVKRIQEEEAEGISSMLSLNNKQLSQMLKSSAPAQEEEEDPLAYYENHTSQIEIVRQDRSMEQIVFPVPAICQFLTEETKHRLFTTTEQDEQGSKVSDFFDQSSFLHNEMEWQRRLRSMPLIYWFSRRMTLWGSISFNLAVFINIIIAFFYPYVEGASTGVLGSPLISLLFWILICFSIAALFTKHYSVRPLIVALVLRSIYYLGIGPTLNILGALNLTNKIVFVVSFVGNRGTFIRGYKAMVMDMEFLYHVGYILTSVLGLFAHELFYSILLFDLIYREETLFNVIKSVTRNGRSILLTALLALILVYLFSIVGFLFLKDDFILEVDRLPGNHSRASTLGMPHGAATFMGTCSGDKMDCVSEVSVPEILEEDEELDSTERACDTLLMCIVTVMNHGLRNGGGVGDILRKPSKDESLFPARVVYDLLFFFIVIIIVLNLIFGVIIDTFADLRSEKQKKEEILKTTCFICGLERDKFDNKTVSFEEHIKLEHNMWNYLYFIVLVRVKNKTDYTGPESYVAQMIKNKNLDWFPRMRAMSLVSGEGEGEQNEIRILQEKLGSTMKLVSHLTAQLNELKEQMTEQRKRRQRLGFVDVQNCMSR

SEQ ID NO: 1497 - DNA, 3344 bp, Homo sapiens
  ref <308>: DATABASE ACCESSION NUMBER: Refseq / NM_001605
  ref <309>: DATABASE ENTRY DATE: 2000-10-31
ggtacagctgcgcgtctgcgggaataggtgcagcgggcccttggcgggggactctgagggaggagctggggacggcgaccctaggagagttctttggggtgactttcaagatggactctactctaacagcaagtgaaatccggcagcgatttatagatttcttcaagaggaacgagcatacgtatgttcactcgtctgccaccatcccattggatgaccccactttgctctttgccaatgcaggcatgaaccagtttaaacccattttcctgaacacaattgacccatctcaccccatggcaaagctgagcagagctgccaatacccagaagtgcatccgggctgggggcaaacaaaatgacctggacgatgtgggcaaggatgtctatcatcacaccttcttcgagatgctgggctcttggtcttttggagattactttaaggaattggcatgtaagatggctctggaactcctcacccaagagtttggcattcccattgaaagactttatgttacttactttggcggggatgaagcagctggcttagaagcagatctggaatgcaaacagatctggcaaaatttggggctggatgacaccaaaatcctcccaggcaacatgaaggataacttctgggagatgggtgacacgggcccctgtggtccttgcagtgagatccactacgaccggattggtggtcgggacgccgcacatcttgtcaaccaggacgaccctaatgtgctggagatctggaaccttgtgttcatccagtataacagggaagctgatggcattctgaaacctcttcccaagaaaagcattgacacagggatgggcctggaacgactggtatctgtgctgcagaataagatgtccaactatgacactgacctttttgtcccttactttgaagccattcagaagggcacaggtgcccgaccatacactgggaaagttggtgctgaggatgccgatgggattgacatggcctaccgggtgctggctgaccatgctcggaccatcactgtggcactggctgatggtggccggcctgacaacacagggcgtggatatgtgttgagacggattctccgccgagctgtccgatacgcccatgaaaagctcaatgccagcaggggcttctttgctacgttagtggatgttgtcgtccagtccctgggagatgcatttcctgagctgaagaaggacccagacatggtgaaggacatcattaatgaagaagaggtgcagtttctcaagactctcagcagagggcgtcgcatcctggacaggaaaattcagagcctgggagacagcaagaccattcccggagacactgcttggctcctctatgacacctatgggtttccagtggatctgactggactgattgctgaagagaagggcctggtggtagacatggatggctttgaagaggagaggaaactggcccagctgaaatcacagggcaagggagctggtggggaagacctcattatgctggacatttacgctatcgaagagctccgggcacggggtctggaggtcacagatgattccccaaagtacaattaccatttggactccagtggtagctatgtatttgagaacacagtggctacggtgatggctctgcgcagggagaagatgttcgtggaagaggtgtccacaggccaggagtgtggagtggtgctggacaagacctgtttctatgctgagcaaggaggccagatctatgacgaaggctacctggtgaaggtggatgacagcagtgaagataaaacagagtttacagtgaagaatgctcaggtccgaggagggtatgtgctacacattggaaccatctacggtgacctgaaagtgggggatcaggtctggctgtttattgatgagccccgacgaagacccatcatgagcaaccacacagctacgcacattctgaacttcgccctgcgctcagtgcttggggaagctgaccagaaaggctcattggttgctcctgaccgcctcagatttgactttactgccaagggagccatgtccacccaacagatcaagaaggctgaagagattgctaatgagatgattgaggcagccaaggccgtctatacccaggattgccccctggcagcagcgaaagccatccagggcctacgggctgtgtttgatgagacctatcctgaccctgtgcgagtcgtctccattggggtcccggtgtccgagttgctggatgacccctctgggcctgctggctccctgacttctgttgagttctgtgggggaacgcacctgcggaactcgagtcatgcaggagcttttgtgatcgtgacggaagaagccattgccaagggtatccggaggattgtggctgtcacaggtgccgaggcccagaaggccctcaggaaagcagagagcttgaagaaatgtctctctgtcatggaagccaaagtgaaggctcagactgctccaaacaaggatgtgcagagggagatcgctgaccttggagaggccctggccactgcagtcatcccccagtggcagaaggatgaattgcgggagactctcaaatccctaaagaaggtcatggatgacttggaccgagccagcaaagccgatgtccagaaacgagtgttagagaagacgaagcagttcatcgacagcaaccccaaccagcctcttgtcatcctggagatggagagcggcgcctcagccaaggccctgaatgaagccttgaagctcttcaagatgcactcccctcagacttctgccatgctcttcacggtggacaatgaggctggcaagatcacgtgcctgtgtcaagtcccccagaatgcagccaatcggggcttaaaagccagcgagtgggtgcagcaggtgtcaggcttgatggacggtaaaggtggtggcaaggatgtgtctgcacaggccacaggcaagaacgttggctgcctgcaggaggcgctgcagctggccacttccttcgcccagctgcgcctcggggatgtaaagaactgagtggggaaggaggaggctcccactggatccatccgtccagccaagagctcttcatctgctacaagaacatttgaatcttgggacctttaaagagcccctcctaacccagcagtaactggaacacacttgggagcagtcctatgtctcagtgccccttaaatttctgccctgagccctccacgtcagtgccatcggtctagaaccactaaccccgcattgctgttgatcgtcacgctcgcatctatagataacggctctccagacctgagctttccgcgtcagcaagtaggaatcgtttttgctgcagagaataaaaggaccacgtgc

SEQ ID NO: 1498 - protein, 968 aa, Homo sapiens
  ref <308>: DATABASE ACCESSION NUMBER: Refseq / NP_001596
  ref <309>: DATABASE ENTRY DATE: 2000-10-31
MDSTLTASEIRQRFIDFFKRNEHTYVHSSATIPLDDPTLLFANAGMNQFKPIFLNTIDPSHPMAKLSRAANTQKCIRAGGKQNDLDDVGKDVYHHTFFEMLGSWSFGDYFKELACKMALELLTQEFGIPIERLYVTYFGGDEAAGLEADLECKQIWQNLGLDDTKILPGNMKDNFWEMGDTGPCGPCSEIHYDRIGGRDAAHLVNQDDPNVLEIWNLVFIQYNREADGILKPLPKKSIDTGMGLERLVSVLQNKMSNYDTDLFVPYFEAIQKGTGARPYTGKVGAEDADGIDMAYRVLADHARTITVALADGGRPDNTGRGYVLRRILRRAVRYAHEKLNASRGFFATLVDVVVQSLGDAFPELKKDPDMVKDIINEEEVQFLKTLSRGRRILDRKIQSLGDSKTIPGDTAWLLYDTYGFPVDLTGLIAEEKGLVVDMDGFEEERKLAQLKSQGKGAGGEDLIMLDIYAIEELRARGLEVTDDSPKYNYHLDSSGSYVFENTVATVMALRREKMFVEEVSTGQECGVVLDKTCFYAEQGGQIYDEGYLVKVDDSSEDKTEFTVKNAQVRGGYVLHIGTIYGDLKVGDQVWLFIDEPRRRPIMSNHTATHILNFALRSVLGEADQKGSLVAPDRLRFDFTAKGAMSTQQIKKAEEIANEMIEAAKAVYTQDCPLAAAKAIQGLRAVFDETYPDPVRVVSIGVPVSELLDDPSGPAGSLTSVEFCGGTHLRNSSHAGAFVIVTEEAIAKGIRRIVAVTGAEAQKALRKAESLKKCLSVMEAKVKAQTAPNKDVQREIADLGEALATAVIPQWQKDELRETLKSLKKVMDDLDRASKADVQKRVLEKTKQFIDSNPNQPLVILEMESGASAKALNEALKLFKMHSPQTSAMLFTVDNEAGKITCLCQVPQNAANRGLKASEWVQQVSGLMDGKGGGKDVSAQATGKNVGCLQEALQLATSFAQLRLGDVKN

SEQ ID NO: 1499 - DNA, 3252 bp, Rattus norvegicus
  ref <308>: DATABASE ACCESSION NUMBER: Refseq / NM_017116
  ref <309>: DATABASE ENTRY DATE: 2003-01-14
agctcccgcagtccgctgcagcgccccgggcttggccgcgccccaaccgagtgctgcgccccgcctctccgcgacccctctctctgtgctgtgcgccatcccgatcgctaccatggcgggcatcgcgatgaaactggccaaagaccgcgaggcggccgaggggctggggtctcacgagagagccatcaagtacctcaaccaggactacgagacactgcggaacgagtgcctggaggccggggcgctcttccaggatccttccttccccgccctgccgtcgtccctgggcttcaaggagttggggccctactccagcaaaactcggggcatcgaatggaagcggcccacggagatctgcgcagacccccagttcattattggaggtgctacccgcacagacatctgccaaggagcccttggggactgctggcttctggctgccatcgcctccctcaccttgaatgaagagatcctggctcgagttgtgcctctagaccagagcttccaggaaaactatgcaggcatcttccatttccagttctggcaatatggcgaatgggtggaggtggtggtggacgacagactgcccactaaggacggggagctgctctttgttcattcagctgaggggagcgagttctggagtgcccttctggagaaggcctatgccaagatcaatgggtgctatgaagcactctcagggggtgccaccactgagggctttgaagacttcacaggaggcattgccgagtggtatgagctgaggaagcctcctcccaatttgttcaagatcatccagaaggctttggagaaaggttctctgcttggctgctctatcgatatcaccagcgctgcggattctgaggccgttacgtaccagaagttggtgaaaggacatgcgtactccgtcactggagccgaggaggttgaaagctcaggaagcctgcagaaattgatacgtatcaggaacccctggggacaagtggagtggaccgggaagtggaatgacaactgccccagctggaacacggttgacccagaagtaagggcaaatctaacagaacggcaggaggacggagaattctggatgtccttcagtgacttcctgaggcactactctcgtctagaaatctgcaacctgaccccggacaccctcacctgtgactcctacaagaagtggaaactcaccaagatggatgggaactggaggcgaggctccactgcagggggctgcaggaattacccaaataccttctggatgaaccctcagtacctaatcaagctggaggaagaagatgaagatgatgaggatggggagaggggctgtaccttcctggtgggcctcatccagaagcatcggcggcggcagaggaagatgggtgaggacatgcacaccattggcttcggcatctatgaggtcccagaggagctaacagggcagaccaacatccacctcagcaaaaactttttcctgacaacccgagccagggagcggtcagataccttcatcaacctccgggaggtcctcaaccgcttcaagctgcccccgggagaatatgtccttgttccttccaccttcgagccccacaagaatggcgatttctgcatccgagtcttctcagagaagaaggctgactaccaaactgtcgatgatgaaatcgaggccaacattgaagagattgaagccaatgaggaggacattggagatggattcagaaggctgtttgctcagctggctggagaggatgcggagatctctgcctttgagctgcagaccatcttgagaagagttctagccaagcgcgaagacatcaagtcagatggcttcagcatcgagacctgtaagatcatggtggacatgctggatgaagatgggagcggcaagctggggctgaaggagttctacatcctctggacgaagattcagaaataccaaaaaatttaccgagagatcgacgtggacaggtcgggaaccatgaattcctatgagatgcggaaggctttggaagaagcaggtttcaagctgccctgtcaacttcatcaagtcatcgttgcccggtttgcagatgacgaactcatcatcgactttgacaactttgtgcggtgtttggttcggctggaaatactattcaagatattcaagcagctggaccctgagaacactggaacgatacagctcgaccttatctcgtggctgagtttttcagtactctgaagttacatgcctgaagatttctggtggaagaaaacagccaatgcctacacttaaatactttgtatctggaccttgaacgtacgggaacatttacttcatcgggtgattgtaactgaagctctaaccgtcagaggtggatgaactttcacatatcagagtaatggatctgcataccattaaccaaatgcaaatgaattgcataaccctcggtaaggtcagagagagctttatgcctgtacatagtatatcctttctacttctacacatcgtctcttcatagcaatattaaaccaggaaggactgttgagaggtttaagtaattgggcaaacagcaattgatctcagaggccacaatgccttgatgggaatatttaaagaaatttaaaaatttaagatgcagtggtggcatcttccacagcaggccagagagaaacagagagagagagagagagacttggaaatacaataataaagtaatctgtgtggagcgtctaaagaatccagtctgatggaggcatctaaagaatccagtctgatggaggcatctaaagaatccaggagccaggagtatctgacacaaggccaacctgggctacctagcaagacctgatctcaaaaaataaatgtcaattaaaaaaaaagaaggcatgtttccatcatttggttctaacaaaagatggtttttatacacctttgtgaacagcaagccctcttagactcaagtccttgaccatatttggccttagacattgaagtagtgagtagtgagatcatttgactgaccaactgagccaggtctgccatctgaaagaaaatcgtgatacaaccccagggatggtgcctacggctcgggagaacagggctcagaagatccttcttaaaacaaccaagctggcttcgtggtccgaggaaaatgctagcaaccatacagacatactgccttatccacttccaaacgtactgttaataaagagttgcaatgcatgcacgccgtgccttgtttttcctcgtagagcgtggcccccgtggagggtttc

SEQ ID NO: 1500 - protein, 700 aa, Rattus norvegicus [sequence omitted]

SEQ ID NO: 1501 - DNA, 1944 bp, Rattus norvegicus
  ref <308>: DATABASE ACCESSION NUMBER: Refseq / NM_022539
  ref <309>: DATABASE ENTRY DATE: 2003-01-13
ggtgaagaaggagcgggccctcgccgctcgttctcgctccctctttctctctctcttcttctctctctctttccctctcgggcaacatggcgggcgtggaagaggcatcgtctttcgggggccacctgaatcgcgacctggatccagacgacagggaagagggaacctccagcacggccgaggaagccgccaagaagaaaagacggaagaagaagaagggcaaaggggctgtgtcagcagggcaacaagaacttgataaagaatcgggaacctcagtggacgaagtagcaaaacagttggagagacaagcactggaggagaaagagaaagatgatgacgatgaagatggagatggtgatggtgatggtgcagctgggaagaagaagaaaaagaagaagaagaagagaggaccaagagttcaaacagaccctccctcagttccaatatgtgacctgtatcctaatggtgtatttcccaaaggacaagagtgtgaatacccacccacccaagatgggcggacagctgcttggagaaccacaagtgaagagaaaaaggcgctagaccaggctagtgaggagatttggaacgacttccgagaagctgccgaagcacaccggcaagttaggaaatacgtcatgagctggatcaagcctgggatgacaatgatagaaatatgtgagaagttggaagactgttcccgaaagctcataaaggagaatgggttaaatgcaggcctggcctttcccactgggtgttctctcaacaactgtgctgcacattacactcccaatgctggtgacacgacagtcttacagtacgacgacatctgtaagatcgactttggaacgcatataagtggtagaataattgattgtgcttttactgttacttttaatcccaaatatgacatattattaaaagctgtaaaagatgccaccaatactggaataaagtgtgcggggattgacgtccgtctctgtgatgtcggcgaggccattcaagaagttatggagtcctatgaagtggaaatagatgggaagacctaccaagtgaaacccatacgtaacttaaatggacattcaattgggccatatagaattcatgctggaaaaacagtgcccattgtgaaaggaggggaagctacaaggatggaggaaggagaggtgtatgccattgagacctttggtagcacagggaagggcgtggttcatgacgatatggaatgttcacactacatgaaaaattttgatgtgggacacgtgccaataaggcttccaagaacaaaacacttgttgaatgtcatcaatgaaaactttggtacccttgccttctgccgaaggtggctggatcgcttgggagaaagtaaatacttaatggctctgaagaacctgtgtgacttgggcattgtagatccatatccaccactctgtgacattaaaggatcatacacagcacagtttgaacataccatactctgcgcccaacctgtaaagaagttgtcagcagaggagatgactattaaaacttagtccaaagccaactcaacgtctttattttctaagctttgttggaacacattataccacaagtaatttgcaacatgtctgttttaacagtggacctgtgtaatgccgttatccatgtttaaaggagtttgatcaaagccaaactgtctacatgtaattaaccaaggaaaaggctttcaagactttactgttaactgtttctcccgtctaggaaatgctgtactgctcactagttaggaattacttaaacgttttgttttgaagacctaagagatgctttttggatatttatattgccatattcttacttggatgctttgaatgactacatacatccagttctgcacctatgccctctggtattgctttttaaccttcctggaatccattttctaaaaaataaagacattttcagatc

SEQ ID NO: 1502 - protein, 480 aa, Rattus norvegicus
  ref <308>: DATABASE ACCESSION NUMBER: Refseq / NP_071984
  ref <309>: DATABASE ENTRY DATE: 2003-01-13
MAGVEEASSFGGHLNRDLDPDDREEGTSSTAEEAAKKKRRKKKKGKGAVSAGQQELDKESGTSVDEVAKQLERQALEEKEKDDDDEDGDGDGDGAAGKKKKKKKKKRGPRVQTDPPSVPICDLYPNGVFPKGQECEYPPTQDGRTAAWRTTSEEKKALDQASEEIWNDFREAAEAHRQVRKYVMSWIKPGMTMIEICEKLEDCSRKLIKENGLNAGLAFPTGCSLNNCAAHYTPNAGDTTVLQYDDICKIDFGTHISGRIIDCAFTVTFNPKYDILLKAVKDATNTGIKCAGIDVRLCDVGEAIQEVMESYEVEIDGKTYQVKPIRNLNGHSIGPYRIHAGKTVPIVKGGEATRMEEGEVYAIETFGSTGKGVVHDDMECSHYMKNFDVGHVPIRLPRTKHLLNVINENFGTLAFCRRWLDRLGESKYLMALKNLCDLGIVDPYPPLCDIKGSYTAQFEHTILCAQPVKKLSAEEMTIKT

SEQ ID NO: 1503 - DNA, 2569 bp, Homo sapiens
  ref <308>: DATABASE ACCESSION NUMBER: Refseq / NM_006838
  ref <309>: DATABASE ENTRY DATE: 2003-01-11
tccctcgtctctctcgggcaacatggcgggcgtggaggaggtagcggcctccgggagccacctgaatggcgacctggatccagacgacagggaagaaggagctgcctctacggctgaggaagcagccaagaaaaaaagacgaaagaagaagaagagcaaagggccttctgcagcaggggaacaggaacctgataaagaatcaggagcctcagtggatgaagtagcaagacagttggaaagatcagcattggaagataaagaaagagatgaagatgatgaagatggagatggcgatggagatggagcaactggaaagaagaagaaaaagaagaagaagaagagaggaccaaaagttcaaacagaccctccctcagttccaatatgtgacctgtatcctaatggtgtatttcccaaaggacaagaatgcgaatacccacccacacaagatgggcgaacagctgcttggagaactacaagtgaagaaaagaaagcattagatcaggcaagtgaagagatttggaatgattttcgagaagctgcagaagcacatcgacaagttagaaaatacgtaatgagctggatcaagcctgggatgacaatgatagaaatctgtgaaaagttggaagactgttcacgcaagttaataaaagagaatggattaaatgcaggcctggcatttcctactggatgttctctcaataattgtgctgcccattatactcccaatgccggtgacacaacagtattacagtatgatgacatctgtaaaatagactttggaacacatataagtggtaggattattgactgtgcttttactgtcacttttaatcccaaatatgatacgttattaaaagctgtaaaagatgctactaacactggaataaagtgtgctggaattgatgttcgtctgtgtgatgttggtgaggccatccaagaagttatggagtcctatgaagttgaaatagatgggaagacatatcaagtgaaaccaatccgtaatctaaatggacattcaattgggcaatatagaatacatgctggaaaaacagtgccgattgtgaaaggaggggaggcaacaagaatggaggaaggagaagtatatgcaattgaaacctttggtagtacaggaaaaggtgttgttcatgatgatatggaatgttcacattacatgaaaaattttgatgttggacatgtgccaataaggcttccaagaacaaaacacttgttaaatgtcatcaatgaaaactttggaacccttgccttctgccgcagatggctggatcgcttgggagaaagtaaatacttgatggctctgaagaatctgtgtgacttgggcattgtagatccatatccaccattatgtgacattaaaggatcatatacagcgcaatttgaacataccatcctgttgcgtccaacatgtaaagaagttgtcagcagaggagatgactattaaacttagtccaaagccacctcaacacctttattttctgagctttgttggaaaacatgataccagaattaatttgccacatgttgtctgttttaacagtggacccatgtaatacttttatccatgtttaaaaaagaaggaatttggacaaaggcaaaccgtctaatgtaattaaccaacgaaaaagctttccggacttttaaatgctaactgtttttccccttcctgtctaggaaaatgctataaagctcaaattagttaggaatgacttatacgttttgttttgaatacctaagagatactttttggatatttatattgccatattcttacttgaatgctttgaatgactacatccagttctgcacctataccctctggtgttgctttttaaccttcctggaatccattttctaaaaaataaagacacattcttctcagcaccacacaacacctattccaaaatcgaccacatatttggaagtaaagctctcctcagcaaatgtaaaagaacagaaattataacaaactgtctctcagaccacagtataaccaaactagaactcaggattaagaaactcactcaaaaccacacaactacatggaaactgaacaacctgctcctgaatgactactggatacataacaaaatgaaggcagaaataaagatgttctttaaaaccaatgagaacaaagacacaacataccagaatctctgggacacattcaaagcagtgtgtagagggaaatttatagcactaaatgcccacaagagaaagcaggaaatatctaaaattgacaccctaacatcacaattaaaagaactagagaagcaagagcaaacacattgaaaagctaagagaaggcaagaaataactaagatcagagcagaactgaaggaaatagagacacaaaaaactcttcaaaaaatcaatgaatccaggagctggttttttgaaacgatcaacaaaattgatagacactagcaagactaataaagaagaaaggagagaagaatcaaatagaagcaataaaaaatgataaaggggatatcaccaccaatcccacagaaataaaccaccatcagagaatactacaaacacctctacgcaa

SEQ ID NO: 1504 - protein, 478 aa, Homo sapiens
  ref <308>: DATABASE ACCESSION NUMBER: Refseq / NP_006829
  ref <309>: DATABASE ENTRY DATE: 2003-01-11
MAGVEEVAASGSHLNGDLDPDDREEGAASTAEEAAKKKRRKKKKSKGPSAAGEQEPDKESGASVDEVARQLERSALEDKERDEDDEDGDGDGDGATGKKKKKKKKKRGPKVQTDPPSVPICDLYPNGVFPKGQECEYPPTQDGRTAAWRTTSEEKKALDQASEEIWNDFREAAEAHRQVRKYVMSWIKPGMTMIEICEKLEDCSRKLIKENGLNAGLAFPTGCSLNNCAAHYTPNAGDTTVLQYDDICKIDFGTHISGRIIDCAFTVTFNPKYDTLLKAVKDATNTGIKCAGIDVRLCDVGEAIQEVMESYEVEIDGKTYQVKPIRNLNGHSIGQYRIHAGKTVPIVKGGEATRMEEGEVYAIETFGSTGKGVVHDDMECSHYMKNFDVGHVPIRLPRTKHLLNVINENFGTLAFCRRWLDRLGESKYLMALKNLCDLGIVDPYPPLCDIKGSYTAQFEHTILLRPTCKEVVSRGDDY

SEQ ID NO: 1505 - DNA, 975 bp, Rattus norvegicus
  ref <308>: DATABASE ACCESSION NUMBER: EMBL / L19927
  ref <309>: DATABASE ENTRY DATE: 1999-03-12
cgagacattaccaggagactgaagtccatcaaaaacatccagaagattaccaagtctatgaagatggtggcagcagcgaagtacgcccgggctgagcgggagctgaagccagctcgagtgtatgggacaggctccttggctctgtatgagaaggctgagattaagggacctgaggacaagaagaagcacctcattattggtgtgtcctcggatcgaggcctttgtggtgctattcattcctccgtggctaaacaaatgaagaatgacatggctgccctcacagcagctgggaaagaagttatgattgttggaattggtgaaaaaatcaagagcatactttataggactcactctgatcagtttttggtgtccttcaaagacgtggggcggaagccccctacttttggagatgcatcggtcattgccttggagttgttaaattcgggatatgaatttgatgaaggctctattatctttaatcagttcaagtctgttatctcctacaagacagaagagaagcccatcttctctttcagtaccgtcgtggctgctgagaacatgagcatttatgatgacattgatgctgacgtgctgcagaattaccaggaatacaatctggccaacatcatctactactccctgaaggagtccaccaccagtgagcagagtgccaggatgaccgccatggacaacgccagcaagaacgcctctgatatgattgataaattgacgctgactttcaaccgcacccgccaggccgtcatcacgaaggagctgatagagatcatctccggggctgctgctctggattaatgagaatcaagttacatcctcagacaagaggtgaagaaggaaaaggcagctgattttaactgattgctgtccttgttagaagaaacttggtccactgagtcacaaagacagcaggatgtttgtaaattatcttacaataaacaacttacaatgagaaaaacg

SEQ ID NO: 1506 - DNA, 1666 bp, Rattus norvegicus
  ref <308>: DATABASE ACCESSION NUMBER: Refseq / NM_013043
  ref <309>: DATABASE ENTRY DATE: 2003-01-14
cggcagccgagtcggattgagctgctgcagacgccaggccactccagccagcactgccgttttcacgccccggctgcagacagctaggaggctttatctagtttgaaccaggctgctggagctcgctccttccctctctttttttccacgaggctgtttttttatttggctgcaattgcatgaaatcccaatggtgtagaccagtggcgatggatctaggagtttaccaactgagacatttttcaatttctttcttgtcgtctttgctgggaactgaaaacgcttccgtgagacttgacaatagctctggtgcaagtgtggtagctatcgacaacaaaatagagcaagctatggatctggtgaaaagccatttgatgtatgcagttagagaggaagtggaggttctgaaggagcagatcaaagaactaatagagaaaaactcccaactggagcaggagaacaatctgttgaagacactggccagtccggagcagctcgcccagtttcaggcccagctgcagactggctcccctccggctaccacgcagccacaggggaccacacagccccctgcacagccagcgtcccagggctcaggatcaaccgcatagcctgctatgccccaacagaactggctgctgctgtctgaactgaacagaccgaagagatgtgctagtgagaagccgcctccagtcacccatttcattgctgtctgcgaaagagacgtgagactcacacatgctgttctcgctttctccccagtattaagcactcatatgcttttggcttgaagaaatatactagttgagtgaattaaaggttaaacagagagtgagcatggatgtaccctgtgcaacgtggcagatgtctgaggaatggtttgattgacgctgaggaggagctctgtgccttttcaaccctccccagccgcccactctactcccaagctctggggctcgcctgcatggggctcagaaggtgggctgctcctggattttgtgttctcctctccttcccttcaaagaatttgagaggccagaaacgagactgcaaagggggggatgcagtccttttacaaaaccgacaactgtcaccaaagcttataaaacaggacagtactgtccctcttttctgaaacatcagaagacacaaaactgttagtgacacaacggtgacaggtagctgggacctaggctatcttattatgaaggttgttttgcttgttgtatatttgtgtatgtagtgtaacgaatttgtacaatagaggaccgtaactactgttaggttgtacagattgaagtttagatgttccattggctgtctgaaaaggtgtggattgtccttcctagagagatctacttaaaaactgcttcgtgacaaaaaccacacctgaagaaattttaagaatttggcacagttagtcactttgtgtcacccggaatctagctgctgagtcttgcaaagtaaaccccctgttgactgatgtcagttgagctagtgaatgaatagatggagaaacgtcagtcagttgctgaggaagtggatttcccagtaggggtttctgcagctcacctgtatagtcctgcgcatgttccccacacagaacccactgtatttacctgttctacttgtcacctttcaataaagcatatcaaatgttgatacc

SEQ ID NO: 1507 - protein, 143 aa, Rattus norvegicus
  ref <308>: DATABASE ACCESSION NUMBER: Refseq / NP_037175
  ref <309>: DATABASE ENTRY DATE: 2003-01-14
MKSQWCRPVAMDLGVYQLRHFSISFLSSLLGTENASVRLDNSSGASVVAIDNKIEQAMDLVKSHLMYAVREEVEVLKEQIKELIEKNSQLEQENNLLKTLASPEQLAQFQAQLQTGSPPATTQPQGTTQPPAQPASQGSGSTA

SEQ ID NO: 1508 - DNA, 3093 bp, Rattus norvegicus
  ref <308>: DATABASE ACCESSION NUMBER: EMBL / L38437
  ref <309>: DATABASE ENTRY DATE: 2000-03-04
aagcttcacttaacaggcaagacagacactagataaataattatgaaggagagatagagagaaggggtaagtccaaggcacccattagagcttgagtgtgggcactagatacaatatgagtgcctgaaaaagtacctttggattgagtaggcattttagctaggctggggtagcgcataaacgagtgttctgcatgtgtagttatatatatccaagtataggtccaagatgtggggtgggttgggaaagacagacacagagacaggcagggagatgctgggaaactacaattctcttgtggccaggctgtagcaagcacagcggaaccaatgacaacgtcagatagtcagtaggcttagctatcccaactgtacaggacaaacagcttttccaggttacaaacaagggaacctatccggctttgttgctcctgttcaaatacacttgtttgtttgcttgtttgtttgtttatttattttggtgtggtagagacggaacccacaaccttaggcatgccaaacaaatctttatagtgctttcagggaagcatgggctacagctgtcaccagggccaagacaattggtaccaagtgcagcacataatccccacaagaccctttgagtgggctggtggcaaatgttttgtgaccatggaggcagctcttacccacatgctagtgagagaatagacatgtctgtctgtgtgactttgactacaggcattagctagcacggcatcggccagctgtcctcacaggacagacaggccaggggatgctgagtcaatgcaactgggcaaccttacagtaggaagtccccaaagcctgctacatggtaacttaggtcaccagtaggaagtaggcagtccgggcccctggacaagggagtgagacagcagagcctgtcttccttttgctcagctatctctgtgatgaagcccatctagctgctgggtcctggttttgaaggagcatgtatgagccttaagagcacatacatgcctccagcgttccacactcctgatctggagaagttggctgtagttatatctggaaatacaacccccagctttcctacagatactggttccaggtcctctaatcatatcagcactggtggaggaggaagtacatgaagcctggtacacacccaccatgtgcaggcagatcgttgcagctcattagagccattttagaggtcttacagctggtagaagagtggaaacccaggctcttctgcccccattctgcttagttttgttacatgattctgccttactcactgggctggaaacatggctcagcacttaaggccacttactactctttcaggggcccacagtccagttcccagcacctatgtccaggtgattcacaaccacctctaattctagctccagggcacccatcacctctgacctctgtgggcacttgcagcctgactgtcctggaacttcgttatgtacagcaggctggcttccaactcacagagctcctcttgcctttgccccagaatgctggggttaaagttgcgccaccatgcccaacttctaaaattgcacttacaccgacagtgccttctgcctttttttttttttttcctttctttcggagctggggactgaacccagggccttgtgcttgctaggcaagcgctctaccactgagctaaatccccaaccctgccttctgcctatataagtgtgttgttttaaagttgaaactgtcttcggggagttctgctttatttcggcatctgcagtatcgagtttctcagggttagtaatttgctttgtctgacagaaggtaattacggggcaagatggcggcggcgctgaccttccgccgtctgttggctctccctagggctgcccggggtttcggggtgcgagtgtcgctgagcggggagaagatcacgcataccggccaggtaacgaggtaacggccgtaatgcctggaacccgagactgacggtagcagggagcgtggcaaggtgtctgatggaaaagactacagggggattcgttttgtagatcgtcagaaagaggtgaatgagaactttgccattgatttgatagcacaacaacctgtgaatgaggtggaccgtcgtatcatagcctgtgatggagggggtggagccttgggccaccccaaggtgtatataaacctggacaaagaaacaaaaacgggtacgtgtgcctactgcggcctgcagttcaagcagcagcatcactagtgtgggctgtgtcctggtcctctgacacccgtggagcatctcatgcttagtgttctggtgtgaggtcactgctctgtgaatggtgtcccttgttatgaataaaggatgctcccaccatgaaaaaaaaaaaatcctaattagctaaagactcaggtaagaaaatacacctaggtcataatttacaagatcccagtattttaagtacttgtttacttctctgtaaggaaagaggaacatcattttatatctccacaaaacagaaaaatggcactgtctccttggaaatagtgaacagatttcttttcttttttttttttaatattttatttattatataggagcacactgtagctgtcctcagacacaccagaagagggcatcagacctcattacagatggtggtgagccaccatgtggtttgcctgggatttgaactcaggaccttgggaacagcagtcggtgctcttaaccactgggccatctctccagttccccagatttattttcaaaatggcatcctgtgctgtagtctttgcgtaatctcagttgggggtttctaccccacctctgatcatccggttcgcagataaaagacgcacagctgccatttgtattaataggccttcaatgtgctagagctgggcagatatctacactctgagctattagaatctacttctccatcagtaacccagagttataacttccatgttccatctgggcagctcttaaccccctcatgacccagttcgtatggctcaccaacccctggtggattctcctccctcccactggtatcctctgaccccaagcctgggaaccgaaactccacccacctctcttctggccagctatagg

SEQ ID NO: 1509 - DNA, 1621 bp, Rattus norvegicus
  ref <308>: DATABASE ACCESSION NUMBER: EMBL / L40364
  ref <309>: DATABASE ENTRY DATE: 2000-03-04
agaagacttaaaacaaccctgacaccatgctctgacactatgtgggctctgatcttctgcttcctgagtcacccccgagacactggagcccgatcacactctctgcactattcttactcagccgtgacagagccgggcccaggagttcctgcattttttgccagtggctttgtagataaccagcccttcatccactatgacagtaggaagatggaggcagagccttgtgctgactggctgagggaaaatccatattactttgatgaggagacccaggttttcaccaatcggatgaagatctaccagttgaagcctgagaaacattcagcaatactacaacagctctggtgaccggagtcagagagcagatggcttctaccagcaagcaggccctcacaccctccagttcacgtacggctgtgagatgcaggacaacaggaccacagggcactggcagtatggctacgatggcagggattacctgaccttggacttggactctatgcaatatacagcagccaccttcattgctggctacaccaagcacaagtggcaaaacaatgagtactggctgcagagagagaagacctacttggagaaggagtgtgtcctgtggctaaagagatacttaactatgggaggagagaactttacccgagctgaccctccacagacaacagtgacacaccaccccagacctgaaggtgatgtcaccctgaggtgctgggccctgggcttctaccctgctgacatcaccctgacctggcagttgaatggggaggacctgacccaggacatggagcttgtggagaccaggcctacaggggatggaaccttccagaagtgggcagctgtggtggtgcctcttgggaaggagcagaagtacacatgccatgtggagcatgaggggctgcctgagccgcttacccagagatgggagcctccttcatccactgattccaacatggaaaccaatgtcatttatgttgtcgttggagccgtctctgctgtggccattattggagctgtgatcattggagctgtggtggctgttgtgaggaagaggaggagaaacacaggtggatatgaggagactacgcccctgctccagcatgaagacagctgcctggagtggactgagtgacagacgatgtgttcaggtctctcctgtgacatccagagccctcagttctctttagacaccagtgtctgatgttccctgtgattctatggcttcagtgtgaagaactgtggagcccagcctgccctgcacttcagaccctgtccctgcactgcctgtgttccctaccaaggccgaaccttgctggtccagcctggggggtcggtggtggagacatctgcatcctgaacctttgtgccaccctgagcttcagcccctcacttcacactgagaataagaatctgagtgtgagaggttggggatttagctcagtggtagaggactttcctagaaagcgcaaggccctgggttggatcctcagctccggggggaagggggggagaatctgagtgtgaacttgattgttcacatccttgacgcaagtgtggatggctttttaaattactggattcagaatacttaaaaaaaaaaaaaaaaaaa

SEQ ID NO: 1510 - protein, 356 aa, Rattus norvegicus
  misc_feature (1)..(356): Xaa=Unknown amino acid
MWALIFCFLSHPRDTGARSHSLHYSYSAVTEPGPGVPAFFASGFVDNQPFIHYDSRKMEAEPCADWLRENPYYFDEETQVFTNRMKIYQLKPEKHSAILQQLWXPESESRWLLPASRPSHPPVHVRLXDAGQQDHRALAVWLRWQGLPDLGLGLYAIYSSHLHCWLHQAQVAKQXVLAAEREDLLGEGVCPVAKEILNYGRRELYPSXPSTDNSDTPPQTXRXCHPEVLGPGLLPCXHHPDLAVEWGGPDPGHGACGDQAYRGWNLPEVGSCGGASWEGAEVHMPCGAXGAAXAAYPEMGASFIHXFQHGNQCHLCCRWSRLCCGHYWSCDHWSCGGCCEEEEEKHRWIXGDYAPA

SEQ ID NO: 1511 - DNA, 402 bp, Rattus norvegicus
  ref <308>: DATABASE ACCESSION NUMBER: EMBL / L41685
  ref <309>: DATABASE ENTRY DATE: 2000-03-04
cggggtgtggtgaaggatgccacggagtccacagcccgagtagaattgcactctacctgccagaccatctctgtggaccgccagcggctcaccacagttgactcccagcgtccaggtggcatgacttccacctatggaaggactcccatgtatggctctcagactcccatgtatggctctggctcccgaacacccatgtatggctcccagacacctctgcaggatggtagccgcactccacattatggctcacagacacccctgcatgatggtagccgcactcctgctcagagtgggggctgggatcccaacaaccctaacacaccttccagggctgaggaggaatacgaatatgcctttgacgacgaacccaccccatccccacaagcatatggggggccg

SEQ ID NO: 1512 - DNA, 3197 bp, Rattus norvegicus
  ref <308>: DATABASE ACCESSION NUMBER: EMBL / M13101
  ref <309>: DATABASE ENTRY DATE: 2000-03-04
gaattcaaggcccatactgaacatggtaaaagccatatacagcaaaccagttgctaacattaaactaaatggagagaaacttgaagcaatcccactaaaatcagggactagacaaggctgcccactctctccctacttattcaatatagttcttgaagttctagccagagcaatcagacaacaaaaggatgtcaaggggatacagatcgctaaagaagaagtcaaaatatcactatttgcagatgatatgatagtatatttaagtgatcccaaaagttccacgagagaactactaaagctgataaacaacttcagcaaagtggctgggtataaaattaactcaaataaatcagttgccttcctctatacaaaagagaaacaagccaagaaagaaattagggaaacgacacccttcataatagacccaaataatataaagtacctcggagtgactttaacaaagcaagtaaaagatctgtacaataagaacttcaagacactgaagaaggaaattgaagaagacctcagaagatggaaagatctcccatgctcatggattggcaggattaatatagtaaaaatggccattttaccaaaagcaatcttcagattcaatgcaatccccatcaaaataccaatccaattcttcaaagagttagacagaacaatttacaaattcatctggaataacaaaaaacccaggatagctaaaggtatcctcaacaatgaaaggacttcagggggaatcactatccctgaactcaagcagtattacagagcaatagtgataaaaactgcatggtattggtacagagacagacagatagaccaatggaatagaattgaagacccagaaatgaacccacacacatatggtcacttgatttttcacaaaggagccaaaaccatccaatggaaaaaagatagcattttcagcaaatggtgctggttcaactggaggtcaacatgtagaagaatgcagatcgatccatgcttatcaccctgtacaaagcttaagtccaagtggatcaaggacctccacatcaaaccagacacacccaaactaatagaagaaaaactagggacgcatctggaacacatgagcactggaaaaaatttcctgaacaaaacaccaatggcttacgctctaagatcaagaattgacaaatgggatctcataaaactgcaaagcttctgtaaggcaaaggacactgtggttaggacaaaacggcaaccaacagattgggaaaagatctttaccaatcctacaacagatagaggccttatatccaaaatatacaaagaactcaagaagttagaccgcagggaaacaaataaccctattaaaaaatggggctcagagctaaacaaagaattcacagctgaggaatgccgaatggcggagaaacacctaaagaaatgttcaacatctttagtcataagggaaatgcaaatcaaaacaaccctgagatttcacctcacaccagtgagaatggctaagatcaaaaactcaggggacaacagatgctggcgaggatgtggagaaagaggaacactcctccattgttggtgggattgcaaactggtacaaccattctggaaatcagtctggaggatcctcagaaaattggacattgaactgcctgaggatccagctatacctctcttgggcatatacccaaaagatgccccaacatataaaaaagacacgtgctccactatgttcattgcagccttatttataatagccagaagctggaaagaacccagatgcccttcaacagaggaatggatacagaaaatgtggtacatctacacaatggaatattactcagctatcaaaaacaacgactttatgaaattcgtaggcaaatggctggaactggaaaatatcatcctgagtgagctaacccaaacacagaaagacatacatggtatgtactcactgatatgtggctattagccaaatgcttgaattaccctaaatgcctagaacaaatgaaactcaagacagatgatcaaaatgtgaatggttcactccttctttaaaaggggaacaagaatacccttggcagggaagagagaggcaaagattaaaacagagactgaaggaacacccattcagagtctgccccacatgtggcccatgcatatacagccatccaattagacaagatggatgaagcaaagaagtgcaggctgacaggagccggatgtagatcgctcctgagagacacagccagaatatagcaaatacagaggcgaataccagcagcaaaccactgaactgagaataggacccccgttgaaggaatcagagaaagaactggaagagcttgaaggggctcgagaccccatatgtacaacaatgccaagcaaccatagcttccagggactaagccactacctaaagactatacatggactgaccctggactctgacctcataggtagcaatgaatatcctagtaagagcaccagtggaagcggaacgcctgggtcctgctaagactgaacccccagtgaactagactgttgcggggagggggacaatggggggagggtggggaggggaacaccgataagaaacaggggggggagggggatgtttgcccggaaactgggaaagggaataacactcgaaatcgtatataagaaatactcaagttaataaaaataaaataaaataaaataaaaaaggagcattcaactcataaataatttttgttctgaaaaatatttttaattgttatcagttatgagacagcttttcagaagattgtgtgtgtgtgtgtgtgtgtgtgtgtgtgtgtactacagcatgttttatatttagttatcaatccttgaagaatgatttagttttaaattaaatttaaatataatactagactctgttagatacgaaaggtaaatttctattttggttccctttactcccatgtctagtgtttctagatggaaaatattgtgatcctgctgtcttatagatttaacttaagaatgtttacattttattttcaactagattggcaattcaaagcctggtcttagaagttattttaaagtatgttcttagtgtaagtcaatttttaagctagttgtagttcatttaatttcctcacaagagttatttttgtgtgtggtatatttctcttttgttaggtgatttttgctgttatacttaccttgaattc

SEQ ID NO: 1513 - protein, 647 aa, Rattus norvegicus
  misc_feature (1)..(647): Xaa=Unknown amino acid
MVKAIYSKPVANIKLNGEKLEAIPLKSGTRQGCPLSPYLFNIVLEVLARAIRQQKDVKGIQIAKEEVKISLFADDMIVYLSDPKSSTRELLKLINNFSKVAGYKINSNKSVAFLYTKEKQAKKEIRETTPFIIDPNNIKYLGVTLTKQVKDLYNKNFKTLKKEIEEDLRRWKDLPCSWIGRINIVKMAILPKAIFRFNAIPIKIPIQFFKELDRTIYKFIWNNKKPRIAKGILNNERTSGGITIPELKQYYRAIVIKTAWYWYRDRQIDQWNRIEDPEMNPHTYGHLIFHKGAKTIQWKKDSIFSKWCWFNWRSTCRRMQIDPCLSPCTKLKSKWIKDLHIKPDTPKLIEEKLGTHLEHMSTGKNFLNKTPMAYALRSRIDKWDLIKLQSFCKAKDTVVRTKRQPTDWEKIFTNPTTDRGLISKIYKELKKLDRRETNNPIKKWGSELNKEFTAEECRMAEKHLKKCSTSLVIREMQIKTTLRFHLTPVRMAKIKNSGDNRCWRGCGERGTLLHCWWDCKLVQPFWKSVWRILRKLDIELPEDPAIPLLGIYPKDAPTYKKDTCSTMFIAALFIIARSWKEPRCPSTEEWIQKMWYIYTMEYYSAIKNNDFMKFVGKWLELENIILSELTQTQKDIHGMYSLICGYX

SEQ ID NO: 1514 - DNA, 2524 bp, Rattus norvegicus
  ref <308>: DATABASE ACCESSION NUMBER: Refseq / NM_012639
  ref <309>: DATABASE ENTRY DATE: 2002-11-05
gcccggctccctcaggtataagtatgttgaaattgcatcaatggagcacatacagggagcttggaagacgatcagcaatggtttcggactcaaagatgctgtgtttgatggctccagttgcatctcccctacaattgttcagcagtttggctatcagcgtcgggcctctgatgatggcaaactcacggattcttctaagacaagcaatactatccgggttttcttgccgaataagcaaaggactgtggtcaatgtgcggaatgggatgagcttgcacgactgccttatgaaagctctgaaggttagaggcctgcagccagagtgctgtgcagtgttcagacttcttcaggagcacaaaggtaagaaagcacgcttagattggaacaccgacgccgcctctctgattggagaagaactgcaagtggattttttggatcacgttccactcacaactcacaactttgctcggaaaacgttcctgaagcttgcattctgtgacatctgtcaaaagttcctgctaaatggatttcgatgtcagacttgtggctacaagtttcatgagcactgtagcaccaaagtacctactatgtgtgtggactggagtaatatcagacagctcttgctgtttccaaattccactgcaagtgacagtggagtcccagcaccaccctctttcacaatgcgtcggatgcgagaatctgtttcccggatgcctgctagttcccagcacagatactccacaccccatgccttcactttcaacacctccagcccttcctctgaaggttccctgtcccagaggcagaggtcaacgtccactcccaatgtccacatggtcagcaccaccctgcctgtggacagcaggatgattgaggatgcaattcgaagtcacagtgaatcagcctcaccttcagccctgtccagcagccccaacaacctgagcccaacaggctggtcacagcccaaaacccctgtgccagcacaaagagagagggcgccaggatctgggacccaggaaaaaaacaaaattaggcctcgtgggcagagagattcaagttattactgggaaatagaagccagtgaggtgatgctgtctactcggattggctcgggctcctttggcactgtgtacaagggcaagtggcatggagatgttgcagtaaagatcctaaaggtggttgacccaactccagagcaacttcaggccttcaggaacgaggtggctgttttgcgcaaaacacggcatgttaatatcctgctgttcatggggtacatgacaaaggacaacctggcgattgtgacccagtggtgtgaaggcagcagtctctacaaacacctgcatgtccaggagaccaaattccagatgttccagctaattgacattgcccggcagacagctcagggaatggactatttacatgcaaagaacatcatccacagagacatgaaatccaacaatatatttctccatgaaggcctcacggtgaaaatcggagattttggtttggcaacagtgaagtcgcgctggagtggttctcagcaggttgaacagcccactggctctgtgctgtggatggccccagaagtaatccgaatgcaggataacaacccgttcagcttccagtccgatgtctactcctatggcattgtgctgtatgagctgatgactggggagcttccctactcccacatcaacaaccgagaccagatcatcttcatggtgggccgtgggtacgcctccccagatcttagcaggctctacaagaactgccccaaggcaatgaagaggttggtggctgactgtgtgaagaaagtcaaagaagaaaggcctttgtttcctcagatcctgtcttccattgagctgcttcagcactctctgccgaaaatcaacaggagcgcctctgagccttccctgcatcgggcagctcacactgaggacatcaatgcttgtacgctgaccacatccccaaggctaccagtcttctagctgacgttatagctgttcttaggccaccaggggacgaagaagagtcagcaggcaccactttctgtttccttgggggcagaatgcatgtttccggaaaagctgctgctaaggacctagactactcacagggccttaacttcatattgccttcttttctacccttcctgccctggaaatggaagctgtccgccaagccagcctgctccagaggtatacaagtcagcgagtatttttagggcaaatggccttggagagagaaggcagggcactccggctactgcagggacatgcagttgggaacttggctcattgagctgtacagacagtggtgcagtgccagttttgcacatggagtcctggccacctgggggagcctgctttggtactacagaacttcactttgtggacacaccttcctcttactgagtctaagatgtcctgtgcagaggatgctttccaagcacggtgctccaccttctggcagcctcccacacgctgaatctgtcttccaggagctgccctatggggtgctgcagc

SEQ ID NO: 1515 - protein, 648 aa, Rattus norvegicus
  ref <308>: DATABASE ACCESSION NUMBER: Refseq / NP_036771
  ref <309>: DATABASE ENTRY DATE: 2002-11-05
MEHIQGAWKTISNGFGLKDAVFDGSSCISPTIVQQFGYQRRASDDGKLTDSSKTSNTIRVFLPNKQRTVVNVRNGMSLHDCLMKALKVRGLQPECCAVFRLLQEHKGKKARLDWNTDAASLIGEELQVDFLDHVPLTTHNFARKTFLKLAFCDICQKFLLNGFRCQTCGYKFHEHCSTKVPTMCVDWSNIRQLLLFPNSTASDSGVPAPPSFTMRRMRESVSRMPASSQHRYSTPHAFTFNTSSPSSEGSLSQRQRSTSTPNVHMVSTTLPVDSRMIEDAIRSHSESASPSALSSSPNNLSPTGWSQPKTPVPAQRERAPGSGTQEKNKIRPRGQRDSSYYWEIEASEVMLSTRIGSGSFGTVYKGKWHGDVAVKILKVVDPTPEQLQAFRNEVAVLRKTRHVNILLFMGYMTKDNLAIVTQWCEGSSLYKHLHVQETKFQMFQLIDIARQTAQGMDYLHAKNIIHRDMKSNNIFLHEGLTVKIGDFGLATVKSRWSGSQQVEQPTGSVLWMAPEVIRMQDNNPFSFQSDVYSYGIVLYELMTGELPYSHINNRDQIIFMVGRGYASPDLSRLYKNCPKAMKRLVADCVKKVKEERPLFPQILSSIELLQHSLPKINRSASEPSLHRAAHTEDINACTLTTSPRLPVF

SEQ ID NO: 1516 - DNA, 982 bp, Rattus norvegicus
  ref <308>: DATABASE ACCESSION NUMBER: Refseq / NM_053835
  ref <309>: DATABASE ENTRY DATE: 2003-01-13
gggagctgacagcagccacgcggggaagatggctgaggacttcggcttcttctcgtcgtcggagagcggggcccccgaggccgccgaggaggacccggcggccgccttcctggcccagcaggagagcgagattgctggcatcgagaatgactcgggtttcggggcacctgccgccagccaggtggcctctgcgcagcccggactcgcgagcgggggtggttcggaggacatggggactacagtcaatggagatgtgtttcaggaggctaacgggcctgccgatggctacgctgcgattgcccaggcggacaggttgactcaggagcctgagagcatccgcaagtggagagaggagcagaagaaaaggctgcaggagttggatgctgcctcgaaggtgaccgaacaggagtggcgggagaaggccaaaaaagacctggaggagtggaaccagcgccaaagtgaacaggttgagaagaacaagatcaacaacaggatcgctgacaaagcgttctaccagcagccagatgctgataccattggctatgtggcatcggaagaggcttttgtgaaagaatccaaggaggagaccccaggcacagagtgggagaaggtggcccagctgtgtgacttcaaccctaagagcagcaagcaatgtaaagacgtgtcccgcctgcgctcggtgctcatgtccctgaagcagacgccactgtcccgctagtgcctgtcaccacgggccttggtggggcagagcagcagctgcttcagccagggtggaacttctctggcagctgccacacacgcctgttctgttcctctgagtctctgggagctgggaagcgggacccttacccctttcacccaccctgtccttcctggtcccctgttccagcccctcatgactcctgtcagtccacttgattgtgactgtccctcctgatgtatttttcttggcttaaagggtgtgttaactctttttacactt

SEQ ID NO: 1517 - protein, 229 aa, Rattus norvegicus
  ref <308>: DATABASE ACCESSION NUMBER: Refseq / NP_446287
  ref <309>: DATABASE ENTRY DATE: 2003-01-13
MAEDFGFFSSSESGAPEAAEEDPAAAFLAQQESEIAGIENDSGFGAPAASQVASAQPGLASGGGSEDMGTTVNGDVFQEANGPADGYAAIAQADRLTQEPESIRKWREEQKKRLQELDAASKVTEQEWREKAKKDLEEWNQRQSEQVEKNKINNRIADKAFYQQPDADTIGYVASEEAFVKESKEETPGTEWEKVAQLCDFNPKSSKQCKDVSRLRSVLMSLKQTPLSR

SEQ ID NO: 1518 - DNA, 1134 bp, Homo sapiens
  ref <308>: DATABASE ACCESSION NUMBER: Refseq / NM_007097
  ref <309>: DATABASE ENTRY DATE: 2003-01-15
cgcggggagccggcgtcggcggggacgggcttggcgcggaccgcacttcctctccgccaccgggcccggctccccgcggctcgggtgacagcgtcgcggccgccggacgcagcgcggggcaggcgcgggcagagccgagcgcagcggaggctccggcggaggcgcggggaaaatggctgatgactttggcttcttctcgtcgtcggagagcggtgccccggaggcggcggaggaggacccggcggccgccttcctggcccagcaggagagcgagattgcaggcatagagaacgacgagggcttcggggcacctgccggcagccatgcggcccccgcgcagccgggccccacgagtggggctggttctgaggacatggggaccacagtcaatggagatgtgtttcaggaggccaacggtcctgctgatggctacgcagccattgcccaggctgacaggctgacccaggagcctgagagcatccgcaagtggcgagaggagcagaggaaacggctgcaagagctggatgctgcatctaaggtcacggaacaggaatggcgggagaaggccaagaaggacctggaggagtggaaccagcgccagagtgaacaagtagagaagaacaagatcaacaaccggatcgctgacaaagcattctaccagcagccagatgctgatatcatcggctacgtggcatccgaggaggctttcgtgaaggaatccaaggaggagaccccaggcacagagtgggagaaggtggcccagctatgtgacttcaaccccaagagcagcaagcagtgcaaagatgtgtcccgcctgcgctcggtgctcatgtccctgaagcagacgccactgtcccgctaggtgcctgctaggtgcatggccacagagcatgggctgggcctgggcacaggaggagcagctgctttggtcggggtggagactcgcagcagctgctacccacagcctattccactcctccccatctccaggcgctgggaggggggccctcaccccatcacgcctcgctccctcctggccctctggtccagcccctcacgcctcctctcagtctactcaattgtgactgtccctcctgatgtattttttttcttggcttaaagggtgtgttgttg

SEQ ID NO: 1519 - protein, 229 aa, Homo sapiens
  ref <308>: DATABASE ACCESSION NUMBER: Refseq / NP_009028
  ref <309>: DATABASE ENTRY DATE: 2003-01-15
MADDFGFFSSSESGAPEAAEEDPAAAFLAQQESEIAGIENDEGFGAPAGSHAAPAQPGPTSGAGSEDMGTTVNGDVFQEANGPADGYAAIAQADRLTQEPESIRKWREEQRKRLQELDAASKVTEQEWREKAKKDLEEWNQRQSEQVEKNKINNRIADKAFYQQPDADIIGYVASEEAFVKESKEETPGTEWEKVAQLCDFNPKSSKQCKDVSRLRSVLMSLKQTPLSR

SEQ ID NO: 1520 - DNA, 650 bp, Rattus norvegicus
  ref <308>: DATABASE ACCESSION NUMBER: Refseq / NM_017050
  ref <309>: DATABASE ENTRY DATE: 2003-01-14
gttttgcaccttcgtttcctgcggcggcttctgtcgtctccttgctttttgctctcccaggttccgaggccgccgcgcgtctcccggggaagcatggcgatgaaggccgtgtgcgtgctgaagggcgacggtccggtgcagggcgtcattcacttcgagcagaaggcaagcggtgaaccagttgtggtgtcaggacagattacaggattaactgaaggcgagcatgggttccatgtccatcaatatggggacaatacacaaggctgtaccactgcaggacctcattttaatcctcactctaagaaacatggcggtccagcggatgaagagaggcatgttggagacctgggcaatgtggctgctggaaaggacggtgtggccaatgtgtccattgaagatcgtgtgatctcactctcaggagagcattccatcattggccgtactatggtggtccacgagaaacaagatgacttgggcaaaggtggaaatgaagaaagtacaaagactggaaatgctggaagccgcttggcttgtggtgtgattgggattgcccaataaacattccctatgtggtctgagtctcagactcatctgctgtcctgctaaactgtagaaaaaaaccaaaccattaaactgtaatcttaacagtt

SEQ ID NO: 1521 - protein, 154 aa, Rattus norvegicus
  ref <308>: DATABASE ACCESSION NUMBER: Refseq / NP_058746
  ref <309>: DATABASE ENTRY DATE: 2003-01-14
MAMKAVCVLKGDGPVQGVIHFEQKASGEPVVVSGQITGLTEGEHGFHVHQYGDNTQGCTTAGPHFNPHSKKHGGPADEERHVGDLGNVAAGKDGVANVSIEDRVISLSGEHSIIGRTMVVHEKQDDLGKGGNEESTKTGNAGSRLACGVIGIAQ

SEQ ID NO: 1522 - DNA, 2071 bp, Rattus norvegicus
  ref <308>: DATABASE ACCESSION NUMBER: Refseq / NM_012663
  ref <309>: DATABASE ENTRY DATE: 2002-10-20
gaattcgggctacccccgccatgtcggctaccgctgccaccgtcccgcctgccgccccggccggcgagggtggcccccctgcacctcctccaaatcttaccagtaacaggagactgcagcagacccaggcccaggtggatgaggtggtggacatcatgagggtgaatgtggacaaggtcctggagcgagaccagaagctatcggaactggatgatcgcgcagatgccctccaggcaggggcctcccagtttgaaacaagtgcagccaagctcaagcgcaaatactggtggaaaaacctcaagatgatgatcatcttgggagtgatttgcgccatcatcctcatcatcatcatcgtttacttcagcacttaagtccctgaggagtctgccctgcctaagaagggcctctcccccaccctcagcccgtcctccacctctcagccatatctttcagccccctcccttggatccgtgtgtgtgtgtgtccgtgtgtgtgccccctgtaaatagccagctgttatttatacatatataatattatatatatttggtctgtttgtagttttattactagaagattttttccggttgtccttaacaccccttcctgaggttcccatcacctctctctctcaccctctgccccctttcctctttcctgttcagccccaagtcccttcatttgcatctgctatgcaatagcccctctcctccttcccttggatttaaccaatccttcccctatcttccctgtacaattccagaccctccccaaacagagcaaaccccacagaaacaaacaaaacaccccacctgtctaggcttccataggttgcatctttgtatcccttgggagcctctaagactggtcctacttggtcctaagaatcccaaggatttctgggagcttccaacatgttgattagcatatcatttgcatacactgtcttttttttccctcggtttcttcctttctgttccattactcttcactcttctgtgtttttttttttttctttctttcttttcggaagagttagtttccattggtcctcttatcacacttttatttgcacgacattatctgcaggtggtggggagcctgggcttttggggaactaggaccccaaagttgcctcctcccagcccctctagtctagtttgcttcccttaccccatttccacacctcttgtaccctcctctccctcccccagctggtgtgtaagtgtcttggagttcagtgtgttatgatgggaccaataattctgccacttggggtctctccctacattcctgctccccagttttcgtgtggggcattcagctgacatttcccgggggtctccctccctcccatctgcctgatctgctgcctcctcccaccaggagaactggaggctgaccacaatctggttctttgaggaggggtggctctagtgtgtgtgggggtcatcactgccttggggaggagtaggacaaaacagaaccccccctaattcctgcctgaaatctctggcctcatccttgctagaggttggactgaaaactttcctccccaatcctggggggtattaccccccatcactgcccagctcctctgactgcccccctgtattcagggtgggggtactagtcactgccaatatgtgtatgggacttgctggaggatggggatccttgtccttctctagggctgctgagccctgagagagagagagagagagagagagagagagagagagagagagagagaagcaagctatttccctgttgggtacaatgatagagaaaggatctaatcgggaaaaatggcacagttttaggggtctgagggtacagccccttaacctgcctcttgggggggggtgttccccaaactcttcccccacacacaccaggttttctgtgtggaggggaaccaaggagatgtaaactgtggtgtgaaagggtaggagagatgctgggggtgggggtgcttgtgttttacacccccaatattatcccagtgtcccctgccttccttcttcccctgccccatgcccccaattctgtggcgcatccagccgaattc

SEQ ID NO: 1523 - protein, 116 aa, Rattus norvegicus
  ref <308>: DATABASE ACCESSION NUMBER: Refseq / NP_036795
  ref <309>: DATABASE ENTRY DATE: 2002-10-20
MSATAATVPPAAPAGEGGPPAPPPNLTSNRRLQQTQAQVDEVVDIMRVNVDKVLERDQKLSELDDRADALQAGASQFETSAAKLKRKYWWKNLKMMIILGVICAIILIIIIVYFST

SEQ ID NO: 1524 - DNA, 3019 bp, Rattus norvegicus; identical to SEQ ID NO: 145
  ref <308>: DATABASE ACCESSION NUMBER: Refseq / NM_030990
  ref <309>: DATABASE ENTRY DATE: 2003-01-13

SEQ ID NO: 1525 - protein, 277 aa, Rattus norvegicus; identical to SEQ ID NO: 146
  ref <308>: DATABASE ACCESSION NUMBER: Refseq / NP_112252
  ref <309>: DATABASE ENTRY DATE: 2003-01-13

SEQ ID NO: 1526 - DNA, 2938 bp, Homo sapiens; identical to SEQ ID NO: 147
  ref <308>: DATABASE ACCESSION NUMBER: Refseq / NM_000533
  ref <309>: DATABASE ENTRY DATE: 2002-11-05

SEQ ID NO: 1527 - protein, 277 aa, Homo sapiens; identical to SEQ ID NO: 148
  ref <308>: DATABASE ACCESSION NUMBER: Refseq / NP_000524
  ref <309>: DATABASE ENTRY DATE: 2002-11-05

SEQ ID NO: 1528 - DNA, 554 bp, Rattus norvegicus; identical to SEQ ID NO: 943
  ref <308>: DATABASE ACCESSION NUMBER: Refseq / NM_053330
  ref <309>: DATABASE ENTRY DATE: 2003-01-13

SEQ ID NO: 1529 - protein, 160 aa, Rattus norvegicus; identical to SEQ ID NO: 944
  ref <308>: DATABASE ACCESSION NUMBER: Refseq / NP_445782
  ref <309>: DATABASE ENTRY DATE: 2003-01-13

SEQ ID NO: 1530 - DNA, 1821 bp, Rattus norvegicus; identical to SEQ ID NO: 844
  ref <308>: DATABASE ACCESSION NUMBER: EMBL / M31322
  ref <309>: DATABASE ENTRY DATE: 2000-03-04

SEQ ID NO: 1531 - DNA, 3727 bp, Homo sapiens; identical to SEQ ID NO: 845
  ref <308>: DATABASE ACCESSION NUMBER: Refseq / NM_016160
  ref <309>: DATABASE ENTRY DATE: 2002-11-04

SEQ ID NO: 1532 - protein, 763 aa, Homo sapiens; identical to SEQ ID NO: 846
  ref <308>: DATABASE ACCESSION NUMBER: Refseq / NP_057244
  ref <309>: DATABASE ENTRY DATE: 2002-11-04

SEQ ID NO: 1533 - DNA, 936 bp, Rattus norvegicus
  ref <308>: DATABASE ACCESSION NUMBER: Refseq / NM_031975
  ref <309>: DATABASE ENTRY DATE: 2003-01-13
gaattccggccgccgccaccgcgccaagttccggccgcggccaccttccgccgtccagggctcctccgcctcggccccgggaccccggctccccgccagccccggccccggcaccatgtcggagaagagcgtggaggcagcggccgagctaagcgccaaggacctgaaggaaaagaaggacaaggtggaggagaaggctggccggaaagaacggaagaaagaagtagtggaggaggaggagaatggagctgaggaggaggaagaagaaactgctgaggatggagaggatgatgatgaaggagacgaagaagatgaggaggaagaggaggaggaggatgaaggccccgtgcggaagagaactgctgaagaggaggatgaagcggatcccaagaggcagaagacagaaaacggggcgtcggcttgagcccctgcccgtgggcttggggatgggaggcccctcaggtcctggaggtggggcaggaacacacaaatccagccccccttctcctggctccctcgtctggccctgccccagagctgtgacccttgccctttgacccagcctctcatttccatctctccagacactgctccttcaccctcactgccacaggtccagcccccaacccgcctcatccaagctccccagccggccctcacttgccctagcattccttgttcttccctgccttcctcaccatcgatctgttccagtccttgcgaagcctctccttcccctctgcaccccgagcctctcagcctgcccttctctctcctgcctgacccctgggtctccctcagattccctcctctcagacagcgccaggccggggtggggctggggttggggccaagccccgaagctgccccctcccctttttgtataatttaataaagaaacggtcgcgcttcaaaaaaaaaaaaaaaacggaattc

SEQ ID NO: 1534 - protein, 102 aa, Rattus norvegicus
  ref <308>: DATABASE ACCESSION NUMBER: Refseq / NP_114181
  ref <309>: DATABASE ENTRY DATE: 2003-01-13
MSEKSVEAAAELSAKDLKEKKDKVEEKAGRKERKKEVVEEEENGAEEEEEETAEDGEDDDEGDEEDEEEEEEEDEGPVRKRTAEEEDEADPKRQKTENGASA

SEQ ID NO: 1535 - DNA, 686 bp, Rattus norvegicus
  ref <308>: DATABASE ACCESSION NUMBER: Refseq / NM_031136
  ref <309>: DATABASE ENTRY DATE: 2003-01-13
gcggcctctgagcagatcgtctctccttgttcgcccagctcgctcagctccttccagcaaccatgtctgacaaacccgatatggctgagatcgagaaattcgataagtcgaagttgaagaagacagaaacacaagagaaaaatcctctgccttcaaaagaaacaattgaacaagagaagcaagctggcgaatcgtaatgaggcgagcgccgccaatatgcactgtacattccacgagcattgccttcttattttacttcttttagctgtttaacttcgtaagatgcaaagaggttggatcaagtttaaatgactgtgctgcccctttcacatcaaagaatcagaactactgaccaggaaggcctccccccgcctctcccgcccacctgctggcctggctggcagagagggaaaagaacttgcatgttggtgaaggaaaaagctgggtgggagatggtggaattgagagtaaaataaagatgtcttgcaggatataaaatgcagtttaatcagagtgccatttttttttgttcaaacgattttaattattggaatgcacaatttttttaatatgcaaataaagttttaaaacctgaaaaaaaaaaaaaaaaagaaacaacagtcgttatggccataaaacacatcatctgtgattttggagagaaccactggaaagaaagtttgagg

SEQ ID NO: 1536 - protein, 44 aa, Rattus norvegicus
  ref <308>: DATABASE ACCESSION NUMBER: Refseq / NP_112398
  ref <309>: DATABASE ENTRY DATE: 2003-01-13
MSDKPDMAEIEKFDKSKLKKTETQEKNPLPSKETIEQEKQAGES

SEQ ID NO: 1537 - DNA, 451 bp, Rattus norvegicus; identical to SEQ ID NO: 847
  ref <308>: DATABASE ACCESSION NUMBER: EMBL / M34331
  ref <309>: DATABASE ENTRY DATE: 2002-04-09

SEQ ID NO: 1538 - protein, 124 aa, Rattus norvegicus; identical to SEQ ID NO: 848
  misc_feature (1)..(124): Xaa=Unknown amino acid

SEQ ID NO: 1539 - DNA, 528 bp, Rattus norvegicus
  ref <308>: DATABASE ACCESSION NUMBER: Refseq / NM_012935
  ref <309>: DATABASE ENTRY DATE: 2003-01-13
atggacatagccatccaccacccctggatccggcgtcccttctttcctttccactccccaagccgcctctttgaccagttcttcggagagcacctgttggagtctgacctcttctctacagccacttccctgagccccttctaccttcggccaccctccttcctgcgggcacctagctggattgacactgggctctcagagatgcgtatggagaaggacaggttctctgtgaacctggacgtgaagcacttctctccagaggaactcaaagtcaaggttctgggagacgtgattgaggtgcacggcaagcacgaagagcgccaggacgaacatggcttcatctccagggagttccacaggaagtaccggatcccagccgacgtggatcctctcaccattacttcttccctgtcatcggatggagtcctcactgtgaatggaccaaggaaacaggcctctggccctgagcgcaccattcccatcacccgtgaagagaagcctgctgtcactgcagcccctaagaagtag

SEQ ID NO: 1540 - protein, 175 aa, Rattus norvegicus
  ref <308>: DATABASE ACCESSION NUMBER: Refseq / NP_037067
  ref <309>: DATABASE ENTRY DATE: 2003-01-13
MDIAIHHPWIRRPFFPFHSPSRLFDQFFGEHLLESDLFSTATSLSPFYLRPPSFLRAPSWIDTGLSEMRMEKDRFSVNLDVKHFSPEELKVKVLGDVIEVHGKHEERQDEHGFISREFHRKYRIPADVDPLTITSSLSSDGVLTVNGPRKQASGPERTIPITREEKPAVTAAPKK

SEQ ID NO: 1541 - DNA, 691 bp, Homo sapiens
  ref <308>: DATABASE ACCESSION NUMBER: Refseq / NM_001885
  ref <309>: DATABASE ENTRY DATE: 2001-05-15
gacccctcacactcacctagccaccatggacatcgccatccaccacccctggatccgccgccccttctttcctttccactcccccagccgcctctttgaccagttcttcggagagcacctgttggagtctgatcttttcccgacgtctacttccctgagtcccttctaccttcggccaccctccttcctgcgggcacccagctggtttgacactggactctcagagatgcgcctggagaaggacaggttctctgtcaacctggatgtgaagcacttctccccagaggaactcaaagttaaggtgttgggagatgtgattgaggtgcatggaaaacatgaagagcgccaggatgaacatggtttcatctccagggagttccacaggaaataccggatcccagctgatgtagaccctctcaccattacttcatccctgtcatctgatggggtcctcactgtgaatggaccaaggaaacaggtctctggccctgagcgcaccattcccatcacccgtgaagagaagcctgctgtcaccgcagcccccaagaaatagatgccctttcttgaattgcattttttaaaacaagaaagtttccccaccagtgaatgaaagtcttgtgactagtgctgaagcttattaatgctaagggcaggcccaaattatcaagctaataaaatatcattcagcaac

SEQ ID NO: 1542 - protein, 175 aa, Homo sapiens
  ref <308>: DATABASE ACCESSION NUMBER: Refseq / NP_001876
  ref <309>: DATABASE ENTRY DATE: 2001-05-15
MDIAIHHPWIRRPFFPFHSPSRLFDQFFGEHLLESDLFPTSTSLSPFYLRPPSFLRAPSWFDTGLSEMRLEKDRFSVNLDVKHFSPEELKVKVLGDVIEVHGKHEERQDEHGFISREFHRKYRIPADVDPLTITSSLSSDGVLTVNGPRKQVSGPERTIPITREEKPAVTAAPKK

SEQ ID NO: 1543 - DNA, 1146 bp, Rattus norvegicus
  ref <308>: DATABASE ACCESSION NUMBER: Refseq / NM_012529
  ref <309>: DATABASE ENTRY DATE: 2002-11-05
atgcccttctccaacagccacaacacgcagaagctgcgcttcccggccgaggatgaattccctgatctgagcagccacaacaaccatatggccaaggtgctgacccccgagctgtacgcggagctccgtgccaagtgcacgccgagcggctttacgttggacgacgccatccagactggcgtagacaatccgggccacccgtacatcatgacagtgggtgcagtggcgggcgacgaggagagttacgacgtattcaaggaccttttcgaccccatcatcgaggaccggcacggcggctaccagcccagtgatgagcacaagactgacctcaacccagacaacctgcagggcggcgatgacctggaccccaactacgtgctgagctcgcgggtgcgcacaggccgaagcatccgcggcttctgcctcccccctcactgcagccgtggggagcgccgcgccatcgagaagctggcagtagaagccctgtccagcctagatggcgacctgtctggcaggtactatgcgctcaagagcatgaccgaggcggacgagcagcagctcattgacgaccacttcctcttcgacaagcctgtgtcgcctctgctgctggcctccgcgatggcccgcgactggccggatgctcgcggcatttggcacaatgacaataagacgttcctggtgtggatcaacgaggaggaccacctgcgggttatctccatgcagaaagggggcaacatgaaggaagttttcacgcgattctgcactggcctcactcagattgaaactctcttcaagtctaagaactatgagttcatgtggaaccctcacctgggctacatcctcacgtgcccatccaacctgggcactgggcttcgggcaggcgtgcacatcaagctgccccacctgggaaagcacgagaagttctcggaggtgctcaagcgactgcggcttcagaagcgaggcacaggtggtgtggacaccgctgctgtgggtggagtttttgatgtctccaacgctgaccgcctgggcttctcggaggtggagctggtgcagatggtggtggacggagtgaagctactcattgagatggagcagcggcttgagcagggtcagcccattgacgacctcatgcctgcccagaagtga

SEQ ID NO: 1544 - protein, 381 aa, Rattus norvegicus
  ref <308>: DATABASE ACCESSION NUMBER: Refseq / NP_036661
  ref <309>: DATABASE ENTRY DATE: 2002-11-05
MPFSNSHNTQKLRFPAEDEFPDLSSHNNHMAKVLTPELYAELRAKCTPSGFTLDDAIQTGVDNPGHPYIMTVGAVAGDEESYDVFKDLFDPIIEDRHGGYQPSDEHKTDLNPDNLQGGDDLDPNYVLSSRVRTGRSIRGFCLPPHCSRGERRAIEKLAVEALSSLDGDLSGRYYALKSMTEADEQQLIDDHFLFDKPVSPLLLASAMARDWPDARGIWHNDNKTFLVWINEEDHLRVISMQKGGNMKEVFTRFCTGLTQIETLFKSKNYEFMWNPHLGYILTCPSNLGTGLRAGVHIKLPHLGKHEKFSEVLKRLRLQKRGTGGVDTAAVGGVFDVSNADRLGFSEVELVQMVVDGVKLLIEMEQRLEQGQPIDDLMPAQK

SEQ ID NO: 1545 - DNA, 1432 bp, Homo sapiens
  ref <308>: DATABASE ACCESSION NUMBER: Refseq / NM_001823
  ref <309>: DATABASE ENTRY DATE: 2003-01-15
gctgttcggcctgcgtcgctccgggagctgccgacggacggagcgcccccgcccccgcccggccgcccgcccgccgccgccatgcccttctccaacagccacaacgcactgaagctgcgcttcccggccgaggacgagttccccgacctgagcgcccacaacaaccacatggccaaggtgctgacccccgagctgtacgcggagctgcgcgccaagagcacgccgagcggcttcacgctggacgacgtcatccagacaggcgtggacaacccgggccacccgtacatcatgaccgtgggctgcgtggcgggcgacgaggagtcctacgaagtgttcaaggatctcttcgaccccatcatcgaggaccggcacggcggctacaagcccagcgatgagcacaagaccgacctcaaccccgacaacctgcagggcggcgacgacctggaccccaactacgtgctgagctcgcgggtgcgcacgggccgcagcatccgtggcttctgcctccccccgcactgcagccgcggggagcgccgcgccatcgagaagctcgcggtggaagccctgtccagcctggacggcgacctggcgggccgatactacgcgctcaagagcatgacggaggcggagcagcagcagctcatcgacgaccacttcctcttcgacaagcccgtgtcgcccctgctgctggcctcgggcatggcccgcgactggcccgacgcccgcggtatctggcacaatgacaataagaccttcctggtgtgggtcaacgaggaggaccacctgcgggtcatctccatgcagaaggggggcaacatgaaggaggtgttcacccgcttctgcaccggcctcacccagattgaaactctcttcaagtctaaggactatgagttcatgtggaaccctcacctgggctacatcctcacctgcccatccaacctgggcaccgggctgcgggcaggtgtgcatatcaagctgcccaacctgggcaagcatgagaagttctcggaggtgcttaagcggctgcgacttcagaagcgaggcacaggcggtgtggacacggctgcggtgggcggggtcttcgacgtctccaacgctgaccgcctgggcttctcagaggtggagctggtgcagatggtggtggacggagtgaagctgctcatcgagatggagcagcggctggagcagggccaggccatcgacgacctcatgcctgcccagaaatgaagcccggcccacacccgacaccagccctgctgcttcctaacttattgcctgggcagtgcccaccatgcacccctgatgttcgccgtctggcgagcccttagccttgctgtagagacttccgtcacccttggtagagtttatttttttgatggctaagatactgctgatgctgaaataaactagggttttggcctgcctgcgtctg

SEQ ID NO: 1546 - protein, 381 aa, Homo sapiens
  ref <308>: DATABASE ACCESSION NUMBER: Refseq / NP_001814
  ref <309>: DATABASE ENTRY DATE: 2003-01-15
MPFSNSHNALKLRFPAEDEFPDLSAHNNHMAKVLTPELYAELRAKSTPSGFTLDDVIQTGVDNPGHPYIMTVGCVAGDEESYEVFKDLFDPIIEDRHGGYKPSDEHKTDLNPDNLQGGDDLDPNYVLSSRVRTGRSIRGFCLPPHCSRGERRAIEKLAVEALSSLDGDLAGRYYALKSMTEAEQQQLIDDHFLFDKPVSPLLLASGMARDWPDARGIWHNDNKTFLVWVNEEDHLRVISMQKGGNMKEVFTRFCTGLTQIETLFKSKDYEFMWNPHLGYILTCPSNLGTGLRAGVHIKLPNLGKHEKFSEVLKRLRLQKRGTGGVDTAAVGGVFDVSNADRLGFSEVELVQMVVDGVKLLIEMEQRLEQGQAIDDLMPAQK

SEQ ID NO: 1547 - DNA, 2599 bp, Rattus norvegicus
  ref <308>: DATABASE ACCESSION NUMBER: Refseq / NM_138508
  ref <309>: DATABASE ENTRY DATE: 2003-01-13
taaagcttcagtctgtaggaggttgttctctttgctgctagagccatgccttcagtcgcgttgaactctccgcgcctgcgccgggtgttcgtggtgggagttggcatgaccaagttcatgaagcctggaggtgagaattcaagagactatcctgatttggcaaaagaagcaggccagaaggcattggcggacgcgcagatcccttactccgcagtggagcaggcgtgcgttggctatgtgtacggtgaatccacctgcgggcagagggccatctatcacagcctggggctgactggcatccctatcattaatgtcaacaataactgctctaccggttctactgctttgtttatggcccagcaactggttcagggaggtttagcaaattgcgtgttagctcttgggtttgagaagatggaaaagggatcccttggtaccaaatattcagatcggtcaaatccactggaaaaacatattgacgtcttgatcaataagtatggaatgtctgcctgtccatttgctcctcagctgtttgggagcgctgggaaagaacatatggaaacatatggaacaaaggttgaacactttgcaaaaattggatggaaaaatcataaacactcagttaataacccgtattcccagttccaagatgaatacagcttagatgagataatgaaatcaaggccagttttcgattttctgactgtcttacaatgctgtcccacctcagatggtgccgcagcagcaattgtgtctagtgaggagtttgtgcagaagcatggcctgcagtccaaagctgtggaaattgtggcacaggagatggtgactgacatgcccagtacatttgaagaaaaaagtgttattaaaatggttggctatgatatgagtaaagaagctgccaggaagtgctatgagaagtccggcctgggtcccagtgatgtcgacgtgatagagcttcacgattgcttctctaccaatgaactcctgacttacgaagcactggggctctgtccagaaggacaaggtggagcactggtggacagaggggacaacacttacggaggaaagtgggtcataaaccctagtggaggcctcatctccaagggacacccactgggtgccacaggtctggctcagtgcgcggagctctgctggcagctgagaggcgaagccggaaagaggcaggttcctggggcaaaggtggctctgcagcacaatttaggccttggaggagctgctgttgtcaccctctacagaatgggttttcccgaagctgccagctccttcagaacgcaccagatttcagctgctcccaccagctctgcaggggatggattcaaggcaaatctcatttttaaggaaatcgagaagaagcttgaagaggaaggggaagagttcgtgaagaaaatcggtggcatttttgccttcaaagtgaaggatggccccgggggcaaagaagctacgtgggtggtggacgtgaagaacggcaaaggatcggtgcttccggattcagataagaaggctgactgcacaatcaccatggctgactcagacttgctggctttgatgactggtaaaatgaaccctcagtcggccttttttcaaggtaaactgaaaattgccggtaacatgggcctggccatgaaactgcaaagcctgcagcttcagccggacaaagctaagctgtgaagagtccctttggcaacctcaggacatcaagatgagatgtgtggatacgtagaaatccacgtctccctgtcaggacttagactgacacttcctgaatagcatgagatagatttcttgctaggtggctatggccaattgtatttcccccaagctgggggtgcaaagggcctcccaggctacactgctgctttgaggacttgcattctactgtgcttcatgaagctactatgttaatgatggtttggggtaaacttgagtttcagaataaagttcagaatagtaaaatctaaagactgtgtaaacagagcccttgttttgcttagaagtacatttaaggatcgtcgtgttggacactcggtgtgacagtttccccttagagggactggagaagaaacagatttccagagttgaccaggaattagtgcctcacacttaattacctgcatcagtttctcactaatagttcttaaaataaaattctgtactgagtgtttaaaaaaaaactttaaaaatgttcttttcatgccatcagaaacagttcttttcttcccaaataaaatacaagaattatggtcagagcttaagagagaatttacagctgaacagagctgtttttaaaatatttttaaagtgggcatcttttaaaaaaaatcagcatcggagctatgggatgccattgctaaaaataattgaataaagtttcttccagagatacaggcttcaaattatattttcatactagtaagtttataaactgggtctcacaaatttcctctttcatgcatttggttgtctgcatttatctttcttcctggtttttctaactctaacgctgtttgttataatttaggtttgggataaaaatatgcttttggaagatttaaaaagaaaattaaaacagctcttcctg

SEQ ID NO: 1548 - protein, 547 aa, Rattus norvegicus
  ref <308>: DATABASE ACCESSION NUMBER: Refseq / NP_612517
  ref <309>: DATABASE ENTRY DATE: 2003-01-13
MPSVALNSPRLRRVFVVGVGMTKFMKPGGENSRDYPDLAKEAGQKALADAQIPYSAVEQACVGYVYGESTCGQRAIYHSLGLTGIPIINVNNNCSTGSTALFMAQQLVQGGLANCVLALGFEKMEKGSLGTKYSDRSNPLEKHIDVLINKYGMSACPFAPQLFGSAGKEHMETYGTKVEHFAKIGWKNHKHSVNNPYSQFQDEYSLDEIMKSRPVFDFLTVLQCCPTSDGAAAAIVSSEEFVQKHGLQSKAVEIVAQEMVTDMPSTFEEKSVIKMVGYDMSKEAARKCYEKSGLGPSDVDVIELHDCFSTNELLTYEALGLCPEGQGGALVDRGDNTYGGKWVINPSGGLISKGHPLGATGLAQCAELCWQLRGEAGKRQVPGAKVALQHNLGLGGAAVVTLYRMGFPEAASSFRTHQISAAPTSSAGDGFKANLIFKEIEKKLEEEGEEFVKKIGGIFAFKVKDGPGGKEATWVVDVKNGKGSVLPDSDKKADCTITMADSDLLALMTGKMNPQSAFFQGKLKIAGNMGLAMKLQSLQLQPDKAKL

SEQ ID NO: 1549 - DNA, 2572 bp, Homo sapiens
  ref <308>: DATABASE ACCESSION NUMBER: Refseq / NM_002979
  ref <309>: DATABASE ENTRY DATE: 2002-11-05
cggtcccgcactggtgcagccatgtcctcttccccgtgggagcctgcgaccctgcgccgggtgttcgtggtgggggttggcatgaccaagtttgtgaagcctggagctgagaattcaagagactaccctgacttggcagaagaagcaggcaagaaggctttagctgatgcacagatcccttattcagcagtggaccaggcatgtgttggctatgtttttggtgactctacctgtgggcagagggctatctatcacagtttgggaatgactggaattcctataatcaatgtcaacaataactgtgctactggttctactgctttgtttatggcccgccagctgattcagggtggtgtggcagaatgtgtcttggctcttgggtttgagaagatgagtaagggaagccttggaataaaattttcagatagaaccattcccactgataagcatgttgacctcctgatcaataagtatggattgtctgctcacccagttgctcctcagatgtttgggtatgctggaaaagaacatatggaaaaatatggaacaaaaattgaacactttgcaaaaattggatggaaaaatcataaacattcagttaataacccgtattcccagttccaagatgaatacagtttagatgaagtgatggcatctaaagaagtttttgattttttgactatcttacaatgttgtcccacttcagatggtgctgcagcagcaattttggccagtgaagcatttgtacagaagtatggcctgcaatccaaagctgtggaaattttggcacaagaaatgatgactgatttgccaagctcgtttgaagaaaaaagcattattaaaatggttggctttgatatgagtaaagaagctgcaagaaaatgctatgagaaatctggcctgacaccaaatgatattgacgtaatagaacttcacgattgcttttctaccaacgaactcctgacttatgaagcactcggactctgtccagaaggacaaggtgcaacgctggttgatagaggagataatacatatggaggaaagtgggtcataaatcctagtggtggactgatttcaaagggacacccactaggcgctacaggtcttgctcagtgtgcagaactctgctggcagctgagaggggaagccggaaagaggcaagttcctggtgcaaaggtggctctgcagcataatttaggcattggaggagctgtggttgtaacactctacaagatgggttttccggaagccgccagttcttttagaactcatcaaattgaagctgttccaaccagctctgcaagtgatggatttaaggcaaatcttgtttttaaggagattgagaagaaacttgaagaggaaggggaacagtttgtgaagaaaatcggtggtatttttgccttcaaggtgaaagatggccctgggggtaaagaggccacctgggtggtggatgtgaagaatggcaaaggatcagtgcttcctaactcagataagaaggctgactgcacaatcacaatggctgactcagacttcctggctttaatgactggtaaaatgaatcctcagtcggccttctttcaaggcaaattgaaaatcactggcaacatgggtctcgctatgaagttacaaaatcttcagcttcagccaggcaacgctaagctctgaagaactccctttggctacttttgaaaatcaagatgagatatatagatatatatccatacattttattgtcagaatttagactgaaactacacattggcaaatagcgtggataggatttgtttcttaatgggtgtgaccaatcctgtttttcctatgctctgggtgaatagagcctgatggtatactactgctttgcggaattgcatacaactgtgcattacaaagttaatatggtaattatggtctggggtaaaattgagtttcagaataaaattaggaacagtaaaatccaaagaactatgtaaacaaaaaagcttttgttttgcttacaaagtatatttaaggattattctgctgaagattcagtttaagagttttccttgggagaactaagtaagaaacacaatgccaacagctggccagtaattagtgttgtgcacttcatgtcattaatcaatttctcaatagttcttaaaattagtgagattaaaaatctaaaaattttgcatttcatgctatcagaaacagtattttcttcccaaatcaaaataaaagaaatatgatcagagcttgaacacaggcttatttttaaaataaaaatatttttaacatgggtttccttattgaaaaatcagtgtattagtcataaaacaccatcattaagaataattgaacaataaagtttgctttcagatgcagttttcaaattataatctcatttcaatttataacgttctcagtcctttgttataattttcctttttcatgtaagtttaattatctgcatttatcttttttcctagtttttctaatactaatgttatttcttaaaattcagtgagatataggataaaataatgctttgagaagaatgtttaatagaaaattaaaataactttttctggca

SEQ ID NO: 1550 - protein, 547 aa, Homo sapiens
  ref <308>: DATABASE ACCESSION NUMBER: Refseq / NP_002970
  ref <309>: DATABASE ENTRY DATE: 2002-11-05
MSSSPWEPATLRRVFVVGVGMTKFVKPGAENSRDYPDLAEEAGKKALADAQIPYSAVDQACVGYVFGDSTCGQRAIYHSLGMTGIPIINVNNNCATGSTALFMARQLIQGGVAECVLALGFEKMSKGSLGIKFSDRTIPTDKHVDLLINKYGLSAHPVAPQMFGYAGKEHMEKYGTKIEHFAKIGWKNHKHSVNNPYSQFQDEYSLDEVMASKEVFDFLTILQCCPTSDGAAAAILASEAFVQKYGLQSKAVEILAQEMMTDLPSSFEEKSIIKMVGFDMSKEAARKCYEKSGLTPNDIDVIELHDCFSTNELLTYEALGLCPEGQGATLVDRGDNTYGGKWVINPSGGLISKGHPLGATGLAQCAELCWQLRGEAGKRQVPGAKVALQHNLGIGGAVVVTLYKMGFPEAASSFRTHQIEAVPTSSASDGFKANLVFKEIEKKLEEEGEQFVKKIGGIFAFKVKDGPGGKEATWVVDVKNGKGSVLPNSDKKADCTITMADSDFLALMTGKMNPQSAFFQGKLKITGNMGLAMKLQNLQLQPGNAKL

SEQ ID NO: 1551 - DNA, 7286 bp, Rattus norvegicus
  ref <308>: DATABASE ACCESSION NUMBER: EMBL / M64780
  ref <309>: DATABASE ENTRY DATE: 2000-03-04
tgcttatctcctaccatgaacctggagggctggggagaggacctggtgctcccctagccataactggctaaactttgagatcacagctgcatctgctgctccagagcacccagcatggggggagtagctccgaagaggcctaagggcactccataagaactcccacacacacccaggaattgggctcgagctgtatgtatcatgcctcctctgccactggaacacagacccaggcaggagcctggtgcctccatgctggttcgatacttcatgatcccctgcaacatctgcttgatcctgttggccacttccacattgggctttgcggttctgcttttcctcagcaactacaaacctggaatccacttcacaccagcgcctcctacgcctcctgatgtatgcaggggaatgttatgtggctttggtgctgtgtgtgaacctagtgttgaggatccaggccgtgcctcctgtgtgtgcaagaagaatgcttgccctgctacggtggctcctgtgtgtggctcagatgcctccacctatagcaacgagtgtgagctgcagcgcgcgcagtgcaaccagcaacggcgcatccgcctgcttcgccaagggccatgtgggtcccgggacccctgtgccaacgtgacctgcagtttcggtagtacctgtgtaccttcggctgacggacagactgcctcatgtctgtgtcctacaacctgcttcggggcccctgatggcacagtgtgtggcagtgacggtgttgactaccctagtgaatgccagctgcttagtcatgcctgtgccagccaggagcacatcttcaagaagttcaatggtccttgtgatccctgccagggcagcatgtcagacctgaaccacatttgccgtgtgaacccacgtacacggcacccagaaatgcttctgcggcctgagaactgccctgcccagcacacgcctatctgtggagatgatggggtcacctatgaaaacgactgtgtcatgagccgtataggtgcaacccgtggcctgcttctccagaaagtacgctctggtcaatgccaaactcgagaccagtgcccggagacctgccagtttaactccgtatgcctgtcccgccgtggccgtccccactgttcctgcgatcgtgtcacctgtgatgggtcttacaggcctgtgtgtgcccaagatgggcacacatacaacaatgactgttggcgccaacaggctgagtgtcgacaacagcgggccattcctcccaagcaccagggcccgtgtgaccagaccccgtccccatgccatggagtgcaatgtgcatttggggcagtatgcacagtgaagaacgggaaagccgagtgcgagtgccagcgggtgtgctccggcatctacgatcctgtgtgcggcagtgacggtgtcacttacggcagtgtgtgcgagctggaatccatggcctgtacccttgggcgggaaatccaagtggcccgcagaggaccctgtgacccatgtgggcagtgccgttttggatccctgtgcgaggtggaaactggacgctgtgtgtgcccctctgagtgtgtggagtcagcccagcccgtatgcggttctgatggacacacatacgctagtgaatgtgagctgcatgtccacgcctgtacgcaccagatcagcctatacgtggcctcagctggacactgccagacctgtggagaaaaagtttgtacttttggggctgtgtgctcagctggacagtgtgtatgtccccgttgtgagcaccctccacctggccctgtgtgtggcagtgatggtgtcacctacctcagtgcctgtgagctacgcgaagctgcctgtcagcagcaggtacaaattgaggaggcccatgcagggccatgtgagccggctgagtgtggctcagggggctctggttctggggaggacgacgagtgtgaacaggagctatgccggcagcgtggtggtatctgggacgaggactcagaagatgggccatgtgtctgtgactttagctgccagagtgtccctagaagcccagtgtgtggctcggatggagtcacctatggcaccgagtgtgatctgaagaaggccaggtgcgaatcacagcaagaactgtacgttgctgctcagggagcctgccgtggccctaccttggctccactgctacctgtggccttcccacactgtgcccaaaccccctatggctgctgccaggacaatttcactgctgcccagggtgtgggcttggctggctgtcccagcacctgccattgcaacccccatggctcctacagtggcacttgtgacccagccacagggcagtgctcctgccgaccaggtgtaggaggcctcaggtgtgatcgctgtgaacctggcttctggaacttccgtggcatcgtcaccgatggacatagtggttgcactccctgcagctgcgaccctcggggtgccgtaagggatgactgtgaacagatgactggattgtgttcctgtaggcctggtgtggctggtcccaagtgtggacagtgtccagatggtcaagtcctgggccatctaggctgtgaagcagatcccatgacacctgtgacttgtgtggagatacactgcgagttcggggcctcctgcgtagagaaggctggttttgcccaatgtatctgcccaaccctcacatgtccagaggctaactctaccaaggtctgcggatcagacggtgtgacatatggcaatgaatgccagctgaaggccattgcctgccgccagcgtctggacatctccactcagagtcttggtccctgccaggagagtgttactcctggggcttccccaacatctgcatctatgactaccccaaggcatatcctgagcaagacgctgccatttccccacaacagccttcctctgtctcccggcagtactacccatgattggcccaccccattacccatatcacctcacaccacagtcagcatccccagaagcaccgcgtggcctgtgctgaccgtgccccctacagcagcagcctctgacgtaaccagtctcgcaacatcaatcttcagtgaatccggcagcgccaatgggagtggcgacgaggaactgagtggagatgaggaggccagtgggggcgggtctgggggacttgagcccccggtgggcagcattgtggtgacccatgggccacccatcgagagggcttcctgctacaactcacctttgggctgctgctcagatggcaagacaccctcactggactccgaaggctccaactgtcctgctaccaaggcattccagggcgtgctggagcttgagggggtcgagggacaggaactgttctacacacctgagatggctgaccccaagtcagagttgtttggggagaccgcaaggagcattgaaagcacgctggacgacctgttccggaattcagacgtcaagaaggacttctggagtgtccgcctacgggaactggggcctggcaagttggtccgcgccattgtggacgttcactttgaccctaccacagccttccaggcatcagatgtgggtcaggccttgctccgacagatccaggtatctaggccatgggccctggcagtgaggaggcctctgcaggaacatgtgcgattcttagactttgactggtttcccactttctttacgggagctgcaacaggaactacagctgctatggccacagccagagccaccactgtgagccgactgccggcctcttccgtcaccccacgagtctaccccagtcacaccagccggcctgttggcagaactacagcaccaccaaccactcgccggccaccaaccactgccaccaacatggaccggcctcggaccccaggccatcaacagccctcaaagtcctgtgattcccaaccttgcctccatggaggtacctgccaggaccaggattctggcaagggtttcacctgcagctgtactgcaggcaggggtggctctgtctgtgagaaagtacaacccccctccatgccagcttttaagggccactccttcttggccttccccaccctccgagcctaccacacactgcgcctagcactggaattccgggctttggagacagagggactgctactctacaatggcaatgcacgtggcaaagatttcctggctctggctctgttggatgggcgtgtgcagttcaggtttgacacaggctcagggccagcagtgctaacgagcttagtgccagtggaaccaggacggtggcaccgcctcgagttgtcacggcattggcgtcagggcacactttctgtggatggcgagactcctgttgtaggtgaaagtcccagtggcaccgatggcctcaacttggacacgaacctctatgtgggtggtatcccagaagaacaagttgccatggtgcttgatcggacctctgtgggcgttggcctgaaaggatgcattcgtatgctggatatcaacaatcagcagctggagcttagcgactggcagagggctgcggttcaaagctctggtgtgggagaatgtggagaccatccgtgcttacctaacccctgccatggtggggccctatgccaggcactggaggctggcatgttcctctgtcagtgcccgcctggccgctttggcccaacttgtgcagatgaaaagagcccctgccagccgaacccctgccatggggcagccccctgtcgtgtgctttccagcggtggggccaagtgcgagtgccccctgggacgcagtggtaccttctgtcagacagtcctggagactgctggctcccggcccttcctggctgactttaatggcttctcctacctggaactgaaaggcttgcacaccttcgagagagacctaggggagaagatggcgctggagatggtgttcttggctcgtgggcccagtggcttactcctctacaatgggcagaagacagatggcaagggggactttgtatccctggccctgcataaccggcacctagagttctgctatgaccttggcaagggggctgcagtcatcaggagcaaagagcccatagccctgggaacctgggtcagggtattcctggaacgaaatggccgcaagggtgcccttcaagtgggtgatggtccccgtgtgctaggggaatctccgaaatcccgcaaggttccgcacaccatgctcaacctcaaggagcctctctatattgggggagctcctgacttcagcaagctggccaggggggctgcagtgtcctctggcttcagtggtgtcatccagctggtgtctctaagaggccatcaactgctgactcaggagcatgtgttgcgggcagtagatgtctcaccttttgcagaccacccttgtacccaggccttgggcaacccctgccttaatgggggctcgtgtgtcccgagggaagccacttatgaatgcctgtgtcctgggggcttctctgggctgcactgcgaaaaggggctagttgagaagtcagtgggggacctagaaacactggcctttgatgggcggacctacatcgaatacctcaatgctgtgattgagagtgagaaggcactgcagagcaaccactttgaactgagcttacgcactgaggccactcaggggctggtgctgtggattggcaaggctgcagaacgtgcagattacatggccctggccatcgtggacgggcacctgcaactgagctatgacctaggttcccagccagttgtgctgcgctccactgtgaaggtcaacaccaaccgctggcttcgaatcagggctcacagggagcacagggaaggttcccttcaggtgggcaatgaagcccctgtgactggatcttccccattgggtgccacgcaactggacacagatggagccctgtggcttggaggcctgcagaagcttcctgtggggcaggctctacccaaggcctatggcacaggttttgtgggctgtctgcgggacgtggtagtgggccatcgccagttgcatctgctggaggacgctgtcaccaaaccagagctaagaccctgccccactccctgagctgccaccagagctgccaccttccctactgtaattattttctatttttgtaaacttgttgcatttttatatgatttttttgactgcacgttggccagaaggactgctggcctggcctcctttccgtccggcagctgtgctacagagacaaagtggtgctaagggaactcttaagtagaccgtagcacctagagccctgggctttgaaaggcagccttaggacacactcctctgcctaaggtaccgtgcctcagccccttgcactgtatgttcctacctgtccacttgtattggtcctttgggtctcctggcccattgctaggccctgtttgtgtgttattaatgtgttattggatgagaactgtatccctgagcaggagggtgctgttggggttgagggggcccttcattaaaccaagtaacattgggtcctttgtaggttcccacttaagctgctctcctgtgtgtgctaagggccagcctcaccccaagctagcctggacccctagtgctccctgtgacaatactgtgatataaaaaacctgataattggggcatcatcttacttcccaaaatgtgtttgcctgtccctggaggctgtaaacagaagccaggctccatctaggttgtcctggctggtcctcagttggccttccccacctactcagttaccctgaacatggtcatcctttccccaaaacatcaggccacttaggaatccctaagagggagtgcgtcactacgggatgtggttgacctccattgcttacctgcctaagcagccagctacatctgtctctcaaagatgtccagccagactcctaactatattcttcaaccattgattttgtttgatttctgatgtggaagtgcggtcattcctgttctaacgcacagcaaactttaattggtctaacgtgagggcaacccacagttggtccactgtaacgatggtcatccttgtttgagtgacagttactgccgggtgtccagccaagggcaggtactagaatggcagagatgactatagagccaaaaatgactgaaactgaagcaactgtctgctcctccatcccctatctttaatgtccagcacagtcatctcgggagaaaaaccagacaaatctgggatgggggcagtctgaccttcttcctgcttcggtgatcaaggctagagggaactgcatggtatcttgttactaactccagtatgtgtcaatgtcaaataccatgaaataaagtctgaaaaccttaaaaaaaaa

SEQ ID NO: 1552 - protein, 1941 aa, Rattus norvegicus
  misc_feature (1)..(1941): Xaa=Unknown amino acid
MPPLPLEHRPRQEPGASMLVRYFMIPCNICLILLATSTLGFAVLLFLSNYKPGIHFTPAPPTPPDVCRGMLCGFGAVCEPSVEDPGRASCVCKKNACPATVAPVCGSDASTYSNECELQRAQCNQQRRIRLLRQGPCGSRDPCANVTCSFGSTCVPSADGQTASCLCPTTCFGAPDGTVCGSDGVDYPSECQLLSHACASQEHIFKKFNGPCDPCQGSMSDLNHICRVNPRTRHPEMLLRPENCPAQHTPICGDDGVTYENDCVMSRIGATRGLLLQKVRSGQCQTRDQCPETCQFNSVCLSRRGRPHCSCDRVTCDGSYRPVCAQDGHTYNNDCWRQQAECRQQRAIPPKHQGPCDQTPSPCHGVQCAFGAVCTVKNGKAECECQRVCSGIYDPVCGSDGVTYGSVCELESMACTLGREIQVARRGPCDPCGQCRFGSLCEVETGRCVCPSECVESAQPVCGSDGHTYASECELHVHACTHQISLYVASAGHCQTCGEKVCTFGAVCSAGQCVCPRCEHPPPGPVCGSDGVTYLSACELREAACQQQVQIEEAHAGPCEPAECGSGGSGSGEDDECEQELCRQRGGIWDEDSEDGPCVCDFSCQSVPRSPVCGSDGVTYGTECDLKKARCESQQELYVAAQGACRGPTLAPLLPVAFPHCAQTPYGCCQDNFTAAQGVGLAGCPSTCHCNPHGSYSGTCDPATGQCSCRPGVGGLRCDRCEPGFWNFRGIVTDGHSGCTPCSCDPRGAVRDDCEQMTGLCSCRPGVAGPKCGQCPDGQVLGHLGCEADPMTPVTCVEIHCEFGASCVEKAGFAQCICPTLTCPEANSTKVCGSDGVTYGNECQLKAIACRQRLDISTQSLGPCQESVTPGASPTSASMTTPRHILSKTLPFPHNSLPLSPGSTTHDWPTPLPISPHTTVSIPRSTAWPVLTVPPTAAASDVTSLATSIFSESGSANGSGDEELSGDEEASGGGSGGLEPPVGSIVVTHGPPIERASCYNSPLGCCSDGKTPSLDSEGSNCPATKAFQGVLELEGVEGQELFYTPEMADPKSELFGETARSIESTLDDLFRNSDVKKDFWSVRLRELGPGKLVRAIVDVHFDPTTAFQASDVGQALLRQIQVSRPWALAVRRPLQEHVRFLDFDWFPTFFTGAATGTTAAMATARATTVSRLPASSVTPRVYPSHTSRPVGRTTAPPTTRRPPTTATNMDRPRTPGHQQPSKSCDSQPCLHGGTCQDQDSGKGFTCSCTAGRGGSVCEKVQPPSMPAFKGHSFLAFPTLRAYHTLRLALEFRALETEGLLLYNGNARGKDFLALALLDGRVQFRFDTGSGPAVLTSLVPVEPGRWHRLELSRHWRQGTLSVDGETPVVGESPSGTDGLNLDTNLYVGGIPEEQVAMVLDRTSVGVGLKGCIRMLDINNQQLELSDWQRAAVQSSGVGECGDHPCLPNPCHGGALCQALEAGMFLCQCPPGRFGPTCADEKSPCQPNPCHGAAPCRVLSSGGAKCECPLGRSGTFCQTVLETAGSRPFLADFNGFSYLELKGLHTFERDLGEKMALEMVFLARGPSGLLLYNGQKTDGKGDFVSLALHNRHLEFCYDLGKGAAVIRSKEPIALGTWVRVFLERNGRKGALQVGDGPRVLGESPKSRKVPHTMLNLKEPLYIGGAPDFSKLARGAAVSSGFSGVIQLVSLRGHQLLTQEHVLRAVDVSPFADHPCTQALGNPCLNGGSCVPREATYECLCPGGFSGLHCEKGLVEKSVGDLETLAFDGRTYIEYLNAVIESEKALQSNHFELSLRTEATQGLVLWIGKAAERADYMALAIVDGHLQLSYDLGSQPVVLRSTVKVNTNRWLRIRAHREHREGSLQVGNEAPVTGSSPLGATQLDTDGALWLGGLQKLPVGQALPKAYGTGFVGCLRDVVVGHRQLHLLEDAVTKPELRPCPTPX

SEQ ID NO: 1553 - DNA, 7286 bp, Rattus norvegicus; identical to SEQ ID NO: 1551
  ref <308>: DATABASE ACCESSION NUMBER: EMBL / M64780
  ref <309>: DATABASE ENTRY DATE: 2000-03-04

SEQ ID NO: 1554 - protein, 1941 aa, Rattus norvegicus; identical to SEQ ID NO: 1552
  misc_feature (1)..(1941): Xaa=Unknown amino acid

SEQ ID NO: 1555 - DNA, 5413 bp, Rattus norvegicus
  ref <308>: DATABASE ACCESSION NUMBER: Refseq / NM_080583
  ref <309>: DATABASE ENTRY DATE: 2003-01-13
aaattggttttgcgcagtgtcttagatctagagagaatcgagacgggcaggaaaccattacaccaccttcccggctgtgctctctgactccgccgccaccccgcccttgcctccggttcacgctgaagatccgagaatcatgactgactccaagtacttcacaaccaataagaagggagaaatctttgaattaaaagctgaactcaacaatgaaaagaaagaaaagaggaaggaggctgtgaagaaagtgattgctgctatgaccgtggggaaggatgtgagctctctcttcccagatgtggtgaactgtatgcagactgacaacctggaactaaagaagcttgtgtacctctatctgatgaactatgccaagagtcagccagacatggccatcatggctgtcaacagctttgtgaaggattgtgaagaccccaatcctttgattcgagccttggcagttagaaccatgggatgcatccgggtggacaagattacagagtatctctgtgaacccctccgcaagtgcttgaaggatgaagacccctatgttcggaaaacagcagcagtatgcgtggcaaaactccatgatatcaatgcccagatggtggaagatcagggatttctggattctctgcgggatctcatagcagattcaaacccaatggtggtggctaatgctgtagcagcattgtctgagatcagtgagtctcacccaaacagcaacttacttgatctgaaccctcagaatatcaataagctgctcacagccctgaatgagtgcactgagtggggccagattttcatcttggactgcctgtctaattacaaccctaaagatgaccgggaagctcagagcatctgtgagcgagtgacgcctcggctctctcatgccaattctgcagtggtgctttcagcagtaaaagttctgatgaagtttctagagttgttacccaaggactctgactactacaatatgctgctaaagaagctagcgcctccacttgtcactttgctctctggggagccagaagtgcagtatgttgccctgaggaacatcaacctaattgtccagaaaaggcctgaaatcttgaagcaggaaatcaaggtcttctttgtgaagtacaatgatcctatctatgttaaactagagaagttagacatcatgattcgtcttgcatcccaagccaacattgctcaggttctggcagaactgaaggaatatgccactgaagttgatgtggactttgttcgcaaagctgtgagggccattggacggtgtgccatcaaagtggagcaatcagcagaacgctgtgtgagcacactgcttgatctaatccagaccaaagtaaattatgtggtccaagaggcaattgttgtcatcagggacatcttccgaaaataccccaacaagtatgagagcattatcgccacgctgtgtgagaacttggactccctggatgaacccgatgcccgagcggctatgatttggattgtaggagagtatgctgaaagaatcgataatgccgatgagttactagagagcttcctggaaggttttcatgatgaaagcacccaggtgcagctcacgttgcttaccgccatagtgaaactgtttctcaagaagccatcagaaacacaggagctggtccaacaggtcttgagcttggccacacaggattctgataatcctgaccttcgagatcggggttatatttattggcgccttctttcaactgaccctgtgacagccaaagaagtagtgttgtctgagaagccattgatctctgaggaaacagacctcattgaacctaccctcctggatgagctcatctgccacattggttctttggcctccgtgtaccataaacctccgaatgcttttgtggaagggagccatggcattcatcgcaaacacttgccaattcaccatgggagcactgatgcaggtgatagccctgttggcaccaccactgcaaccaacctggaacagcctcaggtcatcccctctcaaggtgaccttctgggggatcttttaaatcttgacctgggtcccccagtgaatgtcccgcaagtgtcctccatgcagatgggagcagtggatcttttaggaggaggactggatagcctgcttggcagtgaccttggcgggggcattggaggaagtccggcagtaggacagtccttcatcccgtcatcagtgcctgcaaccttcgctccttcacctactcctgctgtggtcagcagtggtctgaatgacctgtttgagctttccactgggataggcatggcacctggcggatatgtggctcctaaggcagtctggctacctgctgtaaaggctaaaggcttggagatttcggggacgtttactcaccgccaagggcacatctatatggaaatgaacttcaccaacaaagctctgcagcacatgacggattttgccatccagtttaacaagaatagcttcggtgtcatcccgagcactcccttggccatacatactccgctgatgccaaaccagagcattgatgtgtctctgcctctcaacaccttgggcccagtcatgaagatggagcctctgaataacttgcaggtggctgttaaaaacaatattgatgtcttctacttcagctgcctcatcccactcaatgtgctttttgtagaagatggcaaaatggaacgccaggtcttccttgcgacgtggaaggatattcccaatgaaaatgagctccaatttcagattaaggagtgtcatttaaacgctgacacagtttccagcaagttgcaaaacaacaatgtttacactatcgccaagaggaatgtggaggggcaggacatgctgtaccagtccctgaagctcactaatggcatttggattttggcagagctgcggatccagccaggaaaccccaattatacgctgtcgctgaagtgtagagcccctgaagtctctcagtacatctatcaggtctacgacagcattttgaaaaactaataaatgggtccagtcagcctgtaatcagtgcaagccacgaactcttaactgaaagacattgtattgttgtgtagagcctgaacccaaaccctgcggtacccaccccggtagtggccagtcattttgtgctgatattagcactcaccccattggtaggttagcttcccgtgacatctccttccactatcgcccccctctgccacctgccgctgctctctgtccttagttgtgagttcctctgtgctgtgccaatggctagccttttctacaccctcttttgagtgtagtttgatattttgtaatcgaaagctcatttcacaagcagaaaaaggcaacaagttaattagagcgaggaagagtgtcactgaaacatacactgcaccttattgttttatatttttgtacagatgagatagatattgaggtagaacgctgagtagaaagggtgactgaccctcctcagacacagtcttattggagacatatggccctggccccttctggggcaaggagaggcgaccccactcctggtcttttgcattttcaccttggccacgccttccagctctcttatgcccatgctctctcatttggcgaccacattgatgtttctgagtgcagggacactggacatgtgagcacagtgctgagagatggcagagctgtgctcgtgtctacagcgctagcccaggagtcaccctgaggaggctgggtagacatgagtaagaacacagcgccctcccctagcctccttccctgtttttcagggctagttcagatttaaagtcagtgtttgagagttaagacagactttagtgacttccccaaccctgtttttctacaaagaaaggtgataggggagaagggtgctgccaaggtggcctcttggctcttgagtagcagagctgagactggtcccgacctccatcagcttccctatgtggccgccctcattattctttccttaaagcctctgccggtcctgtgcctcctgtggctctttgacactccatactgagtttggagctccaccgattccctggcgtccggtggcagctggcgtctcagttacatgagtttgcatccaggtaacaagagtgaaagcggagctgacattcgccaggactgtcctggagccacagttcggaggctggccagtgagcagtgagtatagaagtgtgtagaggtgttgccaattctcactgtccctcacctcactgatctgccctccattggtactcaagctccaaagcacaggaagatcattccagaaggctgtgtagttcttgtcatctcacagaggactggggatgggaagtgcctctcgctaaggaattggtatgaggcatcgaagaaagcctcatactgtcaccctgcttgagatgtggcacttgttgcacagcctggcacctggtattcagggtccattcagagtcctatgctcaaggcagaagcatgccagggtccaaagacctcatgtaggactcagacctgacccactggatcccgaggagaaactggaaaaatcagggtagaaaccagcttcttttaaaagtgtgtctggagtgatcctatttcctcccaaagtctttaagaggattgctggctggcaaaaaagaaataacatccctctctcactctctcactctctcactcactcactcactcactcactcactcactcaccatgtggggagtaagaaatactgcagggttgtgtgggaggcaggtggtatattgggtggaaagcaagttgaccaagttcccttgtcggtgccgattcctggagtcagttggatgtgagtggtgtaagggattcccactacagacagtgttctcatctcaaagcaaattcccaaaagtacatgtgtcagggcaagcagaaaattttataccagaacatgtccaccccagaaactaaggcctctatcagcccctctaccagtgacagataccagctgtggttctctgctggcctgagcccatccatggtgtctagctccctcttgtttttaccccaagggagttaggaggaggcaaggagctctcctgaagagactctgttgccttcctgaagcttccccttcaggtcagtttcgagcttgactagattgggagaactggggtcagtttatccgtatctgctctccttggctgaagtgtgtcgctgttgaaagctgaagtacggagggcagggaagcaaacccaccagagctctatctggtcagattccccacgtgtttgttcccagcctggtccctattgtgaagcttgggactgggaccaggtcggagagtaaaagctgtcccaggaatgcgtagtttcctgttctgtcggggtctgttgttggggaggtggggattggggagcctttaccttgtgtattcaccaataaactcatttacacaaaaaaaaaaa

SEQ ID NO: 1556 - protein, 951 aa, Rattus norvegicus
  ref <308>: DATABASE ACCESSION NUMBER: Refseq / NP_542150
  ref <309>: DATABASE ENTRY DATE: 2003-01-13
MTDSKYFTTNKKGEIFELKAELNNEKKEKRKEAVKKVIAAMTVGKDVSSLFPDVVNCMQTDNLELKKLVYLYLMNYAKSQPDMAIMAVNSFVKDCEDPNPLIRALAVRTMGCIRVDKITEYLCEPLRKCLKDEDPYVRKTAAVCVAKLHDINAQMVEDQGFLDSLRDLIADSNPMVVANAVAALSEISESHPNSNLLDLNPQNINKLLTALNECTEWGQIFILDCLSNYNPKDDREAQSICERVTPRLSHANSAVVLSAVKVLMKFLELLPKDSDYYNMLLKKLAPPLVTLLSGEPEVQYVALRNINLIVQKRPEILKQEIKVFFVKYNDPIYVKLEKLDIMIRLASQANIAQVLAELKEYATEVDVDFVRKAVRAIGRCAIKVEQSAERCVSTLLDLIQTKVNYVVQEAIVVIRDIFRKYPNKYESIIATLCENLDSLDEPDARAAMIWIVGEYAERIDNADELLESFLEGFHDESTQVQLTLLTAIVKLFLKKPSETQELVQQVLSLATQDSDNPDLRDRGYIYWRLLSTDPVTAKEVVLSEKPLISEETDLIEPTLLDELICHIGSLASVYHKPPNAFVEGSHGIHRKHLPIHHGSTDAGDSPVGTTTATNLEQPQVIPSQGDLLGDLLNLDLGPPVNVPQVSSMQMGAVDLLGGGLDSLLGSDLGGGIGGSPAVGQSFIPSSVPATFAPSPTPAVVSSGLNDLFELSTGIGMAPGGYVAPKAVWLPAVKAKGLEISGTFTHRQGHIYMEMNFTNKALQHMTDFAIQFNKNSFGVIPSTPLAIHTPLMPNQSIDVSLPLNTLGPVMKMEPLNNLQVAVKNNIDVFYFSCLIPLNVLFVEDGKMERQVFLATWKDIPNENELQFQIKECHLNADTVSSKLQNNNVYTIAKRNVEGQDMLYQSLKLTNGIWILAELRIQPGNPNYTLSLKCRAPEVSQYIYQVYDSILKN

SEQ ID NO: 1557 - DNA, 1680 bp, Rattus norvegicus
  ref <308>: DATABASE ACCESSION NUMBER: Refseq / NM_012847
  ref <309>: DATABASE ENTRY DATE: 2003-01-14
gcgggccgcggagggggcggggctccaccaccacctcagctgcggacggaggcgagatggcggccactgagggggtcggggaatctgcgccaggcggtgagccgggacagccagagcagccgccgcccccgcctcctccgccgccagcacagcagccgcaggaagaagagatggcggccgaggccggggaagcagcggcgtcccctatggacgacgggtttctgagcctggactcgcccacctatgtcttgtacagggacagggcagagtgggctgacatagacccagtgccccagaatgatggccccagtccagtggtccagatcatctacagtgaaaagtttagagacgtctatgattacttccgagctgttctgcagcgcgatgaaagaagcgaacgagcctttaagctcactcgagatgctattgagttaaacgcagccaactatacggtgtggcattttcggagagttctcttgaggtcgcttcagaaggatctgcaagaagaaatgaactacatcatcgcaataattgaggaacagcccaaaaactatcaagtttggcaccataggagagtattagtggagtggctgaaagatccttctcaagagctcgagttcatcgccgatatccttaatcaggatgcaaagaattaccatgcctggcagcatcgacagtgggtcattcaggagtttcgactttgggataatgagctgcagtatgtggaccagcttctcaaagaggatgtgagaaataactctgtgtggaaccaaagacacttcgtcatttctaataccactggctacagtgatcgcgctgtgttggagagagaagtccaatatactctggaaatgatcaaattagtgccacacaatgagagtgcgtggaactacttgaaagggattttgcaggaccgtggtctttccagataccctaatctattaaaccagttgcttgatttacaaccaagtcacagctccccctacctaattgcctttcttgtggatatctatgaagacatgctggaaaaccagtgtgacaacaaggaggacattcttaataaagcactagagttatgtgagattctagctaaagaaaaggacactataagaaaggaatattggagatatattggacggtccctccagagtaaacacagcagagaaagtgacataccggcgagtgtatagcagcaagagcggctggaagaagtggacaatgctttctaaggcctcttattcgggagtgtagagcggttagagcggtcatctcatgcctgtgagctaacgttgtccaggtgctgtttctaacaagaactaaggatgactcctgtgtctgacgctgttcagactagctaagagtcgatttcctaaagcaaggtcattggaggggagggtgaagaaaactttcccgtaaaggaactactgcttttgtagtcttcccaacatttaatccaatcctgtagaatcagcatctcctgaaagacatggtgcacggctgtgtgctgggcgtggctaagggcagctgtgtcatgggtttgcagtcatgggaacctcggagcgctgcccgggactgcattgatgattagggctgctggcctcacccacaggatcttgctatcactgtaaccaactaatgccaaaagaaaggttttataataaaatcacattatctacaaac

SEQ ID NO: 1558 - protein, 377 aa, Rattus norvegicus
  ref <308>: DATABASE ACCESSION NUMBER: Refseq / NP_036979
  ref <309>: DATABASE ENTRY DATE: 2003-01-14
MAATEGVGESAPGGEPGQPEQPPPPPPPPPAQQPQEEEMAAEAGEAAASPMDDGFLSLDSPTYVLYRDRAEWADIDPVPQNDGPSPVVQIIYSEKFRDVYDYFRAVLQRDERSERAFKLTRDAIELNAANYTVWHFRRVLLRSLQKDLQEEMNYIIAIIEEQPKNYQVWHHRRVLVEWLKDPSQELEFIADILNQDAKNYHAWQHRQWVIQEFRLWDNELQYVDQLLKEDVRNNSVWNQRHFVISNTTGYSDRAVLEREVQYTLEMIKLVPHNESAWNYLKGILQDRGLSRYPNLLNQLLDLQPSHSSPYLIAFLVDIYEDMLENQCDNKEDILNKALELCEILAKEKDTIRKEYWRYIGRSLQSKHSRESDIPASV

SEQ ID NO: 1559 - DNA, 3224 bp, Rattus norvegicus
  ref <308>: DATABASE ACCESSION NUMBER: Refseq / NM_147205
  ref <309>: DATABASE ENTRY DATE: 2003-01-14
ctcaaggggcctctgggttctatttccaaagttctcggtgtgttccgtaatacttacgttacatctctcgggtgtggagctaggaatctccagtaagagagaacatgcgatatttgttgttctggtatggattgcctcactcgtattctcagtgtgtctgtcattggaccccagccagtggcatctttgaaaatgagccattattatctttattgcttctggtcctgggcaagttagtcaccacagaaaagcgcttcctcaaggacagtttgtacaccgaaggaatcctaattgtatgggacccatccgtgtatcatgcagatatcccaaagtggtatcagaaaccagactacaatttcttcgaaacctataagagttaccgaaggctgaaccccagccagccattttatatcctcaagccccagatgccatgggaactgtgggacatcattcaggaaatctctgcagatctgattcagccaaatcccccatcctccggcatgctgggtatcatcatcatgatgacgctgtgtgaccaggtagatatttacgagttcctcccatccaagcgcaagacggacgtgtgctattatcaccaaaagttctttgacagcgcttgcacgatgggtgcctaccacccgctcctcttcgagaagaatatggtgaagcatctcaatgagggaacagatgaagacatttatttgtttgggaaagccaccctttctggcttccggaacattcgttgttgagtacctagccaggcacccttatccttctccatacgtcattttatggctactctcctggttaccgctgcttgaaggagtgtttttattcaacaggcccagcctgcttcctgcgctctagggaattttgttggcaagagttctggggcctccagcctgcctccctggggccaccgaggatgggagtccagattcttgccacactcattcctcctagacagcgtcctcctctccttctgcatgggtagggaaagatccacatttctcaccagggttgcgaaaactagactttgttttctccaactggatgatgtcatcctcgcaaggcagcacgtcctctgtggcttgaactctccctaggtattgatttcacatccgaaagaaattctcccagatcatgatttgtgtttcacagatgcagggtggcgggaggggagaaaaataattggggcaggatggggaagcctactcagttactccagaagggcgtcaaggtgctcccaactcccttgggacatagtcctgttgtcaccctgtctggctaggctgatccttaatgcaaaggaccctgggtgcttatgatttgggtagcccacttccaactccctgtggagatgaaaggtacaaaacctcctgatcacctgaccatctgtctccagcatggacgagagagacacccaacaggcagctaaaatgcaaacattccgtagcctgttgtctgtgtgctcctccctaagacacccaggaggggccagctctactgtgttcttgtagagctgcggcacggaggaagaagggatactggggaagctcttacaccttctgcgtcagaagatctcttttcattttcccctttatgaacactgtatggcctgttacattgatgttatatttggaggcccaaggagtttttgttaggaagtccctaccaccgtcagatgtagacagcaggttaaagtgctgccccacaagactggggttcttattttattttttttaaatgtctacctctcccctactaattgctattgttatcccaaaccttctccagcaggctcccctctcgaattttaatctttttctttaggggcaccccatcaactttccctgaccgtttgacaaatacccgaaaggtctctcagggcatggggagtatgtaataaatgattcttcccttagaatcttaatcattcctgggacttaggggggtgaagtgtgtgatcacagattgccaagcatacccaccctgtttggctctgggcaggaagcactgctcttcctggttccctcacaaggattttctgagatgtggagtggtttacctagcctctgatgaagccacagtgggcttctctaccaggtggcaataacctatggtcaaaactcaaggctggcacaatctgttcgattcaaggctactaagacttaatgctattgaacctgtgttctcacaggcttctgtttactgctgacctagagctcagaaactcagaccccactgtctcagtgtttcaagctgcttgccttattcgggcaatagaaagcccggagtgaaaagccctgggtttccaggttgacctctcacttcctcactgtgccactttgtttctgtatctgtaaaatgggggtgacaatcctacctcacagggctgtgtggggacaacaggaaaacatggctgcgatgtatgagaaccactggaaagcgcgtggctgggctgtgaccacagtgtataggaagtaggtaccctgctgtccttcctgtttccttatgaagaacctaccaggtgatcacacccgtgctgggccttgctacaagggagggcagtggagaggaacaggacattctttctgttgtgagacaactgcatcatttgcaatatgcaggggcctactatcttgttgcctgcaccccaggtctatttgtgctggggttgggggtgcacagagcattgagctgcttggccgctgtgtggaataaatctagagaattcctggctcacttcttctgatctcacacgctcattataaggcattaggactgtggatggagtggccaggaagttgatgttccttctgtcagcaagaggtacattagagatggagactacactgggtagattctagtttttaattcttattaatgtggggggaataaattaataagtataatatgattctgatgtctattagactttctctgtgctctttgtgagtaaggtgggccacggaggtatgagggcatcactgttagtttggtgaggtggttagtgactgatgtacaggaagtgtcttctacgtgggcactgacgtcagtagccatctatgcatcctaaatgcaggatcctcttgattctttctgccaatcaaatatatcgttgctcttggttcaggtttgtgtcagaaactttaaaaacatacctattaattctaaattatccaaagattatgtacaaattttaaaataaatgtctttttcag

SEQ ID NO: 1560 - protein, 214 aa, Rattus norvegicus
  ref <308>: DATABASE ACCESSION NUMBER: Refseq / NP_671738
  ref <309>: DATABASE ENTRY DATE: 2003-01-14
MRYLLFWYGLPHSYSQCVCHWTPASGIFENEPLLSLLLLVLGKLVTTEKRFLKDSLYTEGILIVWDPSVYHADIPKWYQKPDYNFFETYKSYRRLNPSQPFYILKPQMPWELWDIIQEISADLIQPNPPSSGMLGIIIMMTLCDQVDIYEFLPSKRKTDVCYYHQKFFDSACTMGAYHPLLFEKNMVKHLNEGTDEDIYLFGKATLSGFRNIRC

SEQ ID NO: 1561 - DNA, 491 bp, Homo sapiens
  ref <308>: DATABASE ACCESSION NUMBER: EMBL / AA705426
  ref <309>: DATABASE ENTRY DATE: 2000-03-03
tgaaagtgtacaaactttattgaaacgcacacgcgcacacacacaaacacccctgtggatagggaaaagcacctggccacagggtccactgaaacggggaggggatggcagcttacgataagtcttgtagttgttaaagaaattataatccggattctggtaccactttgggatatctgagtggtatacagatgggtcccatacaattaggattccttcattgtacaaactgtctttgaggaagcgcttctctgtggtaaccaactgagagttcatcaggcgaatggtagtttttgtgcccacatcttgttggaagttggctgtgggtgccccattaaacctcaggactgcgtcatgatcatcgatttctctgcctagttgggaggacttcagagatcccgctgacgacacaacagcacacctgccccaaggcccagccttggtcctaatgctctccttgggcagataaccctcccttcagaggtattgaa

SEQ ID NO: 1562 - DNA, 502 bp, Rattus norvegicus; identical to SEQ ID NO: 708
  ref <308>: DATABASE ACCESSION NUMBER: EMBL / M89646
  ref <309>: DATABASE ENTRY DATE: 2000-03-04

SEQ ID NO: 1563 - DNA, 1898 bp, Rattus norvegicus; identical to SEQ ID NO: 851
  ref <308>: DATABASE ACCESSION NUMBER: EMBL / M89945
  ref <309>: DATABASE ENTRY DATE: 2000-03-04

SEQ ID NO: 1564 - DNA, 3003 bp, Rattus norvegicus
  ref <308>: DATABASE ACCESSION NUMBER: Refseq / NM_012700
  ref <309>: DATABASE ENTRY DATE: 2003-01-14
atcgccaccgcagcctaggcagagccagtcggcccaggcccctgtctctgcctggcctcagctccccgccggcccgccgcgcaccttacccgcacatcccttggaggtctagccgggtgcccccagaccccggcctccagcacagaggcaagaggcagagagcagcagcgagggcgaggacgaagaaggggaggaggagctcgtcgcaggatgaaggatcggactcaggagctgcggagtgcaaaagacagtgacgatgaagaggaagtggttcatgtggatcgagaccactttatggatgagttctttgagcaggtggaagagatccgaggctgcatcgagaaactgtccgaggatgtggagcaagtgaagaaacagcacagtgccattcttgctgcccccaaccccgatgagaagactaaacaggagctggaggacctcacggcagacatcaaaaagacggcaaacaaggtccggtccaagttgaaagcgatcgagcagagcattgagcaggaagaggggttgaatcgttcttctgcagacctgcgtatccgtaagacccagcactccacactctcacggaagttcgtggaggtaatgaccgaatataatgcaactcagtctaagtaccgggaccgctgcaaggaccgtatccagaggcagctggagatcactggcaggactactaccaacgaagagctggaagacatgttggaaagcgggaagctggccatcttcacggacgacatcaaaatggactcgcagatgacaaagcaagccctgaatgagatagagacaaggcacaatgagatcatcaaactggaaaccagcatccgagagctgcacgacatgtttgtggacatggccatgctcgtggagagccagggtgagatgatcgaccgaattgagtacaatgtggaacattctgtggactacgtggagcgagccgtgtccgacaccaagaaagctgtgaaatatcagagcaaggccaggaggaagaaaattatgatcatcatttgctgtgtggtgctgggggtggtcttggcgtcatctattggggggacactgggcttgtaggcccctacccttctcttccccaggaccctccccacacatcgggagcaatacccccaccaccctttcactctttcccctgctccaagctcactcccaaaacagacccaggcagttccagcctctctcaccctcacgcagaccctggagtccctggctctcaccttgccatggatccccctccaccttgccgcacatagatagcagcaggcgtgatcacacatgcacaccaacatgcatgccgagggcacatgctcaagacgtgtggacaccccagcgtgtgtgtacttgtgtagatgtatgtagatgccctgaacctcttcttgctgccaccttcatcctgtgtggtctgaacttccctctctagccggttctgtgctgactgtagcagcctaccatggcccaacctgttctgtgtgaatagacatggtgtgtatgtgtgtgtgtgtgtgtgtgtgtgtgtgtgtgtgtgtgtgtgtgtgtgtagatctgtgcccatacaatgtatgtacatggagttttgtgaatgtgaaaacccaaagcatttcctccaccttctctcctatctgttacatttggagtgggaggcatatgtgaggataatttacattctcagaggatccagggtggcccggtgaccatgccacacatcttttgtgatgtagaacaaactttcctggcttggttactgccaggggtcacatcatgtcctgaggattctctctctcagcctctctctctgtctctctgtccctcagtctctgtctctgtctctgtctctgtgtgtgtgtgtgtgtgtgtgtgtgtgtgtgtgtccacatgtatgtaacccctagattagctgtgctgaggaaggaggctgcctgtccattccagaatattctgctgcagggcccagcacctcctgcccccaccttggcttctttggagatgtcagaggaggccccaggatctagttcccttcttctttcagcccagccagaactcccattaactcagatgtttctagcagcctccctgacaccccagtcatggtgttcacaaggacagggctgtggctggcatgctgctcctgcctctttgaatggcactgggcccacagctgcccaccactgagcctcaaacagatgagccgtccctgagagtctgctgtaacccagctttctaagacccacacctcacacgatggacatgttcgttgactgctgtccacatgtgtatcctggatggttgtctgggggctggtgtctgttgcatgttctcagatgtgtgctgcgtgccctccacacaccccaaaccatcaagcccaattatactcccttggtggtcccaggcccaagccaggactcaatgcttccattctccctttccttgcctcttacaaagcacctgcgtgtccatctcatgtgcccatgggtcatcatgctcccgtcataccttgagcgtgtacacatgtgtgttctatgcactcgccctgccctacctacccaacagaggacaagatggtcggcccctagctcccttctcccccacctagcctttccccacgccctgctgtgcagctgtgtgcgttggtgtgtttctgtgtcgctggcgtgtcatgtgatgtagccatgtttgctgacatgagcccctgcccccttctctttttctccattggtttctagaactctcttcctcccctcccctgagggacaggactcctggggcctagctgggggcccgagcctggccaccctcctgttagccctcagagtcttatttctctctattggtgaccaagttgcaaatggataaaatacaggaaattctgaccccctgccccagacctgcatgtcctgtccccagtgcccccgaaccccatcctgggccgggttgggcctggtgggacgggagaaatagcaactaatccaacagcgaaaaaaaaaa

SEQ ID NO: 1565 - protein, 288 aa, Rattus norvegicus
  ref <308>: DATABASE ACCESSION NUMBER: Refseq / NP_036832
  ref <309>: DATABASE ENTRY DATE: 2003-01-14
MKDRTQELRSAKDSDDEEEVVHVDRDHFMDEFFEQVEEIRGCIEKLSEDVEQVKKQHSAILAAPNPDEKTKQELEDLTADIKKTANKVRSKLKAIEQSIEQEEGLNRSSADLRIRKTQHSTLSRKFVEVMTEYNATQSKYRDRCKDRIQRQLEITGRTTTNEELEDMLESGKLAIFTDDIKMDSQMTKQALNEIETRHNEIIKLETSIRELHDMFVDMAMLVESQGEMIDRIEYNVEHSVDYVERAVSDTKKAVKYQSKARRKKIMIIICCVVLGVVLASSIGGTLGL

SEQ ID NO: 1566 - DNA, 6436 bp, Rattus norvegicus
  ref <308>: DATABASE ACCESSION NUMBER: Refseq / NM_053846
  ref <309>: DATABASE ENTRY DATE: 2003-01-13
ggaaggcgggggaggggctccaccgcccccgtcgccggcgttgccttccggggacgtggacacgtgagccccagcggctgggtccatggcattgtgaatcgacgagggagccccgctccgcgcgaggggcgcccggccccctccccgccccatgcgcccgcggctctgaagcctgagcggggccgggggccgggcggcgtcggggccgccggaggcatggctctcgggagtcggtggcgaccgccaccccagttgccgccgctgctgttgttgctggcgctggtggcaggcgtccgtggcttggagtttggcggcggccccgggcagtgggctcgctacgcgcgctgggcaggcgcggcgagcaccggcgagctcagcttcagcctgcgcaccaacgccacgcgcgcgctgctgctctacctggacgacggcggcgactgcgacttcctggagctgctgctggtggacgggcgcctgcggctgcgcttcacgctgtcttgcgccgagcccgccacgctgcagttggacacgccggtggccgacgaccgctggcacatggtgctgctgacccgcgacgcgcggcgcacggcgctggcggtggacggcgaagcccgtgcggccgaggtgcgctcaaagcggcgcgagatgcaggtggccagcgacctgttcgtgggcggcatcccacccgacgtgcgcctgtctgcgctcacgctcagcaccgtcaagtacgagccgcctttccgcggcctcctggccaacctgaagctgggcgagcggccgccggcgctgctgggtagccagggtctgcgcggtgcggccgccgaccccctgtgcgcgcccgcacgcaatccctgcgccaacggcggcctctgcaccgtgctagcccccggcgaggtgggctgcgactgcagccacactggcttcggcggcaagttctgcagtgaagaggaacaccccatggaaggtccggctcacctgacgttaaacagcgaagtagggtccttactgttctccgaggggggggccgggagaggaggagccggcaatgtgcaccagccaacaaaaggcaaggaggaatttgtggcaaccttcaagggcaatgagtccttctgctacgacctgtcacacaacccgatccagagcagcactgatgagatcacactggccttccgcaccctgcagcgcaacgggctgatgctgcacacggggaagtcggctaactacgtcaacctgtccctcaagtccggggctgtctggctgatcatcaacctaggctcaggtgccttcgaggccctcgtggaacccgtcaatggcaagttcaacgacaacgcctggcacgacgtccgggttacccgaaacctgcgccagcacgcagggattggacacgctatggtaaacaaactgcattatctggtgaccatctcggtggacgggatcctgaccaccacaggctacacgcaggaggattacaccatgctgggctctgatgacttcttctacattgggggcagccccaacacagccgacctgcctggctcccctgtcagcaacaacttcatgggctgtctcaaggacgtggtctacaagaataatgacttcaagctggagctatcccgactggctaaggaaggggacccgaagatgaagctgcagggggatttgtctttccgttgtgaggacgtggctgccttggaccctgtgaccttcgagagtcctgaggcctttgtcgcactgccccgctggagcgccaagcgcactggttctatctccctggacttcagaaccacggagcccaatgggttgctgctcttcagccagggccggcgggctggggccggggtaggcagccacagttccagccagagggccgactactttgccatggagctattggatggctacctctatcttctgctggacatgggctctgggggcatcaagctgcgggcgtccagccgcaaggtcaacgacggcgaatggtgccacgtggacttccagagggatgggcgcaaaggctccatctctgtgaacagccgcagtacaccattcttggccacaggagagagtgaggtcctggacctggagagtgagctgtacctgggcggtctccctgaggggggccgagtggacctgccattgcctcctgaggtgtggacagctgctctccgggctggctacgtgggctgcgtgcgagacctcttcatagatggacggagtcgagatctccggggcctggctgaggcacagggagctgtgggcgttgcacctttctgctctcgggagaccctgaagcagtgtgcatcggccccctgtcgtaatggtggcatctgtcgagagggctggaaccggttcgtctgtgattgcatcgggaccggctttctgggtcgggtctgcgagagagaggccacagtcttaagctatgatggctccatgtacatgaagatcatgctgcccaatgccatgcacacggaagcagaggatgtgtccctgcgattcatgtcccagagggcttatggactcatgatggccaccacctctagggagtcggccgacactctgcgtctcgagctggacggggggcagatgaagctcacagtcaacctcgactgcctgcgcgtcggctgcgcacccagtgctgcagctaaaggccccgagaccctctttgcggggcacaagctcaacgacaatgagtggcacacgctgagggtggtacggcgtggcaagagcctgcagctgtctgtggacaacgtgactgtggagggacagatggcaggagcccacacgcggctggagttccacaacatcgagacaggcatcatgacagagcgacggtttatctctgtggtgccctccaacttcatcggccacctgagcgggctggtgttcaatggtcaaccctacatggaccagtgcaaagatggagacatcacctactgtgagcttaatgcccgctttgggctgcgtgccatcgtggctgatcctgttaccttcaagagtcgcagtagctacctggcgttggccacgctccaagcctatgcctccatgcacctcttcttccagttcaagaccacagcccctgatggacttctgctgttcaactcaggcaacggcaatgacttcattgtcatcgagctggtcaaggggtacatccactacgtgtttgacctgggaaatagcccgtccttgatgaagggaaactcagacaaaccagttaatgacaaccagtggcacaacgtggtggtgtccagggacccaggcaacgtgcacacgctgaagattgactcccgcacggtcacgcagcattccaacggtgcccgaaatctggatctcaaaggggagttgtacatcggtggcctgagcaagaacatgttcagcaacctgccaaagctggtggcctctcgggatggctttcagggctgcctggcttctgtggacctcaacgggcgcctcccagacctcatcgcagacgccctgcaccgaatcgggcaggtggagaggggctgtgatggccccagtaccacctgcaccgaagagtcctgtgccaaccagggcgtctgcctgcagcagtgggacggctttacctgtgactgcaccatgacttcctatggaggccctgtctgcaatgaccctgggaccacatacatctttgggaaggggggagcgctcatcacctatacatggcctcccaatgaccgacccagcacaaggatggaccgcctggccgtaggcttcagcacccaccagcggagcgctgtgctggtacgcgtggacagtgcctccggcctcggggactacctgcagctgcacattgaccagggcactgttggggtgatttttaatgtgggcacggatgacattacaattgatgagcccaacgccatcgtgagcgacggcaaatatcacgtggtgcgcttcactcgaagtggtggcaatgccactttgcaggtggacagctggccagtcaacgagcggtacccggcagggaactttgataacgagcgcctggcgattgctagacagagaatcccctaccggcttggtcgagtagtagatgaatggctgctcgacaaaggacgccagctgaccatcttcaacagccaggctgccatcaagatagggggccgggatcagggccgccccttccagggccaggtgtccggcctctactacaatgggctcaaggtactggcgctggccgccgagagcgaccccaatgtgcggaccgaaggccacctgcgcctagtaggggaagggccgtccgtgctgctcagtgcagagaccactgccaccactctgctggccgacatggccaccaccatcatggagaccaccaccaccatggccaccaccactactcgccggggccgctcccccacaatgagggacagcaccacccagaacacagatgaccttctggtggcctcggctgagtgtccaagtgatgatgaggacctggaggagtgtgagcctagtactggaggagagttaatattgcccattatcacggaggactccttagacccccctcccgtggccacccggtcccccttcgtgcccccgccccccaccttctacccctttctcacgggcgtgggtgccacccaagacaccctgcctccgcccgccgcgcgccgcccgtcctccgggggcccgtgtcaggccgagcgcgacgacagcgactgcgaggagcccgtggaagcctcgggcttcgcctccggggaggtctttgactccagcctcccccccacggacgacgaggacttttacaccaccttccccttggtcacggaccgcaccaccctcctgtcaccccgcaagcctgcgccccgacctaacctcaggacagatggggccacgggcgcccccggggtgctacttgcgccctccgccccagcccccaacctgcccgcgggcaaaatgaaccaccgagacccactgcagccgctgctggagaacccacccctggggcctggggtccccacggccttcgagccgcggcggccgcctcccctgcgccccggcgtgacctcagtccccggtttcccccgtctgcccacagccaaccccacgggtccgggggagcgcggcccgccgggcgcggtggaagtgatccgcgaatccagcagcaccacgggcatggtggtgggcatcgtggcggcggcggcgctctgcatccttatccttctctacgccatgtacaagtaccgcaaccgcgacgagggctcctaccaagtggaccagagccggaattacatcagtaactcggcccagagcaatggggcggtggtgaaggagaaggcccccgctgcccccaagacgcccagcaaggccaagaagaacaaagacaaagagtattacgtctgagcacccagtccaggcaccgcgccccactgccagctgctcctcccgggaaggcccgggaggagggtgcggccctctccctgcagggggatctggggaccctctccccggctgcctcaggcttctcccacgaagaggaaacgcaaaaagaaaaggaatataactactacgtgctcatccccttccctcccactgccctcggcgccgcactgtcagctctggggctggctgtcctccgctctgcgcctgtcaggcagggcacgtgctcacagccctgggttgatttattttttaaggggcgtagttttattttggtggggctgggcgggaaggaaggctggggttttgtaaagtgtccactgcgccgttcgtttatttccctcgattttcttcttcctcccagctcctcccgccttccttcttcgcagccctcctgtcctggttcaggcttgctgtgtcttttgtccctaccctcctccaccccatcccccctttctttccttttcttttctcttcttttcctttctttcttttttaaattctgttttctctgcttcccttcctttgggtttccagagtcgctgggagaagaagggtgggcttgggtggctggggccgggcagtggggctcattcccctggtgccgcaagtcccctcgtgaggagaaactcctgcctgggtctgcccaaggattgggcttggacctggccaaggcctgttgtgtgtgtcgctgccgggcaacgtgcattgctgggaagccgctggaggagcggggtggggggcggggggagggggaaaggcaaatgcagatatatattaaaaacaaataaccgaggtaccagagctgcgtctgtggcaccagctcgctgcaggcgcagaggatggtgggagtgaggctgtgtctgcggatggctggggtcacttctccgcccatgggctccctgctcccccagttttttttctctttgttaacaaatgtgtctgagtcttggaaaacaccccaaacccggaaatgtgtgggaaaaagaaaacaaaaactttccaaattccaaaaaaaaaaaaaaaaaaaaaaaaa

SEQ ID NO: 1567 - protein, 1715 aa, Rattus norvegicus
  ref <308>: DATABASE ACCESSION NUMBER: Refseq / NP_446298
  ref <309>: DATABASE ENTRY DATE: 2003-01-13
MALGSRWRPPPQLPPLLLLLALVAGVRGLEFGGGPGQWARYARWAGAASTGELSFSLRTNATRALLLYLDDGGDCDFLELLLVDGRLRLRFTLSCAEPATLQLDTPVADDRWHMVLLTRDARRTALAVDGEARAAEVRSKRREMQVASDLFVGGIPPDVRLSALTLSTVKYEPPFRGLLANLKLGERPPALLGSQGLRGAAADPLCAPARNPCANGGLCTVLAPGEVGCDCSHTGFGGKFCSEEEHPMEGPAHLTLNSEVGSLLFSEGGAGRGGAGNVHQPTKGKEEFVATFKGNESFCYDLSHNPIQSSTDEITLAFRTLQRNGLMLHTGKSANYVNLSLKSGAVWLIINLGSGAFEALVEPVNGKFNDNAWHDVRVTRNLRQHAGIGHAMVNKLHYLVTISVDGILTTTGYTQEDYTMLGSDDFFYIGGSPNTADLPGSPVSNNFMGCLKDVVYKNNDFKLELSRLAKEGDPKMKLQGDLSFRCEDVAALDPVTFESPEAFVALPRWSAKRTGSISLDFRTTEPNGLLLFSQGRRAGAGVGSHSSSQRADYFAMELLDGYLYLLLDMGSGGIKLRASSRKVNDGEWCHVDFQRDGRKGSISVNSRSTPFLATGESEVLDLESELYLGGLPEGGRVDLPLPPEVWTAALRAGYVGCVRDLFIDGRSRDLRGLAEAQGAVGVAPFCSRETLKQCASAPCRNGGICREGWNRFVCDCIGTGFLGRVCEREATVLSYDGSMYMKIMLPNAMHTEAEDVSLRFMSQRAYGLMMATTSRESADTLRLELDGGQMKLTVNLDCLRVGCAPSAAAKGPETLFAGHKLNDNEWHTLRVVRRGKSLQLSVDNVTVEGQMAGAHTRLEFHNIETGIMTERRFISVVPSNFIGHLSGLVFNGQPYMDQCKDGDITYCELNARFGLRAIVADPVTFKSRSSYLALATLQAYASMHLFFQFKTTAPDGLLLFNSGNGNDFIVIELVKGYIHYVFDLGNSPSLMKGNSDKPVNDNQWHNVVVSRDPGNVHTLKIDSRTVTQHSNGARNLDLKGELYIGGLSKNMFSNLPKLVASRDGFQGCLASVDLNGRLPDLIADALHRIGQVERGCDGPSTTCTEESCANQGVCLQQWDGFTCDCTMTSYGGPVCNDPGTTYIFGKGGALITYTWPPNDRPSTRMDRLAVGFSTHQRSAVLVRVDSASGLGDYLQLHIDQGTVGVIFNVGTDDITIDEPNAIVSDGKYHVVRFTRSGGNATLQVDSWPVNERYPAGNFDNERLAIARQRIPYRLGRVVDEWLLDKGRQLTIFNSQAAIKIGGRDQGRPFQGQVSGLYYNGLKVLALAAESDPNVRTEGHLRLVGEGPSVLLSAETTATTLLADMATTIMETTTTMATTTTRRGRSPTMRDSTTQNTDDLLVASAECPSDDEDLEECEPSTGGELILPIITEDSLDPPPVATRSPFVPPPPTFYPFLTGVGATQDTLPPPAARRPSSGGPCQAERDDSDCEEPVEASGFASGEVFDSSLPPTDDEDFYTTFPLVTDRTTLLSPRKPAPRPNLRTDGATGAPGVLLAPSAPAPNLPAGKMNHRDPLQPLLENPPLGPGVPTAFEPRRPPPLRPGVTSVPGFPRLPTANPTGPGERGPPGAVEVIRESSSTTGMVVGIVAAAALCILILLYAMYKYRNRDEGSYQVDQSRNYISNSAQSNGAVVKEKAPAAPKTPSKAKKNKDKEYYV

SEQ ID NO: 1568 - DNA, 281 bp, Homo sapiens
  ref <308>: DATABASE ACCESSION NUMBER: EMBL / AA975502
  ref <309>: DATABASE ENTRY DATE: 2000-03-03
tttaaaaaagaagatagcataccacggaattcaggcaacttacatcaacaaataggccgtgtgattttagcatgaagaaaaaaattacaaacagagctgtgtaagcgggttctcccggaaaaaaaataagaaaaaacaacttttccgtacaacgttttctgtctatctgttcggtatctccctccctcactctctgctccctgcgcatcctgcctcctcctgaactctctctccgccctcacttgtccctctccccctcattcaacacaaagctgaactct

SEQ ID NO: 1569 - DNA, 483 bp, Rattus norvegicus
  misc_feature (1)..(483): n=a, c, g or t
  ref <308>: DATABASE ACCESSION NUMBER: EMBL / AA799523
  ref <309>: DATABASE ENTRY DATE: 2000-03-03
aaatcataaatgtacaacagcttcttaactctacacacgcacttaaatttttaaaggaaaaacgttatgtcttattacaccatgatcctggctaatagcttttcaaaactttttgagaaaaatcttaaaaaaggtttcacatgtcacctgaaacttacaaatttaacattatcaaagaaggaatgcttctacactcttacaaagaccactagaaagaaccaacatttaaaaggctagaaactgtctcaaagcatttttttttacatccttcctcaacagtaagtattaattatcaatccatcacaaatgctctcgcatcgctctgtgtctccgcatacaatgctattagcatactganataaagttctaaaatgtaattcgaaactgagccgtcggtactcgggctcacactcccaataacaattaccccaggaattagaaaatcaatacggtcttcaaatacccaattccaatcccaaacac

SEQ ID NO: 1570 - DNA, 506 bp, Rattus norvegicus
  ref <308>: DATABASE ACCESSION NUMBER: EMBL / AA799598
  ref <309>: DATABASE ENTRY DATE: 2000-03-03
acattactatacaataaaacaaaattggaatctttataggtggaacagagaacccaccaccccatgacggactgggaaccaacagagagcttatagactggttgcagctacaaggagtggatgcaaatacaatagaaaaggtaaatttctaaatcaaaggattcctatgatactgttgaaaagctgcttatgttgttgaatgtatgttgaatctttcagattgttgaagaagattacacactttctggatattctcaatgatatcactaaggaagacctaaggtgcctcagactacggtaagagagcctgcaaacaatttaaataataaaatggggcttttttatgtgaatacttttatttttaatgctggtagtttccccgatctttgaaatttatctttcctaggttgtaacaagcacagctcattttctcaggttggcaaggcatgaagtgccagacctttctttacattgtttaaatgccaaacctctacccagatcaccaa

SEQ ID NO: 1571 - DNA, 1334 bp, Rattus norvegicus; identical to SEQ ID NO: 1445
  ref <308>: DATABASE ACCESSION NUMBER: Refseq / NM_031331
  ref <309>: DATABASE ENTRY DATE: 2003-01-13

SEQ ID NO: 1572 - protein, 380 aa, Rattus norvegicus; identical to SEQ ID NO: 1446
  ref <308>: DATABASE ACCESSION NUMBER: Refseq / NP_112621
  ref <309>: DATABASE ENTRY DATE: 2003-01-13

SEQ ID NO: 1573 - DNA, 1313 bp, Homo sapiens; identical to SEQ ID NO: 1447
  ref <308>: DATABASE ACCESSION NUMBER: Refseq / NM_002810
  ref <309>: DATABASE ENTRY DATE: 2002-12-23

SEQ ID NO: 1574 - protein, 377 aa, Homo sapiens; identical to SEQ ID NO: 1448
  ref <308>: DATABASE ACCESSION NUMBER: Refseq / NP_002801
  ref <309>: DATABASE ENTRY DATE: 2002-12-23

SEQ ID NO: 1575 - DNA, 743 bp, Rattus norvegicus
  misc_feature (1)..(743): n=a, c, g or t
  ref <308>: DATABASE ACCESSION NUMBER: EMBL / AA799996
  ref <309>: DATABASE ENTRY DATE: 2000-03-03
aatgatgaattaggcaaaaattttatttccaagctcttcaaagataatcacaaacacaaactttccttctaaaagtgtccccaattaaatcaaaggcacatcacccccaataaaatatgtgtgacatgaattcttttaggttataatatcttcatattttgtttttaaccaattgcaacgttctaagtgtagatcacatttaaacatttttaaaggcatgagcacacttttcaaagcatcagacacaattataagttgtagagtacaggaactaaagaaagttctaatggcttcacacgggagggccacctaacaacacatccatgctccgtgtgctaaggagcggctccccagcttcccgtccaggtcagaccgtttgctcactgggactggaaaggcctcctttacgaaaccagcatatcaatcattccccaatttatactttgtctaatttagtaactgtaaatttttatgaaaattttttattacagtataaaaatgttaggaaaattacagatactcagttttcggaaatacaacatttcatccaganatgcanataccagtanacaaaacatgcctccatcccaagcagggccgcacaggcttgactganagatgcacccagtgagtttggnnatgaggtnanaaatanacanacatgatttcgtaaaattttgactagacaggcacaanaaatgattgttctgaatcgttttctggactgnngtatcatcacacca

SEQ ID NO: 1576 - DNA, 600 bp, Rattus norvegicus
  ref <308>: DATABASE ACCESSION NUMBER: EMBL / AA800029
  ref <309>: DATABASE ENTRY DATE: 2000-03-03
aaggactgcacaggaacctggacttggaaaaatcatattctgggaagcagctttgattgtagccaaagagatgtcctcccagaaggccactaagtgttgtaatgttaaggggagcggagacctagacttcactgagtgatgcatggacatttcaaaagtggcttccgattttccgtcttcacacttctcatgtagaggtggctccttaagcatagacaggaccttatttttgttgatacttcccatcttggatatgtctggtccgtgaggtgaaatgttgaacatatttagggcagatgatatttccaacgaatgtctattttttaacttgatttccttttcctctgtgggtggctggctattcagactacttcttatgggagcatgttctttggaaagttcaggattaaacttcaaagaagaagagcaagcattgcatcatgtactatgccttcatgccacagaaaaggagcaaagacagctcgggcacactcagccacggacggggacatggctgcctggctgggtcaaaaatttgggtcaactcctttgaaaagaagttagactttcctttttgggcctgggtgtccattgcacatt

SEQ ID NO: 1577 - DNA, 2277 bp, Rattus norvegicus
  ref <308>: DATABASE ACCESSION NUMBER: Refseq / NM_130428
  ref <309>: DATABASE ENTRY DATE: 2003-01-13
cgcaagcgcagtctatcgctgaggcttgcgggaaggcaaacatggccggggttggcgcagtttcgagacttcttcgcgggcggcgcttggctctagctggggcgactcgtggctttcacttctctgttggtgagagcaagaaggcatccgctaaagtttcagacgcgatttctacccagtaccccgtggtggaccatgagtttgatgctgtggttgtaggtgcaggcggggcaggcttgcgagctgcattcggcctttctgaggcaggctttaacacggcatgccttacaaagctctttcctacccgctcacatactgttgcagcacagggaggtatcaatgctgccctggggaacatggaagaggacaactggagatggcatttctatgacaccgtgaaaggctctgactggctgggggatcaggatgccatccattacatgacagagcaagctcctgcctccgtggttgagctagaaaattacggtatgccgtttagcaggactgaagatgggaggatttatcagcgtgcatttggtggacagagcctcaagttcgggaaaggcgggcaggcccatcggtgttgctgtgtcgctgatcggacgggccactcactcttacacaccttgtatggacgatctctgcggtatgacaccagttattttgtggagtatttcgcactggatcttctgatggaaaatggggagtgccgtggtgtcattgcactgtgcatagaagatgggtccatacaccgaataagagcaaagaacactattattgctactgggggctatgggcgaacctacttcagctgtacttctgcccacaccagcacaggggacggcacagccatggtcactcgggctggtttaccttgccaggacttagaatttgttcagttccaccccacaggtatctatggtgctggctgcctcatcacagaagggtgccgtggagagggaggcattctcatcaacagccaaggcgaaaggttcatggagagatatgcccctgttgccaaggacctagcatcaagagatgttgtgtctcgatccatgactctcgagatccgtgaaggaagaggctgtggccctgagaaggatcacgtctacctgcagttgcaccatctgccccctgagcagctggccacgcgtctgcctgggatctcagagacggccatgatcttcgccggcgtggatgtcaccaaggagcccattccagtccttcccactgtgcattacaacatgggcgggattcccactaactacaagggacaggtgctgaagcacgtgaacggccaggatcagattgtgcctggtctgtacgcctgtggggaggctgcctgcgcctcagtgcatggtgccaaccggcttggagcaaactctcttttggaccttgtcgtctttggccgagcctgtgccctgagcattgcagaatcttgcaggcctggagataaagttcctccgattaaggcaaatgctggagaagagtcggttatgaatcttgacaagttgagatttgctgatggaagtgtaagaacatcagagctgcgcctcagcatgcagaagtcgatgcagagccatgccgccgtgttccgtgtgggaagtgtgctgcaagaaggctgtgaaaaagtcagccagctctatggagacctacagcatctgaagacgtttgacaggggaatggtctggaacacagacctggtggagacgctggagctgcagaatctgatgctgtgcgcactgcagaccatatatggtgcggaagcacggaaggagtcacggggagctcatgccagggaagattacaaggtgcggattgatgagtatgattactccaagcccatcgagggccagcagaagaagccatttgcggaacactggaggaagcacaccctctcatatgtggacaccaagactgggaaggttactttggattacagacctgttattgacaagaccttgaatgaggctgactgtgctactgtacctcctgctatccgttcctactgaaaaacctgacagctacaggaccagcttatgtgattatacatcatagcttacctaggtttcctctcatactcgtcttgttaaaaatctgctctcatgaacaaggagtcacttcacagattatgatcaacagcttggcagtacttgatgtgagggactcgagttgcaccattgtctctcattcttgtgcagtgataaactggtataattcttaaatgatgtacaaacgaacaatcttttatttctaaataaaaccacatagtatttg

SEQ ID NO: 1578 - protein, 656 aa, Rattus norvegicus
  ref <308>: DATABASE ACCESSION NUMBER: Refseq / NP_569112
  ref <309>: DATABASE ENTRY DATE: 2003-01-13
MAGVGAVSRLLRGRRLALAGATRGFHFSVGESKKASAKVSDAISTQYPVVDHEFDAVVVGAGGAGLRAAFGLSEAGFNTACLTKLFPTRSHTVAAQGGINAALGNMEEDNWRWHFYDTVKGSDWLGDQDAIHYMTEQAPASVVELENYGMPFSRTEDGRIYQRAFGGQSLKFGKGGQAHRCCCVADRTGHSLLHTLYGRSLRYDTSYFVEYFALDLLMENGECRGVIALCIEDGSIHRIRAKNTIIATGGYGRTYFSCTSAHTSTGDGTAMVTRAGLPCQDLEFVQFHPTGIYGAGCLITEGCRGEGGILINSQGERFMERYAPVAKDLASRDVVSRSMTLEIREGRGCGPEKDHVYLQLHHLPPEQLATRLPGISETAMIFAGVDVTKEPIPVLPTVHYNMGGIPTNYKGQVLKHVNGQDQIVPGLYACGEAACASVHGANRLGANSLLDLVVFGRACALSIAESCRPGDKVPPIKANAGEESVMNLDKLRFADGSVRTSELRLSMQKSMQSHAAVFRVGSVLQEGCEKVSQLYGDLQHLKTFDRGMVWNTDLVETLELQNLMLCALQTIYGAEARKESRGAHAREDYKVRIDEYDYSKPIEGQQKKPFAEHWRKHTLSYVDTKTGKVTLDYRPVIDKTLNEADCATVPPAIRSY

SEQ ID NO: 1579 - DNA, 551 bp, Rattus norvegicus
  ref <308>: DATABASE ACCESSION NUMBER: EMBL / AA800576
  ref <309>: DATABASE ENTRY DATE: 2000-03-03
acaggctgaagacaggtgcatctgaggtcacctttcctcttgaacaggccatgacattctgctcacatccatgccggttaacttaaagctagaggtataaagtgacatctacagtgtatttgcaaggccagagctacagtggcaagctgcatgtggctgcgcgccaaagctcagtggtgctcagcgaggctcccgggcgctcgctgctctaagcatgcacttggaaacccagctcatcagtcccttttaaacagagacgggatgatgtagacccaccaccaagactcgcggaaggggctacttaccacaacctgcattaatttataaagtgagatcctaagtcaaacattcacagaaaggcatattcactaggagctggccaggcagactgtctttcttagtgacctgtctgctggctgttattatagttagcatttaaaaaaagggggggactgaattttaaaatagagcacttggcggggagagttaatgtgtgcatgtgcggaagccgctccctgcactctgctgtattcaacagtcaacactgcaca

SEQ ID NO: 1580 - DNA, 1114 bp, Homo sapiens
  ref <308>: DATABASE ACCESSION NUMBER: Refseq / NM_000394
  ref <309>: DATABASE ENTRY DATE: 2001-05-15
acactgcgctgcccagaggccccgctgactcctgccagcctccaggtccccgtggtaccaaagctgaacatggacgtgaccatccagcacccctggttcaagcgcaccctggggcccttctaccccagccggctgttcgaccagtttttcggcgagggcctttttgagtatgacctgctgcccttcctgtcgtccaccatcagcccctactaccgccagtccctcttccgcaccgtgctggactccggcatctctgaggttcgatccgaccgggacaagttcgtcatcttcctcgatgtgaagcacttctccccggaggacctcaccgtgaaggtgcaggacgactttgtggagatccacggaaagcacaacgagcgccaggacgaccacggctacatttcccgtgagttccaccgccgctaccgcctgccgtccaacgtggaccagtcggccctctcttgctccctgtctgccgatggcatgctgaccttctgtggccccaagatccagactggcctggatgccacccacgccgagcgagccatccccgtgtcgcgggaggagaagcccacctcggctccctcgtcctaagcaggcattgcctcggctggctcccctgcagccctggcccatcatggggggagcaccctgagggcggggtgtctgtcttcctttgcttcccttttttcctttccaccttctcacatggaatgagggtttgagagagcagccaggagagcttagggtctcagggtgtcccagaccccgacaccggccagtggcggaagtgaccgcacctcacactcctttagatagcagcctggctcccctggggtgcaggcgcctcaactctgctgagggtccagaaggagggggtgacctccggccaggtgcctcctgacacacctgcagcctccctccgcggcgggccctgcccacacctcctggggcgcgtgaggcccgtggggccggggcttctgtgcacctgggctctcgcggcctcttctctcagaccgtcttcctccaacccctctatgtagtgccgctcttggggacatgggtcgcccatgagagcgcagcccgcggcaatcaataaacagcaggtgatacaagc

SEQ ID NO: 1581 - protein, 173 aa, Homo sapiens
  ref <308>: DATABASE ACCESSION NUMBER: Refseq / NP_000385
  ref <309>: DATABASE ENTRY DATE: 2001-05-15
MDVTIQHPWFKRTLGPFYPSRLFDQFFGEGLFEYDLLPFLSSTISPYYRQSLFRTVLDSGISEVRSDRDKFVIFLDVKHFSPEDLTVKVQDDFVEIHGKHNERQDDHGYISREFHRRYRLPSNVDQSALSCSLSADGMLTFCGPKIQTGLDATHAERAIPVSREEKPTSAPSS

SEQ ID NO: 1582 - DNA, 448 bp, Rattus norvegicus
  ref <308>: DATABASE ACCESSION NUMBER: EMBL / AA800948
  ref <309>: DATABASE ENTRY DATE: 2000-03-03
ccatgcaaggagactgtttatttcgaaaggattttgcaataaacacagtgaacagggctccaagtagctgtctattcttctccctcatcctcgtcctcataggagtctatgcctacttcctcataatctttctccagggcagccatatcctctcgagcctcggaaaactccccctcctccattccctcacccacataccagtgtacaaaagccctcttggcatacatcaagtcaaacttgtggtccaggcgggcccaggcttcagcaatggcggttgtgttgctcagtatgcacactgcacgctgcaccttggccaggtcgcccccaggcaccacggtgggaggctggtacttgataccgaccttgaagcctgtggggcaccagtccacaaactggatgctgcgcttcgtcttgatggcatcgatggcagcgttcacatccttgggca

SEQ ID NO: 1583 - DNA, 1514 bp, Homo sapiens
  ref <308>: DATABASE ACCESSION NUMBER: Refseq / NM_006000
  ref <309>: DATABASE ENTRY DATE: 2003-01-15
agttctcactgagacctgtcaccccgactcaacgtgagacgcaccgcccggactcaccatgcgtgaatgcatctcagtccacgtggggcaggcaggtgtccagatgggcaatgcctgctgggagctctattgcttggaacatgggattcagcctgatgggcagatgcccagtgacaagaccattggtggaggggacgactccttcaccaccttcttctgtgaaactggtgctggaaaacacgtaccccgggcagtttttgtggatctggagcctacggtcattgatgagatccgaaatggcccataccgacagctcttccacccagagcagctcatcactgggaaagaggatgctgccaacaactatgcccgtggtcactataccattggcaaggagatcattgacccagtgctggatcggatccgcaagctgtctgaccagtgcacaggacttcagggcttcctggtgttccacagctttggtgggggcactggctctggcttcacctcactcctgatggagcggctctctgttgactatggcaagaaatccaagctggaattctccatctacccagccccccaggtgtctacagccgtggtcgagccctacaactctatcctgaccacccacaccaccctggagcactcagactgtgccttcatggtggacaacgaagcaatctatgacatctgccgccgcaacctagacatcgagcgcccaacctacaccaacctcaatcgcctcattagccaaattgtctcctccatcacagcttctctgcgctttgacggggccctcaatgtggacctgacagagttccagaccaacctggtgccctaccctcgcatccacttccccctggccacctatgcaccagtcatctctgcagaaaaggcataccacgagcagctgtcggtggcagagatcaccaatgcctgctttgagcctgccaaccagatggtaaagtgtgatccccggcacggcaagtacatggcctgctgcctgctgtaccgtggagatgtggtgcccaaggatgtcaacgctgccattgccgccatcaagaccaagcgcagcattcagtttgtggactggtgccccacaggcttcaaggttggtatcaactaccagcctcccactgtggtgcctgggggtgacctggccaaggtgcagcgtgccgtgtgcatgctgagcaacacgaccgccatcgccgaggcctgggcccgcctggaccacaagttcgacctgatgtatgccaagagggcgtttgtgcactggtatgtgggtgagggcatggaggagggtgagttctccgaggcccgtgaggatatggctgccctggagaaggattatgaggaggtgggcatcgactcctatgaggacgaggatgagggagaagaataaagcagctgcctggagcctattcactatgtttattgcaaaatcctttcgaaataaacagtttccttgcacggttaaaaaaaaaaaaaaaaaaaaaaaaaaaaaaaaaaaa

SEQ ID NO: 1584 - protein, 448 aa, Homo sapiens
  ref <308>: DATABASE ACCESSION NUMBER: Refseq / NP_005991
  ref <309>: DATABASE ENTRY DATE: 2003-01-15
MRECISVHVGQAGVQMGNACWELYCLEHGIQPDGQMPSDKTIGGGDDSFTTFFCETGAGKHVPRAVFVDLEPTVIDEIRNGPYRQLFHPEQLITGKEDAANNYARGHYTIGKEIIDPVLDRIRKLSDQCTGLQGFLVFHSFGGGTGSGFTSLLMERLSVDYGKKSKLEFSIYPAPQVSTAVVEPYNSILTTHTTLEHSDCAFMVDNEAIYDICRRNLDIERPTYTNLNRLISQIVSSITASLRFDGALNVDLTEFQTNLVPYPRIHFPLATYAPVISAEKAYHEQLSVAEITNACFEPANQMVKCDPRHGKYMACCLLYRGDVVPKDVNAAIAAIKTKRSIQFVDWCPTGFKVGINYQPPTVVPGGDLAKVQRAVCMLSNTTAIAEAWARLDHKFDLMYAKRAFVHWYVGEGMEEGEFSEAREDMAALEKDYEEVGIDSYEDEDEGEE

SEQ ID NO: 1585 - DNA, 1115 bp, Rattus norvegicus
  ref <308>: DATABASE ACCESSION NUMBER: Refseq / NM_138895
  ref <309>: DATABASE ENTRY DATE: 2003-01-13
ctgtgagggtgtttcgacgcgctgggcggtttgttccttcatcgcattcgttaacaggtcaaaatgcaaatcttcgtgaagaccctgaccggcaagaccatcaccctagaggtggagcccagtgacaccatcgagaacgtgaaggccaagatccaggataaagagggcatcccccctgaccagcagaggctcatctttgccggcaagcagctggaagatggccgcaccctctctgactacaacatccagaaagagtcaaccctgcacctggtcctccgcctgaggggcggcatgcagatcttcgtgaagaccctgaccggcaagaccatcaccctggaggtggagcccagtgacaccatcgagaacgtgaaggccaagatccaggataaagagggcatcccccctgaccagcagaggctcatctttgccggcaagcagctggaagatggccgcaccctctctgattacaacatccagaaagagtcaaccctgcaccttgtcctccgcctgaggggcggcatgcagatcttcgtgaagaccctgaccggcaagaccatcaccctagaggtggagcccagtgacaccatcgagaacgtgaaggccaagatccaggataaagagggcatcccccctgaccagcagaggctcatctttgccggcaagcagctggaagatggccgcaccctctctgattacaacatccagaaggagtcaaccctgcacctggtcctccgcctgaggggcggcatgcagatcttcgtgaagaccctgaccggcaagaccatcaccctggaggtggagcccagtgacaccatcgagaacgtgaaggccaagatccaggataaagagggcatcccccctgaccagcagaggctcatctttgccggcaagcagctggaagatggccgcaccctctctgattacaacatccagaaagagtcaaccctgcacctggtcctccgcctgaggggtggctattaattcttcagtctgcattcccggcgggcactgatggcattactctgcactctagccatttgccccaatttaagtttagaaattacaagtttcagtaatagctgaacctctgttaaaaatgttaataaaggttttgt

SEQ ID NO: 1586 - protein, 305 aa, Rattus norvegicus
  ref <308>: DATABASE ACCESSION NUMBER: Refseq / NP_620250
  ref <309>: DATABASE ENTRY DATE: 2003-01-13
MQIFVKTLTGKTITLEVEPSDTIENVKAKIQDKEGIPPDQQRLIFAGKQLEDGRTLSDYNIQKESTLHLVLRLRGGMQIFVKTLTGKTITLEVEPSDTIENVKAKIQDKEGIPPDQQRLIFAGKQLEDGRTLSDYNIQKESTLHLVLRLRGGMQIFVKTLTGKTITLEVEPSDTIENVKAKIQDKEGIPPDQQRLIFAGKQLEDGRTLSDYNIQKESTLHLVLRLRGGMQIFVKTLTGKTITLEVEPSDTIENVKAKIQDKEGIPPDQQRLIFAGKQLEDGRTLSDYNIQKESTLHLVLRLRGGY

SEQ ID NO: 1587 - DNA, 671 bp, Homo sapiens
  misc_feature (1)..(671): n=a, c, g or t
  ref <308>: DATABASE ACCESSION NUMBER: EMBL / BG107425
  ref <309>: DATABASE ENTRY DATE: 2001-02-02
ggctttgttgggtgagcttgtttgtgtccctgtgggtggacgtggttggtgattggcaggatcctggtatccgctaacaggtcaaaatgcagatcttcgtgaaaacccttaccggcaagaccatcacccttgaggtggagcccagtgacaccatcgaaaatgtgaaggccaagatccaggataaggaaggcattccccccgaccagcagaggctcatctttgcaggcaagcagctggaagatggccgtactctttctgactacaacatccagaaggagtcgaccctgcacctggtcctgcgtctgagaggtggtatgcagatcttcgtgaagaccctgaccggcaagaccatcaccctggaagtggagcccagtgacaccatcgaaaatgtgaaggccaagatcccagtcacaattatcaccgggtatttaggtgctgggaagacaacacttctgaactatattttgacagagcaacatagtaaaagagtagcggtcattttaaatgaatctggggaaggaagtgcgctggagaaatccttagctgtcagccaaggtggagagctctatgaagagtggctggaacttagaaacggttgcctctgctgttcagtgaagtgaggaatgtgtttactgtgtacatggtttactagaaatgtttattgattattn

SEQ ID NO: 1588 - DNA, 1015 bp, Rattus norvegicus
  ref <308>: DATABASE ACCESSION NUMBER: Refseq / NM_022698
  ref <309>: DATABASE ENTRY DATE: 2003-01-14
atgggaaccccaaagcagccctcgctggctcctgcacacgccctaggcttgaggaagtccgatcccggaatccggagcctggggagcgacgcgggaggaaggcggtggagaccagcagcccagagtatgttccagatcccagagtttgagccgagtgagcaggaagacgctagtactacagataggggcctgggccctagcctcactgaggaccagccaggtccctacctggccccaggtctcctggggagcatcgttcagcagcagccgggacaggcagccaataacagtcatcatggaggcgctgggactatggagacccggagtcgccacagttcgtacccagcggggactgaggaagatgaagggatggaggaggagcttagcccttttcgaggacgctcgcgctcggctccccccaatctctgggcagcgcagcgctatggccgtgagctccgaagaatgagcgatgaatttgagggttccttcaagggacttcctcgcccaaagagcgcaggcactgcaacacagatgcgacaaagcgccagttggacgcgcattatccagtcctggtgggatcgaaatttggggaaaggaggctccactccctcccagtgatctgctccacattcccggaattctacccgctcccatcgcccgccatattgggtgtgggcggaagtctttcgaggccttaggaaaaaaggatcgctgtgtccctttaacagggagaagagctgacgtacagcgttgagttccttccggtgcgtgcaatagccatggaggggtggcccttgctttggagttttcaaagttttccacacaccctaccccctacgcctccggaagtggctatgttccctctccgttactggacagccctcaggcgcctgtgctaagttgcgagtcctggtaaaccgagactgggtgctgtcctatcatcctagctggaggccccaggtcaagaaacgtgctttataataaagcccgcgcatgtgtaaaaaaaaaaaaaaaa

SEQ ID NO: 1589 - protein, 205 aa, Rattus norvegicus
  ref <308>: DATABASE ACCESSION NUMBER: Refseq / NP_073189
  ref <309>: DATABASE ENTRY DATE: 2003-01-14
MGTPKQPSLAPAHALGLRKSDPGIRSLGSDAGGRRWRPAAQSMFQIPEFEPSEQEDASTTDRGLGPSLTEDQPGPYLAPGLLGSIVQQQPGQAANNSHHGGAGTMETRSRHSSYPAGTEEDEGMEEELSPFRGRSRSAPPNLWAAQRYGRELRRMSDEFEGSFKGLPRPKSAGTATQMRQSASWTRIIQSWWDRNLGKGGSTPSQ

SEQ ID NO: 1590 - DNA, 840 bp, Rattus norvegicus
  ref <308>: DATABASE ACCESSION NUMBER: Refseq / NM_022536
  ref <309>: DATABASE ENTRY DATE: 2003-01-13
gctgcgcctctcggagcgcaatatgaaggtgctcttcgccgccgccctcatcgtgggctccgttgtcttccttttgctgcctggaccctccgtggccaacgataagaagaagggacctaaagtcacagtcaaggtatactttgatttccaaattggagacgaacctgtaggacgagtgacctttggactctttggaaagactgttccaaaaacagtggataattttgtagccttagctacaggagagaaaggatttggctataagaacagcaagttccatcgtgtcatcaaggacttcatgatccagggtggagacttcaccaggggagatggcacaggaggaaagagcatctatggtgagcgcttcccagatgagaacttcaagctgaagcactatgggcccggatgggtgagcatggccaatgcaggcaaagacaccaatggctcccagttcttcataactacagtcaagacctcctggctagacggcaagcacgtggttttcggcaaagttctggaaggcatggatgtggtacggaaggtggagaacaccaagacggacagccgggacaagcccctgaaggatgtgatcattgtagactgtggcaagatcgaagtggagaaaccctttgccattgccaaggagtagagagagcctcggggacctcatccctctaaacagctgtctgtgcgggtcctgtcgattccctcacaggtgaaagcagccagtcacaaggctctgtgcggctctggctccagtgcttccatccgacggggtggccacacccctcacattccacaggcctgatttttatataaaactcctaccaatgctgatat

SEQ ID NO: 1591 - protein, 208 aa, Rattus norvegicus
  ref <308>: DATABASE ACCESSION NUMBER: Refseq / NP_071981
  ref <309>: DATABASE ENTRY DATE: 2003-01-13
MKVLFAAALIVGSVVFLLLPGPSVANDKKKGPKVTVKVYFDFQIGDEPVGRVTFGLFGKTVPKTVDNFVALATGEKGFGYKNSKFHRVIKDFMIQGGDFTRGDGTGGKSIYGERFPDENFKLKHYGPGWVSMANAGKDTNGSQFFITTVKTSWLDGKHVVFGKVLEGMDVVRKVENTKTDSRDKPLKDVIIVDCGKIEVEKPFAIAKE

SEQ ID NO: 1592 - DNA, 549 bp, Rattus norvegicus
  ref <308>: DATABASE ACCESSION NUMBER: EMBL / AA819547
  ref <309>: DATABASE ENTRY DATE: 2000-03-03
tttttttttttttttttaaagggttcaccagtgcaactttatcacgaccatcaaataatgggtttatttgtactctaagataattaaatattaacatgcaccttcccatcaggtgacctcatgggtcatggccaatatagaacttggacaagaaatcttttggccttggtgtttctgtttcatggaagaaccgcataatgtgtgtccgctgcttccacactttaatggtttcctggagctccatctttcccttaatgaccaggaggtcaaccactctggggtcggtgacatgggcattcttcatgaacatttctcggactttatcccgtccttgtttcaccgtgatatccagctgcattaagtgcacagtgtttggcacctcccggtaccaagcgcggtagagctcgcgcaccctccgcttggcctctttcaggtcccgactgaaaatgggcttcaccgaggtactggctgcagaagcagcctggcgcaggccgctggccgcggccgctagagtttttttttttttttttgtgttgttttttttttttt

SEQ ID NO: 1593 - DNA, 472 bp, Rattus norvegicus
  ref <308>: DATABASE ACCESSION NUMBER: EMBL / AA858588
  ref <309>: DATABASE ENTRY DATE: 2000-03-03
tttttttttttttttttccatttggctctttttattagagaaatcgagaagacagcgagtagggaaatccccatagtgaatggaaccatcacatagatgcctttctggaaccccaaccttctatgatccccaaaagtgtgcttgtgatttcagcaacttacaaaggggagaggaaatactgagaaaggccactatttaataatgaaggagtgaaggtgtctctaaactgggctccaaatctccgtggtggttgtcattgttacctccccttgtatcatcaagttggtgcccttttctgagccttatatctggctctggagtcctggtgcaccccaatcggtgttcggttggctcgttcatgggataccaaagccttccttacaaagtggtctttctttctgtcccttcttcttgggagaatggatttctaagggatggtgagttgaccctccttccgacccaggcaatctgt

SEQ ID NO: 1594 - DNA, 470 bp, Rattus norvegicus
  ref <308>: DATABASE ACCESSION NUMBER: EMBL / AA859520
  ref <309>: DATABASE ENTRY DATE: 2000-03-03
tttttttttttttttttctaaatggaaaaaaatatccctagtcagaaataaactgacaaatttacattctcctctcttaaaaaagtaaataaaataacattattcaaaatgtgaattagctataagacatacaatacaattacatagatacatatcaatacagcacattcaatctgccaaaacattaatgattaaaagccagtatggatgttgcaatatcaagagagatgtatgtacaacgatcagagcatttgtaattgcactgtacctacaggcagtctgttaattaaattacaggggctttctagagcaagggatagaaaagccggggagtaacacatgagaacacttgactacagtcagcagtttcagtgctcatacagtgagctgttccctctcccagctttgctattcaagaaaggtgatttacacggaagttgagattagtgccaagctctaatgagaccaga

SEQ ID NO: 1595 - DNA, 1700 bp, Homo sapiens
  ref <308>: DATABASE ACCESSION NUMBER: Refseq / NM_002072
  ref <309>: DATABASE ENTRY DATE: 2002-04-04
cggcggcccagactatccgctcccaccgcgcccccggcccacctggtggccccggcctggccgccgcccccgcgctgtgcccgggagctcgtcccggacgcgcgaccgggcggcgggggctcggcggccaccgctgcctcaagggagcgaggcgggagggtgtgtgtgcgcggctgtgagcaggggtgccggcgggctgcagcggaggcactttggaagaatgactctggagtccatcatggcgtgctgcctgagcgaggaggccaaggaagcccggcggatcaacgacgagatcgagcggcagctccgcagggacaagcgggacgcccgccgggagctcaagctgctgctgctcgggacaggagagagtggcaagagtacgtttatcaagcagatgagaatcatccatgggtcaggatactctgatgaagataaaaggggcttcaccaagctggtgtatcagaacatcttcacggccatgcaggccatgatcagagccatggacacactcaagatcccatacaagtatgagcacaataaggctcatgcacaattagttcgagaagttgatgtggagaaggtgtctgcttttgagaatccatatgtagatgcaataaagagtttatggaatgatcctggaatccaggaatgctatgatagacgacgagaatatcaattatctgactctaccaaatactatcttaatgacttggaccgcgtagctgaccctgcctacctgcctacgcaacaagatgtgcttagagttcgagtccccaccacagggatcatcgaatacccctttgacttacaaagtgtcattttcagaatggtcgatgtagggggccaaaggtcagagagaagaaaatggatacactgctttgaaaatgtcacctctatcatgtttctagtagcgcttagtgaatatgatcaagttctggtggagtcagacaatgagaaccgaatggaggaaagcaaggctctctttagaacaattatcacatacccctggttccagaactcctcggttattctgttcttaaacaagaaagatcttctagaggagaaaatcatgtattcccatctagtcgactacttcccagaatatgatggaccccagagagatgcccaggcagcccgagaattcattctgaagatgttcgtggacctgaacccagacagtgacaaaattaactactcccacttcacgtgcgccacagacaccgagaatatccgctttgtctttgctgccgtcaaggacaccatcctccagttgaacctgaaggagtacaatctggtctaattgtgcctgctagacacccgccctgcccttccctggtgggctattgaagatacacaagagggactgtatttctgtggaaaacaatttgcataatactaatttattgccgtcctggactctgtgtgagcgtgtccacagagtttgagtaaatattatgattttatttaaactattccagaggaaaaacagaggatgctgaagtacagtcccagcacatttcctctctatctttttttaggcaaaccttgtgactcagtgtattttaaattctcagtcatgcactcacaaagataagacttgtttctttctgtctctctctctttttcttttctatggagcaaaacaaagctgatttccctttttttcttcccccgctaattcatacctccctcctgatgtt

SEQ ID NO: 1596 - protein, 359 aa, Homo sapiens
  ref <308>: DATABASE ACCESSION NUMBER: Refseq / NP_002063
  ref <309>: DATABASE ENTRY DATE: 2002-04-04
MTLESIMACCLSEEAKEARRINDEIERQLRRDKRDARRELKLLLLGTGESGKSTFIKQMRIIHGSGYSDEDKRGFTKLVYQNIFTAMQAMIRAMDTLKIPYKYEHNKAHAQLVREVDVEKVSAFENPYVDAIKSLWNDPGIQECYDRRREYQLSDSTKYYLNDLDRVADPAYLPTQQDVLRVRVPTTGIIEYPFDLQSVIFRMVDVGGQRSERRKWIHCFENVTSIMFLVALSEYDQVLVESDNENRMEESKALFRTIITYPWFQNSSVILFLNKKDLLEEKIMYSHLVDYFPEYDGPQRDAQAAREFILKMFVDLNPDSDKINYSHFTCATDTENIRFVFAAVKDTILQLNLKEYNLV

SEQ ID NO: 1597 - DNA, 548 bp, Rattus norvegicus
  ref <308>: DATABASE ACCESSION NUMBER: EMBL / AA859536
  ref <309>: DATABASE ENTRY DATE: 2000-03-03
tttttttttttttttttactttttaattgtttaactttattactgtcgcaccatttatacaattacatataatttcaatgcatccattgtacattttttttattttttgttttttttttttattttccattttccaatgggtggtgtgttggtgtctgagacacaggtggaagaaactggagctgcaatgaaggcagacttttttatttttcatttccactgaccaataaacagaactacaggtgcacccaaccacggacatgcattaactcgtcatgagaaatctaggtaggctaagtatgatgagagaatgtttgtcactcccaaaaatatctggagaggaagaatgtagggttggcattgagatacaatgtggacaagctaagtgggctccgtctgaaagttggcattcatccacaaacgttaaaaaaataccaaaataagaaaaggctgtaaattaataaggaaacacagaaaatactgctttcataaagatctgattgccttggcactggccctgtgggcagaatcaaacgcctccctcccca

SEQ ID NO: 1598 - DNA, 1486 bp, Homo sapiens
  ref <308>: DATABASE ACCESSION NUMBER: Refseq / NM_006317
  ref <309>: DATABASE ENTRY DATE: 2002-11-05
gaattcggcacgagctcaggggctgcataggcacccagagccgaactccaagatgggaggcaagctcagcaagaagaagaagggctacaatgtgaacgacgagaaagccaaggagaaagacaagaaggccgagggcgcggcgacggaagaggaggggaccccgaaggagagtgagccccaggcgcccgcagagcccgccgaggccaaggagggcaaggagaagcccgaccaggacgccgagggcaaggccgaggagaaggagggcgagaaggacgcggcggctgccaaggaggaggccccgaaggcggagcccgagaagacggagggcgcggcagaggccaaggctgagcccccgaaggcgcccgagcaggagcaggcggcccccggcccgctgcggggcggcgaggcccccaaagctgctgaggccgccgccggcccccggccgagagcggcccctgccgccggggaggagcccagcaaggaggaaggggaacccaaaaagactgaggcgcccgcagctcctgccgcccaggagaccaaaagtgacggggccccagcttcagactcaaaacccggcagctcggaggctgccccctcttccaaggagacccccgcagccacggaagcgcctagttccacacccaaggcccagggccccgcagcctctgcagaagagcccaagccggtggaggccccggcagctaattccgaccaaaccgtaaccgtgaaagagtgacaaggacagcctataggaaaaacaataccacttaaaacaatctcctctctctctctctctctctctctatctctctctctatctcctctctctctctcctctcctatctctcctctctctctctcctatactaacttgtttcaaattggaagtaatgatatgtattgcccaaggaaaaatacaggatgttgtcccatcaagggagggagggggtgggagaatccaaatagtatttttgtggggaaatatctaatataccttcagtcaactttaccaagaagtcctggatttccaagatccgcgtctgaaagtgcagtacatcgtttgtacctgaaactgccgccacatgcactcctccaccgctgagagttgaatagcttttcttctgcaatgggagttgggagtgatgcgtttgattctgcccacagggcctgtgccaaggcaatcagatctttatgagagcagtattttctgtgttttctttttaatttacagcctttcttattttgatatttttttaatgttgtggatgaatgccagctttcagacagagcccacttagcttgtccacatggatctcaatgccaatcctccattcttcctctccagatatttttgggagtgacaaacattctctcatcctacttagcctacctagatttctcatgacgagttaatgcatgtccgtggttgggtgcacctgtagttctgtttattggtcagtggaaatgaaaaaaaaaaaaaaaaaaa

SEQ ID NO: 1599 - protein, 227 aa, Homo sapiens
  ref <308>: DATABASE ACCESSION NUMBER: Refseq / NP_006308
  ref <309>: DATABASE ENTRY DATE: 2002-11-05
MGGKLSKKKKGYNVNDEKAKEKDKKAEGAATEEEGTPKESEPQAPAEPAEAKEGKEKPDQDAEGKAEEKEGEKDAAAAKEEAPKAEPEKTEGAAEAKAEPPKAPEQEQAAPGPLRGGEAPKAAEAAAGPRPRAAPAAGEEPSKEEGEPKKTEAPAAPAAQETKSDGAPASDSKPGSSEAAPSSKETPAATEAPSSTPKAQGPAASAEEPKPVEAPAANSDQTVTVKE

SEQ ID NO: 1600 - DNA, 409 bp, Rattus norvegicus
  ref <308>: DATABASE ACCESSION NUMBER: EMBL / AA859877
  ref <309>: DATABASE ENTRY DATE: 2000-03-03
ttagcccagtgcgcatccccagcccttcacgttcatggggtctaagctaggcttcccctagctcccaagaataactgtcaatcctctgtcctgactgctccctcctgccacactcatgccctcaggctctctgggagagctgggtagtttcttcctaaagtttgcacttcctttgtgaggatctgaggatctttggagctgctgaaaagatggtgttgagtttgttattctgttgtctcacgagtcagattcttgtccctgtcctgtttctgtgggtagagctgcttctggagggtggctcagagtgacaactattgtgtctccctaccccactggttctgcttccaaacactgtctctaatttgtgttcttgcatgtaaagtactccacaataaatagttgaaccagc

SEQ ID NO: 1601 - DNA, 946 bp, Rattus norvegicus
  misc_feature (1)..(946): n=a, c, g or t
  ref <308>: DATABASE ACCESSION NUMBER: Refseq / NM_022398
  ref <309>: DATABASE ENTRY DATE: 2003-01-13
atggcggcgacggcgagtcccggggctggccggatggacgggaaaccccgtacctcccctaagtctgtcaagttcctgtttgggggcctggctgggatgggcgctaccgtttttgtgcagcccctggacctggtgaanaaccggatgcagttgagtggtgagggcgctaagactcgagagtacaaaaccagtttccatgccctcactagcatcctgaaggcagaagggctgaggggcatttacactgggttgtcagccggcctactgcgccaggccacctacaccactacacgtcttggtatatatacagtgttgtttgagcgcctgactggggctgacggtacaccccctggctttctcctgaaagccctgattggcatgactgcaggtgcaactggtgcatttgtgggaccaccagctgaggtggccctcatcaggatgactgctgatggccggcttccagctgaccagcgccgtggctacaaaaatgtgtttaatgccctaattagaattgcaagggaagaaggagtccccacactgtggcggggctgcatccctaccatggctcgagctgttgtcgtcaatgctgcccaacttgcttcttactcccaatccaagcaattcttgctggactcaggctacttctctgacaacattctgtgccacttctgcgccatcatgatcagtggcctggtcaccactgctgcttccatgcctgtggatattgtcaaaactaggatccaaaatatgcgaatgattgatgagaagccagagtacaagaatgggctggatgtattgctgaaagtcgtccgctatgagggtttcttcagcctgtggaagggcttcacaccatactatgcccgactgggcccccacactgtcctcaccttcatcttcttggaacagatgaacaaggcctacaagcgtctcttcctcagtggctgag

SEQ ID NO: 1602 - protein, 314 aa, Rattus norvegicus
  misc_feature (1)..(314): Xaa=Unknown amino acid
  ref <308>: DATABASE ACCESSION NUMBER: Refseq / NP_071793
  ref <309>: DATABASE ENTRY DATE: 2003-01-13
MAATASPGAGRMDGKPRTSPKSVKFLFGGLAGMGATVFVQPLDLVXNRMQLSGEGAKTREYKTSFHALTSILKAEGLRGIYTGLSAGLLRQATYTTTRLGIYTVLFERLTGADGTPPGFLLKALIGMTAGATGAFVGPPAEVALIRMTADGRLPADQRRGYKNVFNALIRIAREEGVPTLWRGCIPTMARAVVVNAAQLASYSQSKQFLLDSGYFSDNILCHFCAIMISGLVTTAASMPVDIVKTRIQNMRMIDEKPEYKNGLDVLLKVVRYEGFFSLWKGFTPYYARLGPHTVLTFIFLEQMNKAYKRLFLSG

SEQ ID NO: 1603 - DNA, 1570 bp, Homo sapiens
  ref <308>: DATABASE ACCESSION NUMBER: Refseq / NM_003562
  ref <309>: DATABASE ENTRY DATE: 2002-11-05
ggcacgagggagagctggaggggcgtgcgcgcgccctcgctctgttgcgcgcgcggtgtcaccttgggcgcgagcggggccgcgcgcgcacgggacccggagccgagggccattgagtggcgatggcggcgacggcgagtgccggggccggcgggatagacgggaagccccgtacctcccctaagtccgtcaagttcctgtttgggggcctggccgggatgggagctacagtttttgtccagcccctggacctggtgaagaaccggatgcagttgagcggggaaggggccaagactcgagagtacaaaaccagcttccatgccctcaccagtatcctgaaggcagaaggcctgaggggcatttacactgggctgtcggctggcctgctgcgtcaggccacctacaccactacccgccttggcatctataccgtgctgtttgagcgcctgactggggctgatggtactccccctggctttctgctgaaggctgtgattggcatgaccgcaggtgccactggtgcctttgtgggaacaccagccgaagtggctcttatccgcatgactgccgatggccggcttccagctgaccagcgccgtggctacaaaaatgtgtttaacgccctgattcgaatcacccgggaagagggtgtcctcacactgtggcggggctgcatccctaccatggctcgggccgtcgtcgtcaatgctgcccagctcgcctcctactcccaatccaagcagttcttactggactcaggctacttctctgacaacatcttgtgccacttctgtgccagcatgatcagcggtcttgtcaccactgctgcctccatgcctgtggacattgccaagacccgaatccagaacatgcggatgattgatgggaagccggaatacaagaacgggctggacgtgctgttcaaagttgtccgctacgagggcttcttcagcctgtggaagggcttcacgccgtactatgcccgcctgggcccccacaccgtcctcaccttcatcttcttggagcagatgaacaaggcctacaagcgtctcttcctcagtggctgaagcggccgggggctcccactcgcctgctgcgcctatagccactgcgccctgggggcctgggctctgctgccctggacccctctatttatttcccttccacagtgtggtttcttcctctgcggtaaaggacttggtctgttctaccccctgctccagcttgccctgctcgtcctgatcctgtgatttctctgtccttggctattcttgcagggagctggaaaacttcctgaggatttctggcctccccctgggttttagtttcagggcacacaggacagcagaagatcccctttgtcagtggggaaaccaaggcagagctgaggggacagggaggagcagaagccatcaagatggtcaaagggcctgcagagggagatgtggcccttcctccccctcattgaggacttaataaattggattgatgacaccagcaaaaaaaaaaaaaaaaaaaaaaaaaaaaaaaaaaaaaaaaaaaaaaaaaaaaaaaaaaaaaaaaaaaaaaa

SEQ ID NO: 1604 - protein, 314 aa, Homo sapiens
  ref <308>: DATABASE ACCESSION NUMBER: Refseq / NP_003553
  ref <309>: DATABASE ENTRY DATE: 2002-11-05
MAATASAGAGGIDGKPRTSPKSVKFLFGGLAGMGATVFVQPLDLVKNRMQLSGEGAKTREYKTSFHALTSILKAEGLRGIYTGLSAGLLRQATYTTTRLGIYTVLFERLTGADGTPPGFLLKAVIGMTAGATGAFVGTPAEVALIRMTADGRLPADQRRGYKNVFNALIRITREEGVLTLWRGCIPTMARAVVVNAAQLASYSQSKQFLLDSGYFSDNILCHFCASMISGLVTTAASMPVDIAKTRIQNMRMIDGKPEYKNGLDVLFKVVRYEGFFSLWKGFTPYYARLGPHTVLTFIFLEQMNKAYKRLFLSG

SEQ ID NO: 1605 - DNA, 360 bp, Rattus norvegicus
  ref <308>: DATABASE ACCESSION NUMBER: EMBL / AA874848
  ref <309>: DATABASE ENTRY DATE: 2000-03-03
ggagccagaactgtgactccaggatctaaatcagtgcaggaaaggaggttccaagaaccaaccagttggacccaacttgttaatggagattttttgttctttcccttgcccgtctttgccagcccctcttgctgtccatgattccccagacaaccagagtcttgcaacttgccccttacaggacctcgtagtatcaggggcaggtctagtgtgcacactttttggaagatagttttaccaagcattttcttccccacgggcagctgtacctttcccatcaccatgtgtaataccaccacagcttacggcacttcaccaaggaagagaattgcacaataaaacaaagcctctggagtctgt

SEQ ID NO: 1606 - DNA, 470 bp, Rattus norvegicus
  ref <308>: DATABASE ACCESSION NUMBER: EMBL / AA874969
  ref <309>: DATABASE ENTRY DATE: 2000-03-03
atcctgaggttgacacagccccagctgggtgtcctttgggatctcattttgtcatagggccctcgtatgtgggccccagattgtccttttggacctcagtcccttcttgctttccaacactaatcaagcctctggggccaggccttcctggggagggcctccactcctccagggcattgtcctagccacaggccctcctcgagatgtggagggtggagggggcgctgtgcccctagctcagtgtatatgtgtgtaaaggaatgggattttaatggcgcctaccccacgttatcactgtgtgatagtctgtcagtctccttgctccacactttggcctctatttatttcactctttatttgggtcccaccttatgcccttggttcccctttcaggttcctgtttataagccccttcctttttgtcccaacttgtatgtgaaaaaaaactgtctcaataaaccctttggagt

SEQ ID NO: 1607 - DNA, 499 bp, Rattus norvegicus
  ref <308>: DATABASE ACCESSION NUMBER: EMBL / AA874999
  ref <309>: DATABASE ENTRY DATE: 2000-03-03
tttcatcttcatatctcttgtgcctactgttcttagacatcagcatgccgggtccaacgcctagtgccaccaacgtgggctcctctgggcgttctcctagcaaagcagtggccgcacgggcggcgggatccactgtccggcagagaaaaaatgccagctgcggaacccggagtgcaggccgcaccacctctgcagggactggggggatgtggcgattctacacagaagattccccagggctcaaagttggccctgtcccagtactggtgatgagtcttctgttcatcgcttctgtgtttatgctgcacatttggggcaagtacacgcgttcatagattttggctgcatctatccatcatctgaagaagaaggaaaaacccaacatatcttggaccaaaagtatagtgatttctgttcatgtgtattattttacagagaataagaattgactttgagaaatcagttttttctatggcaataaactttggaattgctttat

SEQ ID NO: 1608 - DNA, 583 bp, Homo sapiens
  ref <308>: DATABASE ACCESSION NUMBER: Refseq / NM_006808
  ref <309>: DATABASE ENTRY DATE: 2001-07-03
gccagctgccggtctttcgggggctccgtaactttctatccgtccgcgtcagcgccttgccaccctcatctccaatatgcctggtccgacccccagtggcactaacgtgggatcctcagggcgctctcccagcaaagcagtggccgcccgggcggcgggatccactgtccggcagaggaaaaatgccagctgtgggacaaggagtgcaggccgcacaacctcggcaggcaccggggggatgtggcgattctacacagaagattcacctgggctcaaagttggccctgttccagtattggttatgagtcttctgttcatcgcttctgtatttatgttgcacatttggggcaagtacactcgttcgtagattcagttacatccatctgtcatctgaagaaggaggaaaaaacccaacatttcttggaccaaaagtatagtgactatctgttcatgagagaaattttctgtaagcttgctgttttacaggggatttatcaataattgattttgaggaatcagtttttttctatggctaataaactttttaattcacttatactgaaaaaaaaaaaaaaaaaaaaaa

SEQ ID NO: 1609 - protein, 96 aa, Homo sapiens
  ref <308>: DATABASE ACCESSION NUMBER: Refseq / NP_006799
  ref <309>: DATABASE ENTRY DATE: 2001-07-03
MPGPTPSGTNVGSSGRSPSKAVAARAAGSTVRQRKNASCGTRSAGRTTSAGTGGMWRFYTEDSPGLKVGPVPVLVMSLLFIASVFMLHIWGKYTRS

SEQ ID NO: 1610 - DNA, 452 bp, Rattus norvegicus
  misc_feature (1)..(452): n=a, c, g or t
  ref <308>: DATABASE ACCESSION NUMBER: EMBL / AA875102
  ref <309>: DATABASE ENTRY DATE: 2000-03-03
agaattcggcacgaggaaaggtttttttttttttnttttgtgacttccaccatggcgtaccgcggccagggccagaaggtgcagaaggtgatggtgcagcccatcaaccttatcttcagatacttgcaaaatagatctcgaattcaggtgtggctgtatgaacaagtgaatatgcggatagagggttgtattattggctttgatgagtacatgaacctcgtattagatgatgcagaagaaattcattctaaaacaaagtcaagaaaacaactgggtcggatcatgctcaaaggagataatattactctgctccaaagcgtttccaactagcagtggccaagcatgggagaggttgagaaggggctcaggggctgctggtgactacatttactcatcctgtttcacttgtacattctcattggggtaaaaataaatgtgagcttgtttttgtt

SEQ ID NO: 1611 - DNA, 410 bp, Rattus norvegicus
  ref <308>: DATABASE ACCESSION NUMBER: EMBL / AA875390
  ref <309>: DATABASE ENTRY DATE: 2000-03-03
aaggggatattacagtttgctgccacaataaaatcacattgcatgtgaaaaagattcaaggttaaaaattaatacaaggacaaaaggacaaaagtctttttgaacttactacgttagtatctattttaaactgaatcattaagttatacataattgtactttttatttttgtttttctaggtagttggcaaaaagggggaaagccattagggtacaaaagacactggaagactactgcagtcagatttgcagctcctggataattgcttgattctcttcggaaactgttaatcttttatttgttgccagtaccaataaatcattgcttttgttcagatggtaatactagtgtttctattgtaatcttgatacatgcagttgtaaataaaagtcattactttgccaagctt

SEQ ID NO: 1612 - DNA, 554 bp, Rattus norvegicus
  ref <308>: DATABASE ACCESSION NUMBER: Refseq / NM_013102
  ref <309>: DATABASE ENTRY DATE: 2003-01-14
gccgccgccgccgccgccgccgccatgggagtgcaggtggagaccatctcttctggagacgggcgcaccttcccgaagcgcggccagacctgcgtggtacactacacggggatgcttgaagatgggaagaaatttgactcctctcgggacagaaacaagccttttaagtttacactaggcaagcaggaggtgatccgaggctgggaagaaggggtagcccagatgagtgtgggccagagagccaaactgataatctccccagactatgcctatggagccaccgggcacacaggcatcatcccaccacatgctactcttgtttttgatgtggagcttctaaaactggaatgacagaagtggcctcctcccttagctctgcacatggatctgccatggaggaatctggtacctccagatgggtgcacatgaatccatgggagcttttcctgatgtcccaccactctttgtatagacacctactaactgaatgtgttccgtcactcagctttgcttcggacacctccatgtcctcttcccccttctgtatgtgtgtt

SEQ ID NO: 1613 - protein, 108 aa, Rattus norvegicus
  ref <308>: DATABASE ACCESSION NUMBER: Refseq / NP_037234
  ref <309>: DATABASE ENTRY DATE: 2003-01-14
MGVQVETISSGDGRTFPKRGQTCVVHYTGMLEDGKKFDSSRDRNKPFKFTLGKQEVIRGWEEGVAQMSVGQRAKLIISPDYAYGATGHTGIIPPHATLVFDVELLKLE

SEQ ID NO: 1614 - DNA, 607 bp, Rattus norvegicus
  ref <308>: DATABASE ACCESSION NUMBER: EMBL / AA891226
  ref <309>: DATABASE ENTRY DATE: 2000-03-03
cgggccacggcaggtgcctacattgcttcccagacagtgaagaaagtgatagagatcaacccttacgttctgggcaccatggctgggggtgcagcggattgcagcttctgggagcggttgttggctcgacagtgtcgaatctatgagcttcgcaacaaggaacgcatctcggtcgcggcggcttccaaactgcttgccaacatggtgtatcagtacaaaggcatggggctgtccatgggcaccatgatctgtggctgggataagagaggcccgggcctctactatgtagacagtgaggggaacaggatctctggaaccgccttctcagtgggatctggctccgtgtatgcgtttggagtcatggatcgaggctactcctatgacctacaagtggaggaggcctatgacctggcccgccgagccatctaccaagccacctacagagatgcctactccggaggagcagtcaacctctaccatgtgcgggaggatggctggatccgtgtctccagtgacaatgtagctgacttacatgacaagtatacttcatctatcccctgagggaaggtggagtgccctggttataataaataatagtacccgttcc

SEQ ID NO: 1615 - DNA, 1050 bp, Homo sapiens
  ref <308>: DATABASE ACCESSION NUMBER: Refseq / NM_002797
  ref <309>: DATABASE ENTRY DATE: 2003-01-15
ctttctgcccacactagacatggcgcttgccagcgtgttggagagaccgctaccggtgaaccagcgcgggtttttcggacttgggggtcgtgcagatctgctggatctaggtccagggagtctcagtgatggtctgagcctggccgcgccaggctggggtgtcccagaagagccaggaatcgaaatgcttcatggaacaaccaccctggccttcaagttccgccatggagtcatagttgcagctgactccagggctacagcgggtgcttacattgcctcccagacggtgaagaaggtgatagagatcaacccatacctgctaggcaccatggctgggggcgcagcggattgcagcttctgggaacggctgttggctcggcaatgtcgaatctatgagcttcgaaataaggaacgcatctctgtagcagctgcctccaaactgcttgccaacatggtgtatcagtacaaaggcatggggctgtccatgggcaccatgatctgtggctgggataagagaggccctggcctctactacgtggacagtgaagggaaccggatttcaggggccaccttctctgtaggttctggctctgtgtatgcatatggggtcatggatcggggctattcctatgacctggaagtggagcaggcctatgatctggcccgtcgagccatctaccaagccacctacagagatgcctactcaggaggtgcagtcaacctctaccacgtgcgggaggatggctggatccgagtctccagtgacaatgtggctgatctacatgagaagtatagtggctctaccccctgaaagagggtggatgcagctgcttgtgtttcttggggtgactgtcattggtaatacggacacagtgacccatcctccatcctatttatagtggaagggccttcaattgtatcagtacttttttttaagctctggcacattgacctctatgtgttaccagtcattaatgagctgctgcagaggtgactatttgttttactttcttggatgttaaacattacactactcactactcaatctca

SEQ ID NO: 1616 - protein, 263 aa, Homo sapiens
  ref <308>: DATABASE ACCESSION NUMBER: Refseq / NP_002788
  ref <309>: DATABASE ENTRY DATE: 2003-01-15
MALASVLERPLPVNQRGFFGLGGRADLLDLGPGSLSDGLSLAAPGWGVPEEPGIEMLHGTTTLAFKFRHGVIVAADSRATAGAYIASQTVKKVIEINPYLLGTMAGGAADCSFWERLLARQCRIYELRNKERISVAAASKLLANMVYQYKGMGLSMGTMICGWDKRGPGLYYVDSEGNRISGATFSVGSGSVYAYGVMDRGYSYDLEVEQAYDLARRAIYQATYRDAYSGGAVNLYHVREDGWIRVSSDNVADLHEKYSGSTP

SEQ ID NO: 1617 - DNA, 533 bp, Rattus norvegicus
  ref <308>: DATABASE ACCESSION NUMBER: EMBL / AA891681
  ref <309>: DATABASE ENTRY DATE: 2000-03-03
gcggaagtcccagttgttctgaaaaccgctgtccgcagtcagacatctgcttggttgtacaaatacccacatgactgtgaaactgggttaatcattaatttgaagtagtttatgatgtatcagactttatcacattgaaatttgggtcattcaaaaagtcaacctttaatacattggatcagttgaataaatttgtagtttattattttataatatgaagagattaaattagtaatttggaaataaagatgaacagcttgcattaatttgctttcttctaatttgtcttttgagtgacctttaatactttgattagaaaaaagctttggctggtttgtgacaaccagaaggcggcactacaagcagcggctggggagccagggggacgcctgtcacagacgctgatgagcctcaggcagtggtgttcctgtgtccatgtttaacatgcttggttctctgctctgtagcagtactgttaatgtatcaagattagactgagagtctgaccctaaataaagttgaatgcatctttt

SEQ ID NO: 1618 - DNA, 540 bp, Rattus norvegicus
  ref <308>: DATABASE ACCESSION NUMBER: EMBL / AA891881
  ref <309>: DATABASE ENTRY DATE: 2000-03-03
tctcttgtttccccgagttaggtcaggattccctccttagctaatattctcaagggacatcacactttgaacaaagtttctgtaagtgacacatttctgtgcatccttcctcttacctctgacaatgtgctgaaaatgaaaacccttttgactatcataaggcccttgtctgtttcattccttactccctcactgatgctaaatgtacacttgatatcaaactgtcagcctaccaaaaagacgccgtggcttatgggtattgctgtcttgttcttggaatgtactcgtactgatcgccccttggtctgaaagaaaatagatgattatcttttcccattgaccgtttttcttttccttctgcttgttgtaagaatcaactgaaacagtgtatgtaaaggcaccttgtaaactgtaagctttcgatgtaagatgtaaggtgtgttacttcattaattagttcttcgtttagagtgcaatttcctatgcgctactatagctaggaaatgctaaaaacgtgttttttaatccatcagtaaccgc

SEQ ID NO: 1619 - DNA, 1203 bp, Rattus norvegicus
  ref <308>: DATABASE ACCESSION NUMBER: Refseq / NM_032615
  ref <309>: DATABASE ENTRY DATE: 2002-11-05
aggtccggggctccggtccgtgccggtgcaggcgccggcatgtggctgtgggaggaccagggcggcctcctgggccccttctctttcgtgctggtgctgctgctggtggtgacgcgcagccccttcaacgcctgtgtgctcactggcagcctctacctcctgctgcggttcttcagcttcgagccggtgccgtcccgccgggccctgcaggtgctcaagccccgtgaccgcgtgtccgccatcgcccatcgcggcggcagccacgacgcgcccgagaacacgctggcggccatccggcaggcagctaagaatggagcaacaggtgtggagctggacatcgagtttacttctgatggagttcctgtcttgatgcacgataacacagtagataggacaacagacgggtctggccgattatgtgatctgacatttgaacaagttaggaaacttaatcctgcagcaaatcacagactcagaaatgagttccctgacgaaaggatccccaccctgagggaagcagttacagagtgcctctgccataacctcaccatcttcttcgatgtcaaaggccatgcagatatggcttctgctgctctaaagaatatatacatggaatttccccagctgtacaacaacagtatggtctgctcattcttgccggaagtcatctataaaatgagacaaacagatcagaaggtaatcacagccctgactcacaggccttggagcctgagccacactggagacgggaagcctcgctacagcgtcttttggaagcagtctgtgtttgtggtgttggacatcttgcttgactggagcatgcacaatgtcttgtggtacctgtgtgggatttcagccttcctcatgcagaaggattttgtctccccggactatttgaagaagtggtcagccaaaggaatccaggttgttagttggactgtcaatacctttgatgaaaagaattactacgagtcccaccttgggtccagctacatcactgacagcatgctggaaaactgtgcacctcacttctagactccccaggaggaaacacagatgcaaaactgcctggaggccttttgcagggacacgagaacactctgttagcacaagccctgggaatcctgcggctcatactagcaatagccacagttttaccccaagcagaaaccaggcatggcgaccatgctccaaggaaggctc

SEQ ID NO: 1620 - protein, 331 aa, Rattus norvegicus
  ref <308>: DATABASE ACCESSION NUMBER: Refseq / NP_116004
  ref <309>: DATABASE ENTRY DATE: 2002-11-05
MWLWEDQGGLLGPFSFVLVLLLVVTRSPFNACVLTGSLYLLLRFFSFEPVPSRRALQVLKPRDRVSAIAHRGGSHDAPENTLAAIRQAAKNGATGVELDIEFTSDGVPVLMHDNTVDRTTDGSGRLCDLTFEQVRKLNPAANHRLRNEFPDERIPTLREAVTECLCHNLTIFFDVKGHADMASAALKNIYMEFPQLYNNSMVCSFLPEVIYKMRQTDQKVITALTHRPWSLSHTGDGKPRYSVFWKQSVFVVLDILLDWSMHNVLWYLCGISAFLMQKDFVSPDYLKKWSAKGIQVVSWTVNTFDEKNYYESHLGSSYITDSMLENCAPHF

SEQ ID NO: 1621 - DNA, 1414 bp, Rattus norvegicus
  ref <308>: DATABASE ACCESSION NUMBER: Refseq / NM_053576
  ref <309>: DATABASE ENTRY DATE: 2003-02-14
gcgcctccttgttcccagcgtcaccactgccgccatgcccggagggctgcttctcggggacgaagcccccaactttgaggccaataccaccatcggccacatccgcttccacgatttcctaggagattcatggggcattctcttttcccacccacgggactttaccccagtgtgcaccacagaacttggcagagctgcaaagctggcgccagagtttgccaagaggaatgttaagttgattgctctttcaatagactctgttgaggaccattttgcctggagcaaggacatcaatgcttacaatggtgcagcacccacagaaaagctaccatttcccatcatcgacgataaggacagggaccttgccatcctgttgggcatgttggatccagcagagaaggatgaaaaaggcatgcccgtgacagcccgtgtggtattcatttttggccctgacaagaaactaaaactgtccatcctctacccagccaccacgggcagaaactttgatgagattctcagagtggttgactccctccagctgacagcatcaaatccagttgccactccagttgactggaagaagggagagagtgtgatggtccttcccaccctccctgaagaggaagccaaacaacttttccctaaaggagtcttcaccaaagagctcccatctggcaagaaatacctccgttatacgccccagccttaagtctgcgggaactggggctgcaactgctcgaccagcactgggacctgaggatgacagctgacagctgcagttccgtagaaagattgtggcgtggtcacagccgaagtcgcgtaggtcgctcgctatactactggctcattaaatggaaatggcaccaaaacattctcgggattctttactctgtgccttcgccagcattctgcccctccatccatcacagcgccctgctgactggctttctttgaaacgaattatgtgttggtgactgcagggtctctgcagggtctgtgatcagcaaggtagtgtcagtgtgggctccatgctagaatgataaacatcttttgtaggtttccaaactgaatcttctgttacccattgtggagaaccataaagtggggagaaactttcaattctgtactttcagtaaataaagcaggggaggtggggggggggggagagttctctataggaaatccatggtgagtttctatcaaagtgggcttccaagaatgtgtggaagacagcacatgtacttcctggagtttccaggtctgctctctagtgatctgtgaatgtgaactcgccttatgaaagacaggcagtgacattgtttgccactaaatgtcctaaaggagtgggttgccatttctaaattctgctgtgtgaggttcaacaataaaatcctgattagaaaaaaaaaaaaaa

SEQ ID NO: 1622 - protein, 224 aa, Rattus norvegicus
  ref <308>: DATABASE ACCESSION NUMBER: Refseq / NP_446028
  ref <309>: DATABASE ENTRY DATE: 2003-02-14
MPGGLLLGDEAPNFEANTTIGHIRFHDFLGDSWGILFSHPRDFTPVCTTELGRAAKLAPEFAKRNVKLIALSIDSVEDHFAWSKDINAYNGAAPTEKLPFPIIDDKDRDLAILLGMLDPAEKDEKGMPVTARVVFIFGPDKKLKLSILYPATTGRNFDEILRVVDSLQLTASNPVATPVDWKKGESVMVLPTLPEEEAKQLFPKGVFTKELPSGKKYLRYTPQP

SEQ ID NO: 1623 - DNA, 1653 bp, Homo sapiens
  ref <308>: DATABASE ACCESSION NUMBER: Refseq / NM_004905
  ref <309>: DATABASE ENTRY DATE: 2003-02-25
cggttgcttgctgtcccagcggcgccccctcatcaccgtcgccatgcccggaggtctgcttctcggggacgtggctcccaactttgaggccaataccaccgtcggccgcatccgtttccacgactttctgggagactcatggggcattctcttctcccaccctcgggactttaccccagtgtgcaccacagagcttggcagagctgcaaagctggcaccagaatttgccaagaggaatgttaagttgattgccctttcaatagacagtgttgaggaccatcttgcctggagcaaggatatcaatgcttacaattgtgaagagcccacagaaaagttaccttttcccatcatcgatgataggaatcgggagcttgccatcctgttgggcatgctggatccagcagagaaggatgaaaagggcatgcctgtgacagctcgtgtggtgtttgtttttggtcctgataagaagctgaagctgtctatcctctacccagctaccactggcaggaactttgatgagattctcagggtagtcatctctctccagctgacagcagaaaaaagggttgccaccccagttgattggaaggatggggatagtgtgatggtccttccaaccatccctgaagaagaagccaaaaaacttttcccgaaaggagtcttcaccaaagagctcccatctggcaagaaatacctccgctacacaccccagccttaagtctcttggagaagttggtgctgtgagccagaggatgtcagctgccaattgtgttttcctgcagcaattccataaacacatcctggtgtcatcacagccaaggtttttaggttgctataccaatggcttattaaatgaaaatggcactaaaagtttcttgagattctttatactctctgccttcagcaatcaattccattcatacatcagcactctgctggttctgtttgaaatatgttctgtatttaaaactcaaatcttgttggatctctgcagggcttgtgaccaatgaagtcatatttgttgatggttgacaaagcttgcttcactccatcagagaatgactatcaatttttttttaactgtcctatcacgtcctctcctgtcacccattttgaagagtggcagaacttgaagttcaacttcctctgtaaatatccaagtataaagcccaggaacttctagaataacccagatgcgctttaattttttttaatatgttttgatcacagaacttctagaataacccagatgctctttcatattcttttaatacatcttgatcacagctgggggaaaaaaagctttttaattctgtaccttcctagtagataagtgaagagcagggaaagagacctttaaatattttgctataaaaaaatttgtgataagtttctatcaaaatggggagattgcagaaaaggcttcccttggctcccaaggaggtgtagcaggtgtgagcaatattagtgccatgtgcctttcacacagggtttgcatttatcagtctgttttccgatgatgtgtacatgaaagagtacaccatgtgaagagaagagagaatgattgaaaatgttttagtatagaactcttcttgcagtgggttgctattttctagattttactttttagggaacaaaataaaatcctttgtt

SEQ ID NO: 1624 - protein, 224 aa, Homo sapiens
  ref <308>: DATABASE ACCESSION NUMBER: Refseq / NP_004896
  ref <309>: DATABASE ENTRY DATE: 2003-02-25
MPGGLLLGDVAPNFEANTTVGRIRFHDFLGDSWGILFSHPRDFTPVCTTELGRAAKLAPEFAKRNVKLIALSIDSVEDHLAWSKDINAYNCEEPTEKLPFPIIDDRNRELAILLGMLDPAEKDEKGMPVTARVVFVFGPDKKLKLSILYPATTGRNFDEILRVVISLQLTAEKRVATPVDWKDGDSVMVLPTIPEEEAKKLFPKGVFTKELPSGKKYLRYTPQP

SEQ ID NO: 1625 - DNA, 632 bp, Rattus norvegicus
  ref <308>: DATABASE ACCESSION NUMBER: EMBL / AA892234
  ref <309>: DATABASE ENTRY DATE: 1999-01-28
cgtcaaggtgagccagagccaagatggctgtcctctctaaggaatatggattcgtgcttctcactggtgccgccagctttgtgatggtgctccacttagccatcaacgtgggcaaagcccgcaagaagtacaaggtagagtaccctgtcatgtacagcacagatcctgagaatgggcatatgttcaactgcattcagcgcgcccaccagaacacgttggaggtgtaccctcccttcctattcttcctaaccgtgggaggtgtttaccacccgcgcatagcttctggcctgggcgtggcgtggattattgggcgagttctttacgcatatggctactacacgggagaccctagcaagcggtatcgaggagctgtgagctctcttgccctctttgccctgatgggcacaactgtgtgctctgctttccagcatctcggctggattaaacccggcctaggcagtgggtccagatcctgccactgaggaacgggaggcctttcacctctcagtcgccttcaacgacccgcccttacttccagctccactgttttttaaatataataaaaacttatctggcgtcagcctcgtacctaaaaaaaaaaaaaaaaaaaaaaaaaaaaattttggcggccg

SEQ ID NO: 1626 - DNA, 591 bp, Rattus norvegicus
  ref <308>: DATABASE ACCESSION NUMBER: EMBL / AA892313
  ref <309>: DATABASE ENTRY DATE: 1999-01-28
tgctgagcttgattatcgaaaagcctttggaaaagaatggagaaaggctggtggacacccagatccagacagaaacaggccaagtgcagagtttctctcggcccatccaagataccagcttctctgctgcagtacgtccaggtaaatatggtgcacctgaagatgaggagctcaaaacacagcagccattcatgctaaaaaatcagctactaacactgaagataaaatgctcaaatcaacctgaacaacaaatattagaaaagcagttgccagactccatgacaattcaaaaggtaaagggactgctgtcacgtcttctcaaggttcctgtgtcagaacttctgttgtcctacgaaagttccaagatgccgggcagagaaatcgaactagaaaatgacctgcagccattacagttttattctgtggagaatggagactgcctactggtgcgctggtagcaggccaaccgtgagagttaaggctggaatgtgtacaccagaaacagaacctctgccctcacaaatgatgttgttttgttgggaaaagaccattcggttgtttattaatagaataataaaggctttgattact

SEQ ID NO: 1627 - DNA, 1882 bp, Homo sapiens
  ref <308>: DATABASE ACCESSION NUMBER: Refseq / NM_003193
  ref <309>: DATABASE ENTRY DATE: 2001-12-18
gttggctggaggggctgctgctgggaacacctggagtctccgcgggcagatctcatattttggattctggatatattataatgagtgacactttgacagcggatgtcattggtcgaagagttgaagttaatggagaacatgcaacagtacgttttgctggtgttgtccctcccgtggcaggaccctggttaggagtagaatgggacaatcccgagagaggaaagcatgatgggagccacgaagggactgtgtattttaaatgcaggcacccgacaggaggatcctttattcgtccgaacaaggtaaattttggaacagactttcttactgcaattaagaaccgctatgtgttagaagatggaccagaggaagatagaaaagagcaaattgttacaattggaaataaacctgtggagactatcggttttgactctattatgaaacagcaaagtcagctgagcaagttgcaagaagtttctctgaggaactgtgcagtaagttgtgctggtgaaaaaggaggagttgctgaagcatgtcctaatatcagaaaggtagatttgtcaaaaaacctgttgtcatcatgggatgaagtgatacacattgctgatcagctcagacacctggaagtccttaatgtcagtgaaaataaactaaaatttccctccggttcagtattaactggaacgctttctgtactgaaggttttagtcctcaatcaaacaggaataacgtgggctgaggtgctgcggtgtgtcgcggggtgcccaggcctggaggaactctaccttgagtctaacaacattttcatttccgaaaggccaacagatgttctccagacagtcaagttattagatctttcctctaatcaattaattgatgaaaatcagctgtatctgatagcccacctgcccaggttagaacaattaatcctctctgacactggaatttcttctctacattttccggatgctggaattgggtgcaaaacgtccatgttcccatccttgaagtacctggtagtaaacgacaatcagatatcacaatggtcgtttttcaatgagctagagaagttaccaagtctacgggctttgtcctgcctaagaaaccccctgaccaaagaggacaaagaagcagagacggcgcgactactcattatcgccagcattggccagctgaagacgctgaacaaatgtgagattctccccgaggagaggcggagagctgagcttgactaccgaaaagcttttggaaatgagtggaaacaggctggtggacataaggatccggaaaaaaacagactcagcgaagaattcctcacagcccatcccagataccagttcctctgcctgaaatatggtgcacctgaagattgggaactcaaaacacagcaaccacttatgctgaaaaaccagctactaacactgaagataaaataccctcatcaacttgatcagaaagtcctggagaaacaactgccgggctccatgacaattcaaaaggtgaagggattgctgtcacgtcttctcaaagttcctgtgtcagaccttctgttgtcctatgaaagtcccaaaaagccgggcagagaaatcgagctggaaaatgacctaaagtcattacagttttattctgtggaaaatggagattgtctattagtgcgatggtgacaaccaactaataaaatttaaagaccacactgcttatcgtgtctggggttcaccggaaataaatgattcactggaacaattctactgtcaaaacaaagggggtttacaacttgtcctaagtataacaagggatgtatttttagttgggaagtgaccatttctaggcttatacataatagcaataataaaggctttgaacctacagaaaaaaaaaaaaa

SEQ ID NO: 1628 - protein, 527 aa, Homo sapiens
  ref <308>: DATABASE ACCESSION NUMBER: Refseq / NP_003184
  ref <309>: DATABASE ENTRY DATE: 2001-12-18
MSDTLTADVIGRRVEVNGEHATVRFAGVVPPVAGPWLGVEWDNPERGKHDGSHEGTVYFKCRHPTGGSFIRPNKVNFGTDFLTAIKNRYVLEDGPEEDRKEQIVTIGNKPVETIGFDSIMKQQSQLSKLQEVSLRNCAVSCAGEKGGVAEACPNIRKVDLSKNLLSSWDEVIHIADQLRHLEVLNVSENKLKFPSGSVLTGTLSVLKVLVLNQTGITWAEVLRCVAGCPGLEELYLESNNIFISERPTDVLQTVKLLDLSSNQLIDENQLYLIAHLPRLEQLILSDTGISSLHFPDAGIGCKTSMFPSLKYLVVNDNQISQWSFFNELEKLPSLRALSCLRNPLTKEDKEAETARLLIIASIGQLKTLNKCEILPEERRRAELDYRKAFGNEWKQAGGHKDPEKNRLSEEFLTAHPRYQFLCLKYGAPEDWELKTQQPLMLKNQLLTLKIKYPHQLDQKVLEKQLPGSMTIQKVKGLLSRLLKVPVSDLLLSYESPKKPGREIELENDLKSLQFYSVENGDCLLVRW

SEQ ID NO: 1629 - DNA, 1719 bp, Rattus norvegicus
  ref <308>: DATABASE ACCESSION NUMBER: Refseq / NM_031510
  ref <309>: DATABASE ENTRY DATE: 2003-01-13
cgggtgtgagcggggttattgaagtaaaaatgtccagaaaaatccatggcggttctgtggtggaaatgcaaggagatgaaatgacacggatcatctgggaattgattaaagaaaagctcattcttccctacgtggaactggatctgcatagctatgacttaggcatagagaatcgggatgccaccaatgaccaggtcaccaaggatgctgcggaggctataaagaaatacaacgtcggcgtcaagtgtgctaccatcacccccgatgagaagagggttgaggagttcaagttgaaacaaatgtggaaatcacccaacggtaccatccggaacattctgggcggcactgtcttcagagaagctattatctgcaaaaatatcccccggctagtgacaggctgggtaaaacccatcatcattggccgacacgcctatggggaccaatacagagcaacagatttcgttgttcctgggcctggaaaagtagagataacctacacaccaaaagatgggtcgcagaaagtgacatacctggtgcatgactttgaagaaggtggtggtgttgccatgggtatgtacaaccaggataagtcaattgaagattttgcacacagttccttccaaatggctctgtcgaagggctggcctttgtatctaagcaccaagaacactattctgaagaagtatgatggacgcttcaaagacatcttccaggagatctatgacaagcaatacaagtccaagtttgaagctcagaagatctggtatgaacacaggctcatagatgacatggtggcccaggctatgaaatcagaaggaggcttcatctgggcctgtaagaactatgatggtgatgtgcagtcagactcagtagcccaaggttatggctcccttggcatgatgaccagtgtgctgatttgtccagatggtaagacggtagaagcagaggctgcccatggcactgtcacacgtcactaccgcatgtaccagaaaggacaggagacgtccaccaatcccattgcttccatttttgcctggtcccgagggttagcccacagagcaaagcttgacaacaatactgagctcagcttctttgcaaatgctttggaagaagtctgcattgagaccattgaggctggctttatgactaaggacttggctgcttgcattaaaggcttacccaatgtacagcgttctgactacttgaatacatttgagtttatggacaaacttggagaaaacttgaaggccaaactagctcaggccaaactttaaggtcaaacctgggcttagggcaaatctttgtggtaactaagtccacagtttacatatttcctttttgttttaataacactcaaggttaaaaacaagaatcattttgtaatttgtttagaagacgaagttgaacttttctatatgtttacagcctattttctttttcatacagttattgccaccttaatgaatgtggtggggaaggtttttttaattgtattttactgtgtaatagcagtctaggaattgtgttagtatctgttcacaattaactgtcactttttatttgctctaatgtaaatgaccaaaatcagaaatgctccaagggtgaacaatcactacactatgtttccccgtaaaggtgaaggagaggctcacctcccctactgtccatgagtgtgaacacagggagcaaaagtgtgcaaatgttgcactgtgtgtggaa

SEQ ID NO: 1630 - protein, 414 aa, Rattus norvegicus
  ref <308>: DATABASE ACCESSION NUMBER: Refseq / NP_113698
  ref <309>: DATABASE ENTRY DATE: 2003-01-13
MSRKIHGGSVVEMQGDEMTRIIWELIKEKLILPYVELDLHSYDLGIENRDATNDQVTKDAAEAIKKYNVGVKCATITPDEKRVEEFKLKQMWKSPNGTIRNILGGTVFREAIICKNIPRLVTGWVKPIIIGRHAYGDQYRATDFVVPGPGKVEITYTPKDGSQKVTYLVHDFEEGGGVAMGMYNQDKSIEDFAHSSFQMALSKGWPLYLSTKNTILKKYDGRFKDIFQEIYDKQYKSKFEAQKIWYEHRLIDDMVAQAMKSEGGFIWACKNYDGDVQSDSVAQGYGSLGMMTSVLICPDGKTVEAEAAHGTVTRHYRMYQKGQETSTNPIASIFAWSRGLAHRAKLDNNTELSFFANALEEVCIETIEAGFMTKDLAACIKGLPNVQRSDYLNTFEFMDKLGENLKAKLAQAKL

SEQ ID NO: 1631 - DNA, 606 bp, Rattus norvegicus
  ref <308>: DATABASE ACCESSION NUMBER: EMBL / AA892773
  ref <309>: DATABASE ENTRY DATE: 2000-03-03
ttactttgggcaacgtggttggaatgtatttggccccagaattacgacatgccaaacctggctaaaaaacttgaggagattaaaaaggacctggaagccaagaagaagccccgtagttcctgatgcccacctggcactgtattctggacccaccaattcggtcccggggcctgccttcttcacagccacatccaaagctgtgttcctctttggtctcagagcctgcgagttgcctcagatctaacaccggcccgaagtcgagttagctgttcgtttccagcatctcccctccccccatatcttctgtccagctgcttctgagtcctaaggctggaactaggtgctaggtcagcaaacacaaccgtaactggtattcacctgtgctctgagagacccccgtggtcaaggaatgactggctttggatagccgctgcattcactgtctagcagtgacagtaggagcttgctacacaaaccaaattttgttaaagtaattaaaatcagtatcttcaagccagtttctggtgaattaatccatttgttatataatgttatcaaggaactccacgattgataatttaaccaataaattgtttgctggtcatt

SEQ ID NO: 1632 - DNA, 864 bp, Homo sapiens
  ref <308>: DATABASE ACCESSION NUMBER: EMBL / BE958076
  ref <309>: DATABASE ENTRY DATE: 2000-10-11
gccctccccaccgacatcatgctccagttcctgcttggatttacactgggcaacgtggttggaatgtatctggctcagaactatgatataccaaacctggctaaaaaacttgaagaaattaaaaaggacttggatgccaagaagaaaccccctagtgcatgagactgcctccagcactgccttcaggatatactgattctactgctcttgagggcctcgtttactatctgaaccaaaagctttgttttcgtctccagcctcagcacttctcttctttgctagaccctgtgtttttgctttaaagcaagcaaaatggggccccaatttgagaactacccgacatttccagcatactcacctcttcccataatccctttccaactgcatgggaggttctaagactggaattatggtgctagattagtaaacatgacttttaatgagtagtgtcttctttatcgtttgcgatttttactaccttttttcaaaagaaaaattgatgagtttgtatagctggtcagatacaaataatagtgacttcacagttagtaattataatgggtacttgttaaacatttggtactaaattatgtggctgaagtaattaaaattagtatctagagctagttcctggtgaattatcattattggtacggggtaggagtctgagttgtatttaccatagtaattggtatctgagaacgattgagatctggcggatgggatggacattcccataggtttggcagaagcaagatatagggggtccaggttgggggtccaaagaagggagaggtggtagaagggaaagaacaaggttttggggaaaaagtagatttgtttgttttttgttaaaccgtagga

SEQ ID NO: 1633 - DNA, 579 bp, Rattus norvegicus
  ref <308>: DATABASE ACCESSION NUMBER: EMBL / AA892797
  ref <309>: DATABASE ENTRY DATE: 2000-03-03
aggggaaccaagtccctcatggatgaggtggtgaaagccacgtctaggggctacatcactatcataggaggcggagacaccgccacttgctgtgccaaatggaacacaggggataaagtcagccatgtgagcactgggggcggctccagtctagagctcctggaaggtaaagtccttcctggggtggatgctctcagcaatgtttagtattttcctgcctttggttcctgtgcacagcccctaagtcgacctagtgttttccgcatctccatttggtgttagtgcagctagtggccaagacgcagcaccaggaaccctaagcagctgcacagcatctcagctcgtctttactgcatcgggattcatctactacgttcaagatcccatttaaattccttagtgactaaaaccattgtgcattgtagagggcatctatttatactctgcctgtgaaaggaagtgagctgtaaaagcttagctctcttcgctgtatgtagcctctggttagctttgtcactgttcatgacagcatggaaataacggtgagattccagctgtaggtttggagttgatctattg

SEQ ID NO: 1634 - DNA, 2338 bp, Homo sapiens
  ref <308>: DATABASE ACCESSION NUMBER: Refseq / NM_000291
  ref <309>: DATABASE ENTRY DATE: 2002-11-05
agcgcacgtcggcagtcggctccctcgttgaccgaatcaccgacctctctccccagctgtatttccaaaatgtcgctttctaacaagctgacgctggacaagctggacgttaaagggaagcgggtcgttatgagagtcgacttcaatgttcctatgaagaacaaccagataacaaacaaccagaggattaaggctgctgtcccaagcatcaaattctgcttggacaatggagccaagtcggtagtccttatgagccacctaggccggcctgatggtgtgcccatgcctgacaagtactccttagagccagttgctgtagaactcaaatctctgctgggcaaggatgttctgttcttgaaggactgtgtaggcccagaagtggagaaagcctgtgccaacccagctgctgggtctgtcatcctgctggagaacctccgctttcatgtggaggaagaagggaagggaaaagatgcttctgggaacaaggttaaagccgagccagccaaaatagaagctttccgagcttcactttccaagctaggggatgtctatgtcaatgatgcttttggcactgctcacagagcccacagctccatggtaggagtcaatctgccacagaaggctggtgggtttttgatgaagaaggagctgaactactttgcaaaggccttggagagcccagagcgacccttcctggccatcctgggcggagctaaagttgcagacaagatccagctcatcaataatatgctggacaaagtcaatgagatgattattggtggtggaatggcttttaccttccttaaggtgctcaacaacatggagattggcacttctctgtttgatgaagagggagccaagattgtcaaagacctaatgtccaaagctgagaagaatggtgtgaagattaccttgcctgttgactttgtcactgctgacaagtttgatgagaatgccaagactggccaagccactgtggcttctggcatacctgctggctggatgggcttggactgtggtcctgaaagcagcaagaagtatgctgaggctgtcactcgggctaagcagattgtgtggaatggtcctgtgggggtatttgaatgggaagcttttgcccggggaaccaaagctctcatggatgaggtggtgaaagccacttctaggggctgcatcaccatcataggtggtggagacactgccacttgctgtgccaaatggaacacggaggataaagtcagccatgtgagcactgggggtggtgccagtttggagctcctggaaggtaaagtccttcctggggtggatgctctcagcaatatttagtactttcctgccttttagttcctgtgcacagcccctaagtcaacttagcattttctgcatctccacttggcattagctaaaaccttccatgtcaagattcagctagtggccaagagatgcagtgccaggaacccttaaacagttgcacagcatctcagctcatcttcactgcaccctggatttgcatacattcttcaagatcccatttgaattttttagtgactaaaccattgtgcattctagagtgcatatatttatattttgcctgttaaaaagaaagtgagcagtgttagcttagttctcttttgatgtaggttattatgattagctttgtcactgtttcactactcagcatggaaacaagatgaaattccatttgtaggtagtgagacaaaattgatgatccattaagtaaacaataaaagtgtccattgaaaccgtgatttttttttttttcctgtcatactttgttaggaagggtgagaatagaatcttgaggaacggatcagatgtctatattgctgaatgcaagaagtggggcagcagcagtggagagatgggacaattagataaatgtccattctttatcaagggcctactttatggcagacattgtgctagtgcttttattctaacttttatttttatcagttacacatgatcataatttaaaaagtcaaggcttataacaaaaaagccccagcccattcctcccattcaagattcccactccccagaggtgaccactttcaactcttgagtttttcaggtatatacctccatgtttctaagtaatatgcttatattgttcacttcctttttttttattttttaaagaaatctatttcataccatggaggaaggctctgttccacatatatttccacttcttcattctctcggtatagttttgtcacaattatagattagatcaaaagtctacataactaatacagctgagctatgtagtatgctatgattaaatttacttatgtaaaaaaaaaaaaaaaaaaaa

SEQ ID NO: 1635 - protein, 417 aa, Homo sapiens
  ref <308>: DATABASE ACCESSION NUMBER: Refseq / NP_000282
  ref <309>: DATABASE ENTRY DATE: 2002-11-05
MSLSNKLTLDKLDVKGKRVVMRVDFNVPMKNNQITNNQRIKAAVPSIKFCLDNGAKSVVLMSHLGRPDGVPMPDKYSLEPVAVELKSLLGKDVLFLKDCVGPEVEKACANPAAGSVILLENLRFHVEEEGKGKDASGNKVKAEPAKIEAFRASLSKLGDVYVNDAFGTAHRAHSSMVGVNLPQKAGGFLMKKELNYFAKALESPERPFLAILGGAKVADKIQLINNMLDKVNEMIIGGGMAFTFLKVLNNMEIGTSLFDEEGAKIVKDLMSKAEKNGVKITLPVDFVTADKFDENAKTGQATVASGIPAGWMGLDCGPESSKKYAEAVTRAKQIVWNGPVGVFEWEAFARGTKALMDEVVKATSRGCITIIGGGDTATCCAKWNTEDKVSHVSTGGGASLELLEGKVLPGVDALSNI

SEQ ID NO: 1636 - DNA, 631 bp, Rattus norvegicus
  ref <308>: DATABASE ACCESSION NUMBER: EMBL / AA892808
  ref <309>: DATABASE ENTRY DATE: 2000-03-03
ggcagcccgctaccctcagatcacctttgatagcatgattgtggacaacacaacaatgcagctggtatcccggcctcagcagtttgatgtcatggtgatgcctaatctctatggtaacattgtcaacaacgtctgtgcagggctagttggaggcccaggccttgtggctggggccaactatggccatgtgtatgcagtattcgagacaggtacaaggaacacaggcaaaagtattgccaataagaacattgctaaccctactgccacattgctagcaagttgcatgatgctagaccacctcaagctccattcctatgccacctccatccgaaaagctgtcttagcatccatggacaatgaaaatatgcataccccagacattggaggccagggcaccacatcccaagccatccaggacatcattcgtcacatccgcatcattaatggacgggctgtggaggcctagctatccctgcagtttgctcagtttgtctgtaggactcccttctcattttagcactccagctagctttggggacaggctccagaataaagccacttgtgttccagaaaaaaaaaaaaaaaaaaaaaaaaaaaaaaaaaaataaaaaaaaagtttggctaccgcaag

SEQ ID NO: 1637 - DNA, 1506 bp, Homo sapiens
  ref <308>: DATABASE ACCESSION NUMBER: Refseq / NM_004135
  ref <309>: DATABASE ENTRY DATE: 2003-01-31
gggcgggggtcgcggtccccccctcaacatggcggcagcggtgctctaggcgccggaagggggcgtgaatcggtgcgaccgcgcgcgtgcgcagtaccgggtccgcgcctgtccccgaaacttcgcaccccgtcgaactctcgcgagagcgtatctgcgtgtcgggacgtgcggaggctctcactttccgtcatggcgctgaaggtagcgaccgtcgccggcagcgccgcgaaggcggtgctcgggccagcccttctctgccgtccctgggaggttctaggcgcccacgaggtcccctcgaggaacatcttttcagaacaaacaattcctccgtccgctaagtatggcgggcggcacacggtgaccatgatcccaggggatggcatcgggccagagctcatgctgcatgtcaagtccgtcttcaggcacgcatgtgtaccagtggactttgaagaggtgcacgtgagttccaatgctgatgaagaggacattcgcaatgccatcatggccatccgccggaaccgcgtggccctgaagggcaacatcgaaaccaaccataacctgccaccgtcgcacaaatctcgaaacaacatccttcgcaccagcctggacctctatgccaacgtcatccactgtaagagccttccaggcgtggtgacccggcacaaggacatagacatcctcattgtccgggagaacacagagggcgagtacagcagcctggagcatgagagtgtggcgggagtggtggagagcctgaagatcatcaccaaggccaagtccctgcgcattgccgagtatgccttcaagctggcgcaggagagcgggcgcaagaaagtgacggccgtgcacaaggccaacatcatgaaactgggcgatgggcttttcctccagtgctgcagggaggtggcagcccgctaccctcagatcaccttcgagaacatgattgtggataacaccaccatgcagctggtgtcccggccccagcagtttgatgtcatggtgatgcccaatctctatggcaacatcgtcaacaatgtctgcgcgggactggtcgggggcccaggccttgtggctggggccaactatggccatgtgtacgcggtgtttgaaacagctacgaggaacaccggcaagagtatcgccaataagaacatcgccaaccccacggccaccctgctggccagctgcatgatgctggaccacctcaagctgcactcctatgccacctccatccgtaaggctgtcctggcatccatggacaatgagaatatgcacactccggacatcgggggccagggcacaacatctgaagccatccaggacgtcatccgccacatccgcgtcatcaacggccgggccgtggaggcctaggctggccctaggaccttcttggtttgctccttggattccccttcccactccagcaccccagccagcctggtacgcagatcccagaataaagcaccttctccctagaaaaaaaaaaaaaaaaaaaaaaaaaaa

SEQ ID NO: 1638 - protein, 393 aa, Homo sapiens
  ref <308>: DATABASE ACCESSION NUMBER: Refseq / NP_004126
  ref <309>: DATABASE ENTRY DATE: 2003-01-31
MALKVATVAGSAAKAVLGPALLCRPWEVLGAHEVPSRNIFSEQTIPPSAKYGGRHTVTMIPGDGIGPELMLHVKSVFRHACVPVDFEEVHVSSNADEEDIRNAIMAIRRNRVALKGNIETNHNLPPSHKSRNNILRTSLDLYANVIHCKSLPGVVTRHKDIDILIVRENTEGEYSSLEHESVAGVVESLKIITKAKSLRIAEYAFKLAQESGRKKVTAVHKANIMKLGDGLFLQCCREVAARYPQITFENMIVDNTTMQLVSRPQQFDVMVMPNLYGNIVNNVCAGLVGGPGLVAGANYGHVYAVFETATRNTGKSIANKNIANPTATLLASCMMLDHLKLHSYATSIRKAVLASMDNENMHTPDIGGQGTTSEAIQDVIRHIRVINGRAVEA

SEQ ID NO: 1639 - DNA, 603 bp, Rattus norvegicus
  ref <308>: DATABASE ACCESSION NUMBER: EMBL / AA892918
  ref <309>: DATABASE ENTRY DATE: 2000-03-03
tgatggtttcggaaatgtgtaaatcacctggaagaaattaatggtgtgacttaaaatatttttttttgacaagggagagtggttggtggtcttctgttctttgggctatgcatctgagatgtttgatgtgttcaggacgcatgtacataatgcgtgcataccacttttgttcttggtttgtaaattaacttttataaactttacctttttatacataaacagaaccgagtttctaaggctacctttgtattctctcctgtacctcttgagccttgaactttgacctctgcagcaataaagcagcatttctacacatataaggtcatttttttaagaaaaagaatgcacagagttgttacatttttaagtgctgcatttaaaagatacagttactctagtttgattaaattcttgcaaagtatcccttctgtaaaatttgtgatacaatgctgtgccctaaagtgtatttttttactaatagtttattatggcacatcagcacgatttctgtttagataatacaccactacattctgttaataatcattaggtgtgaaaggatttcttttgtggttattaaaaatctcaaatttctaaatctgc

SEQ ID NO: 1640 - DNA, 606 bp, Rattus norvegicus
  ref <308>: DATABASE ACCESSION NUMBER: EMBL / AA893173
  ref <309>: DATABASE ENTRY DATE: 2000-03-03
gctgcagaggcagtttgatgtggacattcttatctcaggacacacacacaaattcgaagcatttgagcatgaaaataaattctatattaacccaggttctgccactggagcctataatgccttggaaacaaatattattccgtcatttgtgctgatggacatccaggcttctaccgtggtcacttacgtctatcagctaattggagatgacgtaaaagtagaacgaattgagtataaaaagtcataaagccaggccggtctccaccacttattttttgctcatttccttgttcaaatcagataattaaacacttaagaggcacacagttgtatcacttttataatattttgcactaaaaagtcttctctgttgatacagttgctctaaagcttcttgtaaactcttaagaatatatttagtttgcagtatatggcttctataagaagcagcccaccccacagtccaggaccatgttaggaagtttgtccttgtaaatagcttcccagttggttttggactgcatagaaaactagtgcatgaggagaaaggatccaggctttgtgtgtgttttctcttctctggtaataaatgtgtaccttccattt

SEQ ID NO: 1641 - DNA, 597 bp, Rattus norvegicus
  ref <308>: DATABASE ACCESSION NUMBER: EMBL / AA893199
  ref <309>: DATABASE ENTRY DATE: 2000-03-03
tgtacaagcagttgggttatagtgtctacaggacagtcatagagtactactcagccagcaatggggagcctgatgaggatgcctacgatatgaggaaagcactttccagggacactgagaagaaatccatcatcccattacctcatcctgtgaggcctgaggacattgaataaccataggcagtggttcttaggcaggtgttccagacagtttgtggacatatttttttcataggatgatcttggagctcgtaggaggaaagcaagcatttaagtcttaaagacttcaaaacatgcaggctatgaacttacttcaaatcttatccttccaatgagcaatggcatacatgttcaactgtttgccatgtaaagttcaatcaaggcagctaagtcagaaggacacgttccactatcatggttgacatgccaaggaaagactccctccatcctcctcctaaatcctgtgcctgagaaccactgctgcacatatataaatatatatatattttattttgtattgatctgttaattgaagctttaaaagcatatatgaaatgtataaatctgagatgtatagtaaaacacattgttgactatg

SEQ ID NO: 1642 - DNA, 1090 bp, Homo sapiens
  ref <308>: DATABASE ACCESSION NUMBER: Refseq / NM_016100
  ref <309>: DATABASE ENTRY DATE: 2002-02-03
gctccgggagacttccggcagggcgggcgcggggtcttggcgaacggtcttcggaagcggcggcggcgcgatgaccacgctacgggcctttacctgcgacgacctgttccgcttcaacaacattaacttggatccacttacagaaacttatgggattcctttctacctacaatacctcgcccactggccagagtatttcattgttgcagaggcacctggtggagaattaatgggttatattatgggtaaagcagaaggctcagtagctagggaagaatggcacgggcacgtcacagctctgtctgttgccccagaatttcgacgccttggtttggctgctaaacttatggagttactagaggagatttcagaaagaaagggtggattttttgtggatctctttgtaagagtatctaaccaagttgcagttaacatgtacaagcagttgggctacagtgtatataggacggtcatagagtactattcggccagcaacggggagcctgatgaggacgcttatgatatgaggaaagcactttccagggatactgagaagaaatccatcataccattacctcatcctgtgaggcctgaagacattgaataaccctgggcagtggttcttaggcagatactctagatgctttatggacaatattattttcattggatgattctggagctctattaggagaaaagtaatcattttaggtcttaaagacttcaagaaaatacaggttatcaatttattttaaatctcattgtttccagttagcaatatcatacctattaaagctgttcattgtaacaaaattcaatcaaaaaggcagctaggtcagaaggaaacataccactctcatggttcatagtattcactgtatgtatgctagggaaaagacttgctccagtctcctcctcagttctgtgcctgagaaccactgctgcatatatttgtttttaaattttgtattgaactgttaattgaagctttaaaagcatatatgaaatgtataaatctaagatgtataatacattattgactctaaaaaaaaaaaaaaaaaaaaaaaaaaaaaaaaaaaaaaaaaaaaaa

SEQ ID NO: 1643 - protein, 178 aa, Homo sapiens
  ref <308>: DATABASE ACCESSION NUMBER: Refseq / NP_057184
  ref <309>: DATABASE ENTRY DATE: 2002-02-03
MTTLRAFTCDDLFRFNNINLDPLTETYGIPFYLQYLAHWPEYFIVAEAPGGELMGYIMGKAEGSVAREEWHGHVTALSVAPEFRRLGLAAKLMELLEEISERKGGFFVDLFVRVSNQVAVNMYKQLGYSVYRTVIEYYSASNGEPDEDAYDMRKALSRDTEKKSIIPLPHPVRPEDIE

SEQ ID NO: 1644 - DNA, 635 bp, Rattus norvegicus
  ref <308>: DATABASE ACCESSION NUMBER: EMBL / AA893237
  ref <309>: DATABASE ENTRY DATE: 2000-03-03
gctgacctccggtgctccaacgggcggcagaatggaagaaggtgaggacccaggaagtctgattaaagtggtccacttgctggtcttgtctggtgtctggggcatgcagatgtgggtgacctttgcctcaggcttcctgcttttccggagcctcccgaggcacacgtttggacttgtgcagagcaagctcttcccagtctattttcacgtctccttgggttgtgccttcatcaacctctgcatcttggcaccacagcgggcctggatcaacctcacgctgtgggaaatcagtcagcttaccctactgcttctgagtctcacactggctaccatcaatgctcgctggctcgaggctcgcaccacagctaccatgtgggccctgcagagtatagagaaagagcgaggcctggggacagaggtgccaggcagcctccagggccctgacccctaccgccagctgcgggagaaggaccccaagtacagtgctctccggcagaaattcttctactaccatggcctgtcttccctctgcaacctggggtgtctgctgagcaatggtctctgccttgtgggcctcgccctggggctcaggagcctctaacatgggccctgtgtttcaataaatgtttctttgg

SEQ ID NO: 1645 - DNA, 540 bp, Rattus norvegicus
  ref <308>: DATABASE ACCESSION NUMBER: EMBL / AA893246
  ref <309>: DATABASE ENTRY DATE: 2000-03-03
cttggagcggcggagagcagctggagagttgatggagcccgccaacctcctggcggaagagaaggacgaggacctgctgttcgagtagctgcccgctgctcccttcaggctgagcatcatttaactcagtgtgcaggttcggtatgtgcgggtatttattttggcagaagagttcatctggctgtaagatttatcagaatgctgtgtgagaccatttttcctgcatcataattcagcaacctgagatttgtaaaacccacccagcacttacagaatctccccagtgaaagagtcataccatcctatttacactagtttgactgatgtgtttaaaactttaggaaatacttactataaacattcatggtctcaggcaaatgctgagcagccttccttcctacccacttgtaaaccttggcactgttgtctgaggctgtgcagccattgtgttactgtggactcaactctatgcctacttttctttgcacgatgtgtctgtgtgtaatggaagtggttctgcccatttaaatatgacttatg

SEQ ID NO: 1646 - DNA, 1675 bp, Homo sapiens
  ref <308>: DATABASE ACCESSION NUMBER: Refseq / NM_015994
  ref <309>: DATABASE ENTRY DATE: 2003-01-15
gtgacaaccggaagcggaagtgaaaatgggtgtccctgctgcctcttagcaacaagaggggtcaagtgacacaaccagctgactcccgtagaggaagacactgtggaggccagttctggagctattgcagcctcggttgcccggccggggacccgagccgaaaagttatcgtcagaatgtcgggcaaagaccgaattgaaatctttccctcgcgaatggcacagaccatcatgaaggctcgtttaaagggagcacagacaggtcgaaacctcctgaagaaaaaatctgatgccttaactcttcgatttcgacagatcctaaagaagataatagagactaaaatgttgatgggcgaagtgatgagagaagctgccttttcactagctgaagccaagttcacagcaggtgacttcagcactacagttatccaaaatgtcaataaagcgcaagtgaagattcgagcgaagaaagataatgtagcaggtgttactttgccagtatttgaacattaccatgaaggaactgacagttatgaactgactggtttagccagaggtggggaacagttggctaaattaaagaggaattatgccaaagcagtggaactactggtggaactagcttctctgcagacttcttttgttactttggatgaagctattaagataaccaacaggcgtgtaaatgccattgaacatgtcatcattccccggattgaacgtactcttgcttatatcatcacagagctggatgagagagagcgagaagagttctataggttaaagaaaatacaagagaagaaaaagattctaaaggaaaaatctgagaaggacttggagcaaaggagagcagctggagaggtgttggagcctgctaatcttctggctgaagagaaggacgaggatcttctatttgaataatctttcctgttctggttctttgagaaaccctaacactggcttcattttaattcacagtgtgtaggtttgatttgtgtggctatttattttttggcctaagaatttcactggttgtaaaatttacctagatgtctatttatgggattacttttgcagaatcataatttagcaaccatttatcatggatgaaagagatctgtaaaacctgcccaggaacttacagaatttactttgcagaagcgttatcatactccatttacatctgtgttacacgtgatctgcttaccaagcatattaggaaatacctcttaggaagcattagcggtctcaggccaattactgtggagcagctttcattcctacccacttgcaaaccttggcgctgttgtctgagattgctgcagccattcttgttaccatggtacttctcaaactttgtgaaaacctgcacttttccttgcatgacaggttcctgtcttgtctgtcatgggagccattctgccaatttaaatgcgactgtggtataaacagtaaaatgatttaaaagtaagtcattccgtttttattaatttactgttaagtcatgttctcatgctcagatcagtagtgtcagccagagctttctctgcagacatgtaggaagtgggtagctatttttcccactccatgtattagagttttacaaaaaggcttacttttgagacaactgttgcattttggggtactaataaatgattgccgatgagttaaaaaaa

SEQ ID NO: 1647 - protein, 247 aa, Homo sapiens
  ref <308>: DATABASE ACCESSION NUMBER: Refseq / NP_057078
  ref <309>: DATABASE ENTRY DATE: 2003-01-15
MSGKDRIEIFPSRMAQTIMKARLKGAQTGRNLLKKKSDALTLRFRQILKKIIETKMLMGEVMREAAFSLAEAKFTAGDFSTTVIQNVNKAQVKIRAKKDNVAGVTLPVFEHYHEGTDSYELTGLARGGEQLAKLKRNYAKAVELLVELASLQTSFVTLDEAIKITNRRVNAIEHVIIPRIERTLAYIITELDEREREEFYRLKKIQEKKKILKEKSEKDLEQRRAAGEVLEPANLLAEEKDEDLLFE

SEQ ID NO: 1648 - DNA, 506 bp, Rattus norvegicus
  ref <308>: DATABASE ACCESSION NUMBER: EMBL / AA893584
  ref <309>: DATABASE ENTRY DATE: 2000-03-03
ttgcttgaaaatctaactaaaaaatatctttgtgagcactagtgttcaaagacacaattcctgttcttcctcaactagaagccaagtacaagaagttggagaagcgatgagaatcatgttcgtgtgtctcaagtgttttttaatatggaagttgttttataaccactaaatcctgaggctgacaattatcacagttcctcagaagaaaactgctggttaatcccaagaccacgcgataccacggatgaactggagggctgcggctgttctggagtctcctctgaggtggtacctctcagaaactcacacccagaatgcctcaccgtttacttgaatgcttcatcatccatacaagatggagactctagagttcagggcatacctgggcttgccagtagagtccagggaggggacctgctttccctggtattgggcaattagcacgttattttccaaaatggctgttttgttcgttttgttttctactgatgatataatgtattatt

SEQ ID NO: 1649 - DNA, 447 bp, Rattus norvegicus
  ref <308>: DATABASE ACCESSION NUMBER: EMBL / AA893699
  ref <309>: DATABASE ENTRY DATE: 2000-03-03
cccccagccaggagatagctggatccctttactcattaatgccgttgaccattgcatggacagaattaaggagctcactcagcgtgcagttgagctgtgagcttccagtccttgttctttctcccctccctttcgcacccaagccagtgaccgctttccttatttattgttaagtgttttcagtgtctgctttcggaagtggagctgtgacagggtgtttgctggatggaaaggaagcttctgtttttaagaagggattgttatcaagattttagggtaggagagactgcagttagcttctgtgcttgacacaaatgtgtccatgcttgtactcggggctgatttttggaaattcttagggaagatgtcttgttctttagtttttagtaaagtgtgttgttgttttattaagattttgatcatctcaataaaatggtaacctacttg

SEQ ID NO: 1650 - DNA, 1490 bp, Homo sapiens
  ref <308>: DATABASE ACCESSION NUMBER: Refseq / NM_037370
  ref <309>: DATABASE ENTRY DATE: 2003-01-15
ctcgtgccccccacggaggggactgctctcccccgctgcatcctttctgtgaggtaccttacccacctcagcacctgagagggtgaaatagaattctaacctcgacattcgggaagtgtttttgagaagtctcggtcggtaagggaagtcttccaagtccgtgcagcactaacgtattggcacctgcctcctcttcggccaccccccagatgaggcagctgtgactgtgtcaagggaagccacgactctgaccatagtcttctctcagcttccactgccgtctccacaggaaacccagaagttctgtgaacaagtccatgctgccatcaaggcatttattgcagtgtactatttgcttccaaaggatcaggggatcaccctgagaaagctggtacggggcgccaccctggacatcgtggatggcatggctcagctcatggaagtactttccgtcactccaactcagagccctgagaacaatgaccttatttcctacaacagtgtctgggttgcgtgccagcagatgcctcagataccaagagataacaaagctgcagctcttttgatgctgaccaagaatgtggattttgtgaaggatgcacatgaagaaatggagcaggctgtggaagaatgtgacccttactctggcctcttgaatgatactgaggagaacaactctgacaaccacaatcatgaggatgatgtgttggggtttcccagcaatcaggacttgtattggtcagaggacgatcaagagctcataatcccatgccttgcgctggtgagagcatccaaagcctgcctgaagaaaattcggatgttagtggcagagaatgggaagaaggatcaggtggcacagctggatgacattgtggatatttctgatgaaatcagccctagtgtggatgatttggctctgagcatatatccacctatgtgtcacctgaccgtgcgaatcaattctgcgaaacttgtatctgttttaaagaaggcacttgaaattacaaaagcaagtcatgtgacccctcagccagaagatagttggatccctttacttattaatgccattgatcattgcatgaatagaatcaaggagctcactcagagtgaacttgaattatgacttttcaggctcatttgtactctcttcccctctcatcgtcatggtcaggctctgatacctgcttttaaaatggagctagaatgcttgctggattgaaagggagtgcctatctatatttagcaagagacactattaccaaagattgttggttaggccagattgacacctatttataaaccatatgcgtatatttttctgtgctatatatgaaaaataattgcatgatttctcattcctgagtcatttctcagagattcctaggaaagctgccttattctctttttgcagtaaagtatgttgttttcattgtaaagatgttgatggtctcaataaaatgctaacttgccagtgattaaaaaaaaaaaaa

SEQ ID NO: 1651 - protein, 232 aa, Homo sapiens
  ref <308>: DATABASE ACCESSION NUMBER: Refseq / NP_411241
  ref <309>: DATABASE ENTRY DATE: 2003-01-15
MAQLMEVLSVTPTQSPENNDLISYNSVWVACQQMPQIPRDNKAAALLMLTKNVDFVKDAHEEMEQAVEECDPYSGLLNDTEENNSDNHNHEDDVLGFPSNQDLYWSEDDQELIIPCLALVRASKACLKKIRMLVAENGKKDQVAQLDDIVDISDEISPSVDDLALSIYPPMCHLTVRINSAKLVSVLKKALEITKASHVTPQPEDSWIPLLINAIDHCMNRIKELTQSELEL

SEQ ID NO: 1652 - DNA, 589 bp, Rattus norvegicus
  ref <308>: DATABASE ACCESSION NUMBER: EMBL / AA894188
  ref <309>: DATABASE ENTRY DATE: 2000-03-03
caagataaaagttaaggctgagcctgaggtcggacctgcttgctgttgcagtctgtggagctgatagggaacgcctgcaccaggagttggtgaacggggcacagtgttagaatgtaacggatgggggtgatggcaaaatttgaggaagataggagggaagtgggtaacccagtcatttaaccagcgcctcaggagatgctgtgtaatgtctgatgtgtacaggcccgagtgctcttcaggaaatccaggaaggggcatcttctcggagtcagagaatgtgccttagggaaataaatgttccgagcacaggcttcaactcaagtggagagttttagtgttggccatcagcgacttctgaggtcagtgcaacgagctcaggaggatactgctgcccttttaggaggcagagccactccagtgtctgctgatggacttctaatctggagaattacattctcccctaagggcaatgtgtggattttgcctcttacattttatttactttggaagttgcacttgttcacctaccagtgtttacggaatcctgtgtatgggatgctttttctataataaagtatttttatttgtg

SEQ ID NO: 1653 - DNA, 1122 bp, Homo sapiens
  ref <308>: DATABASE ACCESSION NUMBER: EMBL / BG292056
  ref <309>: DATABASE ENTRY DATE: 2001-02-23
ggagaacattacattttcttctgaaggcaaaatgcttgtaggttttgcctctactttgtatttacttttaaaattgcacttgttcacctaccagtgtttacgaaatcctgtatttgggatgctttttctataataaaatattataatttgtgaaaaaaaaaaaaaaaaaaaaaaaaaaaaaaaaaaaaaaaaaaaaaaaaaaaaaaaaaaaaaaaaaaaaaaagaaaaagagaggggggggcggcgacgcaaagatatcatcctccgcaaggagagagcgaaccagagatcaggcgcgaccgccacacatatatgaaaggagaaaagagggcgcgccccacgtaggaggaggagtattcttatatatacaacgagagggggggggccggccgctaatataaaacaccacagcccagcgagggggaaaaaccgcggcacacagccgaggacactttggagaggagaagagcaaccccccacaacgggggggggagggcgaacaaagaagaggagagagaaacacccaccctcacccagcagatatattacagagatccagggggagaaaatacaacaacaatctcagagagagggtatgtagagggtggacacaccaaatgtcgatattattggtgcctagcagagaacgaaaaatttggcgacaagacgagttatcttttatcaaaaatatttttacggcggggctcccgctactctaaccggagatacacataaaaaaaaagaagagggaaaaagcaataacgagaggaaggagtaggaggaaaaagaagacaagaaaaaaaaaggagaggagggaaacagcaaaagcaaagagagaagaagaagaaaggaggcaaaaaagcagggagaagagaagagaggagaaaacaaaagagaaagaaacaaaaaaaaaaacaaaagacgacggacacaacagaaaaaaaaaaagcaaaagaaagagaacagaagcagaagaagacgaacaaacaaaacagaaaaaaagaggaacaaaaaaaaaacgaaacaaacaagagcgcaaacaacaagaaaaaaaaaaaaagcgacgaccttgtaacaaaaaaagaaaaagaaaaaaaaagaaaaaaaaaaaaaacaaaaagg

SEQ ID NO: 1654 - DNA, 2099 bp, Rattus norvegicus
  ref <308>: DATABASE ACCESSION NUMBER: Refseq / NM_013053
  ref <309>: DATABASE ENTRY DATE: 2003-01-14
agatcaaagtggtgggactcgcgtcgcggccgcggagactagaaggaggactccggatccggctcggcgctcgccctcgctcgccatggagaagaccgagctgatccagaaggccaagctggccgagcaggccgagcgctacgacgacatggccacctgcatgaaagccgtgacggagcagggcgccgagctgtccaacgaggagcgcaacctgctatctgtggcctacaagaacgtggtcgggggccgcaggtccgcctggagggtcatctcgagcattgagcagaagaccgatacctcggacaagaagttgcagctgatcaaggactatcgggagaaagtggagtctgagctgaggtccatctgcaccacggtcctggaattgttggataagtatttaatagccaatgcaactaatccagagagtaaggtcttctatctgaaaatgaagggagattatttccggtatcttgctgaagtcgcttgtggtgatgatcgaaaacaaacgatagaaaattcccaaggagcctaccaagaggcatttgatataagcaagaaagagatgcaacctacacatccgatccgcctggggctggctcttaacttttctgtattttactatgagatccttaataatcccgagcttgcctgcacactggctaaaacggcttttgatgaagccatcgccgagcttgatacactgaatgaagactcctacaaagacagcaccctcatcatgcagttgcttagagacaacttaacattatggacatcagacagtgcaggagaagaatgtgatgcagctgagggggctgagaactaaaggcatccaggacaccaacctccttcccctcaagaaaacctttttacatctccattccttattccacttggatttcctctagcaaggaagcccattcatgtgtatggggtcaactgtttatagtcttttcacactgcagctttgggaaaactccatcccttggtttgtgttgtctccaccttcctggtgtgcagttactgctgtagaaaagtatcaatagcttcatttcatataaacacgagtaacttccagacacttgtgtagaggactgacagcacatttggtatttaagtaatctgaaccagttctgcaagtgactgtgttttgtattactgtgaagatatggaaatggtagtgcattacaatttaaagtgattgtaataataacgtcttgatttctacattccttttctgaactttcttgggggtttcctttcagaagcaacttttccatgctcttactacaaattcctttttagtaggaatccagaagtgttagattgaatgggaaagcgcttaatgcatccgggcttgggggtcacagattgaaatgtctcctgtgtcacattctggaggttacatctgtctgtgacaacagggcgtttccttatgcattcttcatttgctgctgtttaagttgacaacttccttcccaataaaaattcacttacacctcctgccttcgtagctctggtattcactttaccttgtgacagaagtagcatgttgctgccagaatacaagcattgctttgggcaaattaaaatgcatgtcctttcttaatacactaggaaggagaaataaagtacacaagtccaagtctaaactttagtacttttccatgcagatttgtgcacatgtgagggggtatccagtttgtccagtgattgttctttagagagttggaccactatattgtgtgtttgctaatcattgactgtagtcccaaaaaagccttgtgaaaatgttatgccctatgtaacagcagagtaacataaaataaaactacattttataaaaccatttattatggctttgtaacagttgcatacccatattttaagaacagacaaatttactactttttgaagtttgttgctatttctctttatgtaacatataatggtgatatccatatttctgcattgtggtacacttgtctagggtgcctggcactgtaaaattggactatatttctccagatagcctcatgggttgtcttcctcagatgtaatgataactggttaggtgtcatgtgtaataaagtgaacatttg

SEQ ID NO: 1655 - protein, 245 aa, Rattus norvegicus
  ref <308>: DATABASE ACCESSION NUMBER: Refseq / NP_037185
  ref <309>: DATABASE ENTRY DATE: 2003-01-14
MEKTELIQKAKLAEQAERYDDMATCMKAVTEQGAELSNEERNLLSVAYKNVVGGRRSAWRVISSIEQKTDTSDKKLQLIKDYREKVESELRSICTTVLELLDKYLIANATNPESKVFYLKMKGDYFRYLAEVACGDDRKQTIENSQGAYQEAFDISKKEMQPTHPIRLGLALNFSVFYYEILNNPELACTLAKTAFDEAIAELDTLNEDSYKDSTLIMQLLRDNLTLWTSDSAGEECDAAEGAEN

SEQ ID NO: 1656 - DNA, 2303 bp, Rattus norvegicus
  ref <308>: DATABASE ACCESSION NUMBER: Refseq / NM_053463
  ref <309>: DATABASE ENTRY DATE: 2003-01-13
cgatgcctacctctgtgccccgcggggcgcctttccttctcctaccacctttactgatgctgtctgctgtgctggcagtgcctgtggaccgcgcagcacctcatcaggaggacaaccaggccactgagaccccggacacaggcctgtactaccatcggtacctccaggaggtcatcaacgtgctagagacagatgggcacttccgggagaagctgcaagctgccaacgctgaggacattaagagtggaaagctgagtcaagagctggacttcgtcagccacaacgtccgcaccaagctggatgagctcaagcgacaggaggtatcaaggcttcggatgctgctcaaggccaagatggatgcaaagcaggagcctaacttgcaggtggaccacatgaaccttctgaagcagtttgaacacctggaccctcagaaccagcacacgtttgaggctcgggacctagagctgctgatccagacggccacccgagacctcgcccagtatgacgctgcacaccatgaagagttcaaacgctacgagatgctcaaggaacatgagcgaagacgttacctggagtctctgggagaggagcagcggaaggaggctgagaggaagctacaagagcagcagcgcagacaccgggaacaccccaaagtcaatgttcctggcagccaagcccagttgaaggaggtgtgggaggagctagatggattggaccccaacaggttcaaccccaagaccttcttcatactgcatgacatcaacagcgatggtgtcctagatgagcaagaactggaagctctgtttaccaaggagctggagaaggtgtacgacccgaagaacgaggaggacgacatgagggagatggaggaggagcggctgcgcatgcgggagcatgtgatgaagaacgtggacaccaaccaggaccgacttgtgaccctggaggaattcctggcatccacacagaggaaggagtttggggaaactgcggagggatggaagacagtggaaatgtatccagcctacacagaggaagagctgaagcgttttgaagaggagcttgctgcccgggaggctgagctaaatgccagagcccagcgcctcagccaggagacagaggccctggggcgctcccaggaccgcctagaggctcagaagagagagctgcagcaggccgttctgcagatggagcaaaggaagcagcaacagcaagagcagagcgctccgccttcccaacctgatgggcagctgcagttccgtgcagacacaggggatgctcctgtcccagctccagcaggtgaccagaaagacgtgcctgcttctgaaaagaaggttccagagcagccccctgtgctgccacagctggattctcagcatttataagccctcagagatcccggccctcaagttcccacagacagtgatggaagctggatgaagtgtccttgcagcctttctggagaccaaagccttcatggcctccaggggagaacagggccaccctgttcctcagatgcgcttctgcccatgtctaccagtctgttctcacagcctctgggtcccagtcctgccttcctccctcccttccttggcagggactcaactgcaggagcccctcaccccacctgagtgcacaccccaggcctgcctgccttccatgctttgctcttacctgtcccaggctcaacctttctgcttcctgtacctgtcagtgggtcacaggagcttgacttggtctctccaactctttgccttgtgagaggccaatgatctcaattccttttggtggctagaggccgccacaatgtggggtgtcctatcagctctgcctgggactcctgaactccaccaccaccccaccagccttaccctaaccacctgggcccaatacctacctgagggtcccagaaggggcccagatatggctacaccccttactgaggtccagcctcactcagccccctatgggggctcctgaaaattggttcacccacttccctggcttcaggccacactgctgtgtcctgctctgtgtcccagtctcatccaactatagcctggcacaaataaacattagcatatctgtgtgaatgtactgccctcttgcaagtccccctgcatgccacctgctcgactccctggtgtcctgtggcacatacttccactgccaggaggcttgccgggggctttctgtgtgctcttgccagaatggcctccttgcttcatttttgccatggaaacagaaaacccaaacctgagcttgaaaaaaaattaatatcttaaataattaaaatatatatatgt

SEQ ID NO: 1657 - protein, 459 aa, Rattus norvegicus
  ref <308>: DATABASE ACCESSION NUMBER: Refseq / NP_445915
  ref <309>: DATABASE ENTRY DATE: 2003-01-13
MPTSVPRGAPFLLLPPLLMLSAVLAVPVDRAAPHQEDNQATETPDTGLYYHRYLQEVINVLETDGHFREKLQAANAEDIKSGKLSQELDFVSHNVRTKLDELKRQEVSRLRMLLKAKMDAKQEPNLQVDHMNLLKQFEHLDPQNQHTFEARDLELLIQTATRDLAQYDAAHHEEFKRYEMLKEHERRRYLESLGEEQRKEAERKLQEQQRRHREHPKVNVPGSQAQLKEVWEELDGLDPNRFNPKTFFILHDINSDGVLDEQELEALFTKELEKVYDPKNEEDDMREMEEERLRMREHVMKNVDTNQDRLVTLEEFLASTQRKEFGETAEGWKTVEMYPAYTEEELKRFEEELAAREAELNARAQRLSQETEALGRSQDRLEAQKRELQQAVLQMEQRKQQQQEQSAPPSQPDGQLQFRADTGDAPVPAPAGDQKDVPASEKKVPEQPPVLPQLDSQHL

SEQ ID NO: 1658 - DNA, 1932 bp, Rattus norvegicus
  ref <308>: DATABASE ACCESSION NUMBER: Refseq / NM_019359
  ref <309>: DATABASE ENTRY DATE: 2003-01-14
agcagagcagtcggtcccactccagtgcgacccggagcctctgcgggactcgagtccgagcgaacctcgaagcatcatccgcgtccgtctgccgcgttccggcttctgcgccgcgcagagtagcgagcttgtgcatcacccgcgcggccacagctgggggctaagagcagggacaccgagggtgactgaccccgactccgagcgcagccccttcctgtggtccgaacagccatgacccacttcaacaagggcccttcctacgggctctccgccgaggtcaagaacaagatcgcatccaagtatgaccagcaggccgaggaggatctgcgcaactggatagaagaggtgacaggcatgggcattgggaccaacttccagctgggcctgaaggacggtatcatcctctgcgaactcataaacaagctacagccaggctctgtgaagaaagtcaacgagtcctcactaaactggccgcagttggagaacatcggcaactttattaaagccatccaggcttacggtatgaagccccatgacatatttgaggcaaacgacctttttgagaatggcaacatgacccaggttcagactacgctggtggctctagcaggtctggcgaaaacaaaaggattccatacaaccattgacatcggcgttaagtacgcagaaaaacagacacgacgcttcgatgaaggcaagctaaaggctggccaaagtgtaatcggtttacagatggggaccaacaaatgtgccagccaggcgggtatgacagcctatgggactcggaggcatctttatgatcccaaaatgcagactgacaaaccctttgaccagaccaccatcagtctgcagatgggcaccaacaaaggagccagccaggctggcatgtcggcaccgggtaccagaagagacatctatgaccagaagctaacattacagccggtggacaactcgaccatttctctacagatgggcaccaacaaagttgcttcccagaaaggaatgagcgtgtatgggcttgggcggcaagtgtatgaccccaagtactgtgccgcacccacagaacctgtcattcacaacggaagccagggcacgggaacaaatgggtcagaaatcagtgatagcgattaccaggcagaataccccgatgagtatcatggcgagtacccagatgagtaccctcgagagtaccagtatggtgacgaccagggcatcgattactagagtcacacacaggagtgcagtattttagtccattgtttatccagtgagacccaagctagccttgagtaattcttatctcgtcttcctaaacactattacgcttcctgtacctttaaagaatgccttacgtacattcctttctccctttcctgcctcctccctaaattgccttctagtgctgtagcgagggaagcctacagcctaaccagtaactcgcgttggaagaagtgagaaggaacgctgtgcgagggcagccagctctttcgctggagatctataaaattttttacacttacacgtaaactggtattttcaaacaataggaaactatttttttcttttttacagtttagtatgtatctggcttgtacacggtagactaagaagttgatttgctaagtgtggtctttgccaagtaatctaacatgcagctttagaacctgacacgtggatgcttctgcacagtgttgtctgctaagttttaaataaagtcgtgatcagtgtgattcgtgattacatgtgtactcattctttcccgaagctgacaaggtctctcccgagtggcgctctaaaggcgcgtctacagaaatggccgcagacatgtaggtgtgggtggcgtgcctgcagacttcatttgtgccaatgtattactgtagagtcgctgttcccttcaactgtatttattgctgcatttctcagcataaactt

SEQ ID NO: 1659 - protein, 330 aa, Rattus norvegicus
  ref <308>: DATABASE ACCESSION NUMBER: Refseq / NP_062232
  ref <309>: DATABASE ENTRY DATE: 2003-01-14
MTHFNKGPSYGLSAEVKNKIASKYDQQAEEDLRNWIEEVTGMGIGTNFQLGLKDGIILCELINKLQPGSVKKVNESSLNWPQLENIGNFIKAIQAYGMKPHDIFEANDLFENGNMTQVQTTLVALAGLAKTKGFHTTIDIGVKYAEKQTRRFDEGKLKAGQSVIGLQMGTNKCASQAGMTAYGTRRHLYDPKMQTDKPFDQTTISLQMGTNKGASQAGMSAPGTRRDIYDQKLTLQPVDNSTISLQMGTNKVASQKGMSVYGLGRQVYDPKYCAAPTEPVIHNGSQGTGTNGSEISDSDYQAEYPDEYHGEYPDEYPREYQYGDDQGIDY

SEQ ID NO: 1660 - DNA, 1607 bp, Homo sapiens
  ref <308>: DATABASE ACCESSION NUMBER: Refseq / NM_001839
  ref <309>: DATABASE ENTRY DATE: 2000-10-31
gctctgtagcacccaggagcggggaagcgaagtgcgagagaccccggaccccagcgctgtctcttcccgccgcccgaaccaccatgacccacttcaacaagggcccttcctatgggctctcggccgaagtcaagaacaagattgcttccaagtatgatcatcaggcagaagaagatcttcgcaattggatagaagaggtgacaggcatgagcattggccccaacttccagctgggcttaaaggatggcatcatcctctgcgaacttataaacaagctacagccaggctcagtgaagaaggtcaacgagtcctcactgaactggcctcagttggagaatattggcaactttattaaagctattcaggcttatggtatgaagccacatgacatattcgaagcaaatgatctttttgagaatggaaacatgacccaggttcagactactctggtggctctagcaggtctggctaaaacaaaaggattccatacaaccattgacattggagttaagtatgcagaaaaacaaacaagacgttttgatgaaggaaaattaaaagctggccaaagtgtaattggtctgcagatgggaaccaacaaatgtgccagccaggcaggtatgacagcttacgggactaggaggcatctttatgatcccaaaatgcaaactgacaaaccttttgaccagaccacaattagtctgcagatgggcactaataaaggagccagccaggcagggatgttagcaccaggtaccagaagagacatctatgatcagaagctaacattacagccggtggacaactcgacaatttccctacagatgggtaccaacaaagttgcttcccagaaaggaatgagtgtgtatgggcttgggcggcaagtatatgatcccaaatactgtgctgctcctacagaacctgtcattcacaacggaagccaaggaacaggaacaaatggttcggaaatcagtgatagtgattatcaggcagaataccctgatgagtatcatggcgagtaccaggatgactaccccagagattaccaatatagcgaccaaggcattgattattagatccacacagaaggagctcagtatttagtcctttgtttttattcagtgagaaccaagctagccttgagtaatttttatcttgtcttcctaaaacactattaagcttattgtacttttaagaaaaattgccttacgtacattcctttttcctttttctgcctcttccctcaatagttgccttttagtgctgtaataggttaaatcctacagcataatcaataactcgcatatgaagtaaaaaggaatactgtgaaaggggagtactcttgtacagccagttcttttatgcaaaaatctatgcatttttacaatcttatattaaactggtattttcaaacaataggaaactttttttttttttttttacagtttagtgtatctggtttctacatggaagactaaactcatgcttattgctaaatgtggtctttgccaactaaatttaagatgcagcattttagaaatttacatatcaatgtttctacagtattgtttgctaatttttaaataaagtcatgatcagtgtgaaaaaaa

SEQ ID NO: 1661 - protein, 329 aa, Homo sapiens
  ref <308>: DATABASE ACCESSION NUMBER: Refseq / NP_001830
  ref <309>: DATABASE ENTRY DATE: 2000-10-31
MTHFNKGPSYGLSAEVKNKIASKYDHQAEEDLRNWIEEVTGMSIGPNFQLGLKDGIILCELINKLQPGSVKKVNESSLNWPQLENIGNFIKAIQAYGMKPHDIFEANDLFENGNMTQVQTTLVALAGLAKTKGFHTTIDIGVKYAEKQTRRFDEGKLKAGQSVIGLQMGTNKCASQAGMTAYGTRRHLYDPKMQTDKPFDQTTISLQMGTNKGASQAGMLAPGTRRDIYDQKLTLQPVDNSTISLQMGTNKVASQKGMSVYGLGRQVYDPKYCAAPTEPVIHNGSQGTGTNGSEISDSDYQAEYPDEYHGEYQDDYPRDYQYSDQGIDY

SEQ ID NO: 1662 - DNA, 3008 bp, Rattus norvegicus; identical to SEQ ID NO: 657
  misc_feature (1)..(3008): n=a, c, g or t
  ref <308>: DATABASE ACCESSION NUMBER: Refseq / NM_022297
  ref <309>: DATABASE ENTRY DATE: 2002-05-01

SEQ ID NO: 1663 - protein, 285 aa, Rattus norvegicus; identical to SEQ ID NO: 658
  ref <308>: DATABASE ACCESSION NUMBER: Refseq / NP_071633
  ref <309>: DATABASE ENTRY DATE: 2002-05-01

SEQ ID NO: 1664 - DNA, 2494 bp, Homo sapiens; identical to SEQ ID NO: 659
  ref <308>: DATABASE ACCESSION NUMBER: Refseq / NM_018150
  ref <309>: DATABASE ENTRY DATE: 2002-11-05

SEQ ID NO: 1665 - protein, 245 aa, Homo sapiens; identical to SEQ ID NO: 660
  ref <308>: DATABASE ACCESSION NUMBER: Refseq / NP_060620
  ref <309>: DATABASE ENTRY DATE: 2002-11-05

SEQ ID NO: 1666 - DNA, 2425 bp, Rattus norvegicus
  ref <308>: DATABASE ACCESSION NUMBER: Refseq / NM_019387
  ref <309>: DATABASE ENTRY DATE: 2003-01-14
cagctccgaaagagggagcgcccgcggcgtcggtccggagtggggtcgccatggggcgaggcagcggcaccttcgagcgtctcctagacaaagccaccagccagcttctattggagacagactgggagtccattctacagatctgcgacctgatccgtcagggggacacacaagcaaaatatgctgtaaactccatcaagaagaaggtcaatgataagaacccacatgtggctttgtatgctctggaggtgatggagtctgtggtaaagaactgtggccagacagtccatgatgaagtggccaacaaacagaccatggaagaactgaaggagctgctgaagaggcaagtggaagttaatgttcggaacaagatcttgtacctgatccaggcctgggcacatgccttccggaatgaacccaagtacaaggtggtccaggacacataccagatcatgaaggtagaaggacatgtcttccctgagtttaaggagagcgacgccatgtttgctgctgaaagagcccctgactgggtggatgctgaggaatgccatcggtgcagagtacagtttggagtggtgacccgcaagcatcactgccgagcgtgtgggcagatcttttgtggcaagtgttcctccaagtactccaccatccccaagttcggcattgagaaggaagtgcgcgtgtgtgagccctgctatgagcagctgaacaagaaggcagaagggaaagctgcctctaccactgagctgcccccagagtacctgaccagccccctgtcacagcagtctcagctgcccccaaagcgggatgagacagcgctgcaggaagaggaggagctacagctggcgctggccctatcacagtcagaggctgaggagaaggaaaggatgagacagaagtcaacatacacagcgcatccaaagtcagagcctgcgcccttggcttcctctgcacccccagctggtagcctgtactcctcgcctgtgaactcatcagcacctctggctgaggacatcgaccctgagcttgcaagatacctcaaccggaactactgggagaagaaacaggaagaagctcggaagagccccacaccatctgcacctgtgcccctgaccgagccagctgcccagcccggagaaggacatacagcccccaacagcatggtagaggcccctcttccagagacagactctcagcccataacttcctgcagtggcccctttagtgagcagtaccagaacggggagtcggaggagagccacgagcagttcctcaaggccctgcagaatgcagtcagcacttttgtcaaccgcatgaagagcaaccacatgaggggccgcagtatcaccaatgactcggctgtgctgtccctcttccagtccatcaatagcacacacccacagctgctcgagctgctcaaccggctggatgagcgcaggctgtactacgaggggcttcaggacaagctggcacagatacgtgatgcccgaggggccctgagtgccctgcgtgaagagcacagggagaagctgcgccgggcagctgaggaggcggagcgtcaacgtcagatccagctggcacagaagctggagatcatgagacaaaagaagcaggagtatctggaggtgcagagacagctagctatccagcgtctgcaggaacaggagaaggaacggcagatgcgcctggagcaacagaagcagactgtccagatgcgtgcccagatgcctgccttccccttgccttatgcccagctccaggctatgcccacagctgggggtgtactctaccagccctcaggcccaaccagctttcctggcacctttagcccagcaggctcagtagagggctctccgatgcatggtgtgtatatgagccagccagccccagccactggcccctaccccagcatgcctggcaccacagcagatcccagcatggtcagcgcctacatgtacccagcaggtgcccctggggcacaggcagcccctcaggcccaggccgggcccaccaccaaccctgcctactcctcgtaccagcctactccaaccccaggctaccagaatgtggcttctcaggccccacagagcctcccagccatctcccagcctccacagaccagcaacattggctacatggggagccagccaatgtccatgggctaccagccatacaacatgcagaatctcatgaccacccttccaggccaggatgcgtctctgccagcccagcagccgtacatcacagggcagcagcccatgtaccagcagatggcacccagcactggccctccccagcagcagccccctgtggcccaaccgccacctacacagggaccgccagcacagggcaatgagacccagctcatctccttcgactgaccttgagtctggcgctcaccatccagagtaacactacagttcac

SEQ ID NO: 1667 - protein, 776 aa, Rattus norvegicus
  ref <308>: DATABASE ACCESSION NUMBER: Refseq / NP_062260
  ref <309>: DATABASE ENTRY DATE: 2003-01-14
MGRGSGTFERLLDKATSQLLLETDWESILQICDLIRQGDTQAKYAVNSIKKKVNDKNPHVALYALEVMESVVKNCGQTVHDEVANKQTMEELKELLKRQVEVNVRNKILYLIQAWAHAFRNEPKYKVVQDTYQIMKVEGHVFPEFKESDAMFAAERAPDWVDAEECHRCRVQFGVVTRKHHCRACGQIFCGKCSSKYSTIPKFGIEKEVRVCEPCYEQLNKKAEGKAASTTELPPEYLTSPLSQQSQLPPKRDETALQEEEELQLALALSQSEAEEKERMRQKSTYTAHPKSEPAPLASSAPPAGSLYSSPVNSSAPLAEDIDPELARYLNRNYWEKKQEEARKSPTPSAPVPLTEPAAQPGEGHTAPNSMVEAPLPETDSQPITSCSGPFSEQYQNGESEESHEQFLKALQNAVSTFVNRMKSNHMRGRSITNDSAVLSLFQSINSTHPQLLELLNRLDERRLYYEGLQDKLAQIRDARGALSALREEHREKLRRAAEEAERQRQIQLAQKLEIMRQKKQEYLEVQRQLAIQRLQEQEKERQMRLEQQKQTVQMRAQMPAFPLPYAQLQAMPTAGGVLYQPSGPTSFPGTFSPAGSVEGSPMHGVYMSQPAPATGPYPSMPGTTADPSMVSAYMYPAGAPGAQAAPQAQAGPTTNPAYSSYQPTPTPGYQNVASQAPQSLPAISQPPQTSNIGYMGSQPMSMGYQPYNMQNLMTTLPGQDASLPAQQPYITGQQPMYQQMAPSTGPPQQQPPVAQPPPTQGPPAQGNETQLISFD

SEQ ID NO: 1668 - DNA, 1811 bp, Homo sapiens
  ref <308>: DATABASE ACCESSION NUMBER: EMBL / AK021483
  ref <309>: DATABASE ENTRY DATE: 2002-08-06
ggtttccttgcccgtacttttaacttaccttattttccccaaaacggtggctggcgttgagactcccgggagcatgtccaggttccccggccttagggtcttcccaggcacttgttctgcttgtcccttgccttcccccacctgtgaggcccagcttcggcatcgtacggggtggttctgggccgggtggcgcatcagggtcccccagtgcctgtgaccaggcccgcccgccccatcttacagcaccactgccgggcgtgtgggcagatattctgtggaaagtgttcttccaagtactccaccatccccaagtttggcatcgagaaggaggtgcgcgtgtgtgagccctgctacgagcagctgaacaggtgagtccccgccccccatttgggctgcaggtggggcaggctctccaggctgggttttctgtccctcttggccatggtgcctgaggcctgcagaccccagaggaccctcacagcacagcagctggaaggtcaagggaaacccagggtggccgcatgccctcggaccctgccccacactagggcaggtgggtgtgagagacagggcgccgcggctccagggaccgaggctgccccgacaaacctgttgcttgggtttgggtttgggtttgtttgcatttcaactttcggaataaaacttacagaaaagttgcaagagtagcacagagaagctgcggggccgcggccagtgcctcagcggtgggaacctgcggggccgcggccggtgcctcggcggtcggtgttttgtcgcagagtttactctgcctcccctctcctgcgcgtgcgtgtgttcacacaggttttattttgaatttgcatgagtgcagatgtcatgccccttggcactcagatcttcgcctgtgatctctgagagggacagtgctctcatggccacagcagtcactcgggactgcgctgccacccagtgctggcttctgctctgtggtccacgttccatttctgccgtggtcccagcagcgtcgctgtgggtctggcctgggttgcgtgtgtttcgtatgtgggccgtgctccctgcttggttcccttttcctggaacgtgtcactgcctccctgtctcgctccgtggacatttctgggaggtcaggccgtggccacctggccccctgttcaggtctgaggctcccacctgcttaggttcgggaagctcaggagtgaggccatgccctcctcaggacatcccatccaagccagccatgtccggtgatgggccgctgcccggaaagttccttttccttcttgtaactgagaagaacttgccttgagccacgtcaagtcccgtccgtcgcagccactgcccacaagcgtgagtctgctgtgagccagcggctccatggcagggcatcccagcgccattcctgccttcacacacacttgctgccgtttccctgtgctgggggctgtgcaggtctgcctcggtgtggacttttctcttaggaaagagccccaggtcggccgagcacggtggctcatgcctgtaatcccagcactttgggaggctgaggcgggcagatcacgaggccaagagatcaagacaatcctggccaacatggtgaaatcccgtctctactttttaagtattttatacttaaaatttttgtattttatacaaaaattagcgggcttggtggcagatgcctgtagtcccagctactcgggaggctgaggcaggaaaatcacttgaacctgagaggcggagattgcagtgagccaagatggcgccactgcattccagcctgggcgacagagcaagactctatctcaaat

SEQ ID NO: 1669 - DNA, 465 bp, Rattus norvegicus
  ref <308>: DATABASE ACCESSION NUMBER: Refseq / NM_031104
  ref <309>: DATABASE ENTRY DATE: 2003-01-13
ctcctctgccgccatggctcctgtgaaaaagcttgtggcgaaggggggcaaaaaaaagaagcaggttttgaagttcacccttgactgcactcaccctgtagaagatggaatcatggatgctgccaattttgagcagttcctccaggagaggatcaaggtgaacgggaaagctggtaaccttggcggaggggttgtgaccatcgagcggagcaagagcaagatcactgtcacttccgaggagcctttctccaaaaggtatttgaaatatctcaccaaaaaatatttgaagaagaacaacctccgagactggctgcgcgtcgttgccaacagcaaggagagctacgagctgcgctacttccagatcaaccaggacgaggaggaggaggaggacgaggattaagacacattggtctgccatgttttgtattaattcataaataaaatttaggaacaaaaaaaaaaaaa

SEQ ID NO: 1670 - protein, 128 aa, Rattus norvegicus
  ref <308>: DATABASE ACCESSION NUMBER: Refseq / NP_112366
  ref <309>: DATABASE ENTRY DATE: 2003-01-13
MAPVKKLVAKGGKKKKQVLKFTLDCTHPVEDGIMDAANFEQFLQERIKVNGKAGNLGGGVVTIERSKSKITVTSEEPFSKRYLKYLTKKYLKKNNLRDWLRVVANSKESYELRYFQINQDEEEEEDED

SEQ ID NO: 1671 - DNA, 1057 bp, Homo sapiens
  ref <308>: DATABASE ACCESSION NUMBER: EMBL / BF795417
  ref <309>: DATABASE ENTRY DATE: 2001-01-15
cgccatggctcctgtgaaaaagcttgtggtgaaggggggcaaaaaaaagaagcaagttctgaagttcactcttgattgcacccaccctgtagaagatggaatcatggatgctgccaattttgagcagtttttgcaagaaaggatcaaagtgaacggaaaagctgggaaccttggtggaggggtggtgaccatcgaaaggagcaagagcaagatcaccgtgacatccgaggtgcctttctccaaaaggtatttgaaatatctcaccaaaaaatatttgaagaagaataatctacgtgactggttgcgcgtagttgctaacagcaaagagagttacgaattacgttacttccagattaaccaggacgaagaagaggaggaagacgaggattaaatttcatttatctggaaaattttgtatgagttcttgaataaaacttgggaaccaaaatggtggtttatccttgtatctctgcagtgtggattgaacagaaaattggaaatcatagtcaaagggcttcccttggttcgccactcatttatttgtaacttgacttctttttttttctgcttaaaaatttcaattactcgtggtaataccagagtagaaggagagggtgactttaccgaactgacagccattggggaggcagatgcgggtgtggacggttgtgggctgaaaggtaagtgactgtttgactttcacacagtgtgactgtccagttgtatctgtagcctttctccatgattccgggcgtcccatggggtctctcattcctttaagaaaacggaatcttctagatctccgggggaaagcttgcgataaaaggggtcttcgggcacgaaaacaatactgtataatatcataagaataaagggggcgcccaaaataatcccagggcacaatatgtcacccagtttaaaaggcacctagagattaacaatgacgggcctatacgtatgaaaaaaagatatctatagacactgtgtttagaccacatacggcaaatcatggcagcgtcgtcatgcagcataaactactactcagactacacatgca

SEQ ID NO: 1672 - DNA, 1088 bp, Rattus norvegicus
  ref <308>: DATABASE ACCESSION NUMBER: Refseq / NM_013216
  ref <309>: DATABASE ENTRY DATE: 2000-11-01
gcgcccgccgccgcgctctgtatgccgcgttcccccggcgcacccgccgccgatagtctgagccggaggagtcgccgccgctgcggttgatgtggttgggccggggctgaccaggctaccaagatgcctcagtccaagtcccggaagatcgccatcctgggctatcggtctgtgggaaagtcctcattgacaattcagtttgttgaaggtcaatttgttgattcctacgatccaaccatagaaaacacattcaccaagctgatcacagtaaatgggcaagagtatcatcttcagcttgtagacacagcagggcaggatgaatattccatttttcctcagacatactccatagatattaatggttatattcttgtgtattctgttacatcaatcaaaagctttgaagtaattaaagttatccacggcaagctgttggacatggtggggaaagtgcagataccgattatgttagtcggaaataagaaggacctgcatatggaaagggtgatcagttatgaagaaggaaaggctttggcagaatcttggaatgcagcttttttggaatcttctgcaaaagaaaatcagactgctgtggatgtttttagaaggataattttggaagcagaaaagattgacggagcggcttcacaagggaagtcttcgtgctcggtgatgtgacgcgcctgctgcagagcctgagtgtattccacctgaggaagcaagctgcctgtcatccttgaagataaaactaggcttctgttttcttctgttaacctgaacgatgtcatttgggtcagaggtcctcccctctcagattatgttaacgtctgactctgtccaaatgagttcacttccattttcaaattttaaacaatcatattttcaatttatatattgtatttcttaatattatgaccaagaattttatcggcattaatttttcagtgtagtttgttgtttaaaataatgtaatcatcaaaatgatacacgttacactactattagctaggcttcagtctatcagtgtttatctccttgtgttaaatgtatacttgtaaataaagtagctgcaaaccttaaaaaaaaaa

SEQ ID NO: 1673 - protein, 184 aa, Rattus norvegicus
  ref <308>: DATABASE ACCESSION NUMBER: Refseq / NP_037348
  ref <309>: DATABASE ENTRY DATE: 2000-11-01
MPQSKSRKIAILGYRSVGKSSLTIQFVEGQFVDSYDPTIENTFTKLITVNGQEYHLQLVDTAGQDEYSIFPQTYSIDINGYILVYSVTSIKSFEVIKVIHGKLLDMVGKVQIPIMLVGNKKDLHMERVISYEEGKALAESWNAAFLESSAKENQTAVDVFRRIILEAEKIDGAASQGKSSCSVM

SEQ ID NO: 1674 - DNA, 2870 bp, Rattus norvegicus
  ref <308>: DATABASE ACCESSION NUMBER: Refseq / NM_053864
  ref <309>: DATABASE ENTRY DATE: 2003-01-13
gaattccggcgtttgcagccgtcgtttgattagtcgcctctcgcggattaggagctagcgtctcccgcccgcctgccgccccggtgccgctgggaggaagcgagagggaggctgcctgtgggtttgtcactgctgttgctcctccacctgagtgagtcaagcccgggcctagtcggtcgcctaccattctcgtagccgttaccctcaggccgccacagccgccgaccgggagaggcgcgcgccatggcctctggagccgattcaaaaggtgatgatttatcaacagccattctcaaacagaagaaccgtcccaatcggttaattgttgatgaagccatcaatgaagataacagtgtggtgtccttgtcccagcccaagatggatgaactacagttgttcagaggtgacacggtgttgctaaaaggaaagaagagaagggaagctgtatgcattgttctttctgatgacacgtgttctgatgagaagattcgaatgaatagagttgttcggaataacctccgagttcgcctaggagatgtcatcagcatccagccatgccctgatgtaaagtatggcaaacgtatccatgtgctacccattgatgacacagtggaaggcatcactggcaatctttttgaggtataccttaagccgtacttcctggaagcatatcggcccatccgtaaaggagatattttccttgtccggggtgggatgcgtgctgtggagttcaaagtagtagagacagatcccagcccttactgtattgttgctccagacacagtgatccactgtgagggggagccaatcaagcgagaggatgaggaggagtccttgaatgaagtaggctatgatgacatcggtggttgcaggaagcagctagctcagataaaggagatggtggagctgccactgagacatcctgcactctttaaggcaattggtgtgaagcctcctcggggaatcttgctatatggacctcctgggacagggaaaaccttgattgcccgagctgtggcaaatgaaactggagccttcttctttctgatcaatggtcctgaaatcatgagcaaattggctggtgagtctgagagcaaccttcgtaaagcctttgaggaagctgaaaagaatgctcctgccatcatcttcatcgacgagcttgatgccattgcacccaaaagagagaaaactcacggggaagtggagcgtcgcatcgtgtctcagttgttgacccttatggatggcctaaagcagagagcacatgtgatagttatggcagcaaccaatagacccaacagcattgacccagccctacggcgatttggtcgctttgacagagaggtagatattggaatccctgatgctacaggacgtttggaaattcttcagatccataccaagaacatgaaactggcagatgatgtggacttggaacaggtagccaatgagactcatggtcatgtgggtgctgacttggcagccctgtgttcagaggctgctctacaggccatccggaaaaaaatggacctcattgacctagaagatgagaccattgacgctgaggtcatgaattccctggcagttactatggatgacttccggtgggccttaagtcaaagcaacccatcagcacttcgggaaactgtggtagaagtgccacaagtaacctgggaagacattggaggcctggaggatgtcaaacgggagcttcaggagttggttcagtatcctgtggagcatccagacaaattcctcaaatttggcatgactccttccaaaggtgttcttttctatggaccgcctggctgtgggaaaaccttactggccaaagccattgctaatgaatgccaggctaacttcatctccatcaagggtcctgagctgcttaccatgtggtttggggaatctgaggccaatgtcagggaaatatttgacaaggcacgacaagctgccccctgtgtactcttctttgatgagttagattcaattgccaaggctcgtggtggtaatattggagatggtggtggagctgcagaccgagtcatcaatcagatcctgacagaaatggatggcatgtccacaaaaaagaatgtgtttatcattggagctaccaaccggcctgacatcattgatcctgctatcctaagacctggccgtcttgatcagctcatttatatcccacttcctgatgagaagtcccgtgttgccatcctaaaagccaatctgcgaaaatccccagttgccaaggatgtggatttggagttcttggctaagatgactaatggcttttctggagctgacctgacagaaatttgccaacgtgcttgtaaactagccattcgtgaatctatcgagagtgagattaggcgagaacgagagaggcagacaaatccatcagctatggaagtagaagaggatgatccagtgcctgagatccgcagagatcactttgaggaagccatgcgttttgcccgacgttctgtcagtgataatgacattcggaagtatgaaatgtttgcccagacactgcagcaaagtcgaggttttggcagcttcagattcccttcagggaaccagggtggagctggcccaagtcagggcagtggaggtggcacaggtggcaatgtgtacacagaagacaatgacgatgacctctatggctaagtgatgtgccagcatgcagcgagctggcctggctggaccttgttccctgggggtgggggcgctcgcccaatgggaaccaggggtgtgcccatggcctgttccattcctcagtccgaacagttcagccccagtcagactctggacgggggttttctgttgcaaaaaaattacaaaagcgataaaataaaagtgattttcatttggga

SEQ ID NO: 1675 - protein, 806 aa, Rattus norvegicus
  ref <308>: DATABASE ACCESSION NUMBER: Refseq / NP_446316
  ref <309>: DATABASE ENTRY DATE: 2003-01-13
MASGADSKGDDLSTAILKQKNRPNRLIVDEAINEDNSVVSLSQPKMDELQLFRGDTVLLKGKKRREAVCIVLSDDTCSDEKIRMNRVVRNNLRVRLGDVISIQPCPDVKYGKRIHVLPIDDTVEGITGNLFEVYLKPYFLEAYRPIRKGDIFLVRGGMRAVEFKVVETDPSPYCIVAPDTVIHCEGEPIKREDEEESLNEVGYDDIGGCRKQLAQIKEMVELPLRHPALFKAIGVKPPRGILLYGPPGTGKTLIARAVANETGAFFFLINGPEIMSKLAGESESNLRKAFEEAEKNAPAIIFIDELDAIAPKREKTHGEVERRIVSQLLTLMDGLKQRAHVIVMAATNRPNSIDPALRRFGRFDREVDIGIPDATGRLEILQIHTKNMKLADDVDLEQVANETHGHVGADLAALCSEAALQAIRKKMDLIDLEDETIDAEVMNSLAVTMDDFRWALSQSNPSALRETVVEVPQVTWEDIGGLEDVKRELQELVQYPVEHPDKFLKFGMTPSKGVLFYGPPGCGKTLLAKAIANECQANFISIKGPELLTMWFGESEANVREIFDKARQAAPCVLFFDELDSIAKARGGNIGDGGGAADRVINQILTEMDGMSTKKNVFIIGATNRPDIIDPAILRPGRLDQLIYIPLPDEKSRVAILKANLRKSPVAKDVDLEFLAKMTNGFSGADLTEICQRACKLAIRESIESEIRRERERQTNPSAMEVEEDDPVPEIRRDHFEEAMRFARRSVSDNDIRKYEMFAQTLQQSRGFGSFRFPSGNQGGAGPSQGSGGGTGGNVYTEDNDDDLYG

SEQ ID NO: 1676 - DNA, 420 bp, Homo sapiens
  ref <308>: DATABASE ACCESSION NUMBER: EMBL / AI123512
  ref <309>: DATABASE ENTRY DATE: 1998-09-08
tttttttttttttttttctgcagtcactgcaagaaaaatgagaaaagaaacctgggaaaatccctcaagtaagtgcagtaaggaaagactagtctgtggccacagcttacctgggacaaggacaccacactgttgtcctcattgatggcttcatcaacaattaaccgattgggacggttcttctgtttgagaatggctgttgataggtcatcaccttttgaactagaaggaggaaatggagtcagtagatactcctgccccaagcgcctcgccagtctctaaaactcatacttaggaaagaaacagtgaatagatgaagctgtccctagaccagaaagctcagatgaaggaaaggcagccaaggtcacgagtagcagtatctaccatacatattacaatacccattccagcagctcctgg

SEQ ID NO: 1677 - DNA, 2098 bp, Rattus norvegicus
  ref <308>: DATABASE ACCESSION NUMBER: Refseq / NM_022592
  ref <309>: DATABASE ENTRY DATE: 2003-01-13
gaattcgggaatgtcatggatccagtgagacagatccagtgcgaccgtgaaggcaaacgctttccgttcctctcagctccaccagcttccacgtcctcgcccgaccgcgccatggagggttaccataagccagatcagcagaagctccaggccctgaaggacacagccaatcgcctgcgcatcagctccatccaggccaccaccgcggcaggctcgggacaccccacatcatgctgcagcgctgccgagatcatggctgtcctgtttttccataccatgcgctacaaggccctggatccccgaaaccctcacaatgatcgctttgtgctctccaagggccatgcagctcccatcttatatgcagtctgggctgaagctggcttcctgcctgaggcagagctgctgaacctgaggaaaatcagctctgacttggatgggcatcctgtcccgaaacaagccttcaccgatgtggccactggctccctgggccaggggctgggagctgcgtgcgggatggcatacacaggcaaatacttcgacaaagccagctaccgagtctattgcatgctgggagacggggaggtgtccgagggctccgtttgggaggccatggccttcgctggaatttacaagctggacaacctcgttgccatttttgacatcaaccgtctgggccagagcgacccagccccgctgcagcaccaagtggacgtctaccagaagcgctgtgaggcctttggctggcacgccatcatcgtggatgggcacagtgtggaggagctgtgcaaggcctttggtcaggccaagcaccaaccaacagccatcattgccaagaccttcaagggccgcgggatcacagggattgaagacaaggaggcgtggcatgggaagcccctccccaaaaacatggctgagcagattatccaggagatttacagccaggttcagagcaaaaagaagatcctcgccacgccccctcaggaggatgccccttccgtggacattgccaacatccgaatgcctaccccacccaactacaaagtgggggacaagatagccacacggaaagcctatggattggcccttgccaagctgggccacgccagtgaccgcatcatcgccctggatggagacaccaaaaattccaccttctcagagctcttcaaaaaggagcacccagaccgtttcatcgagtgctacattgctgagcagaacatggtgagcattgctgtgggctgtgccacacgtgacaggacagtgcccttctgcagcacttttgcggccttcttcacacgcgccttcgaccagatccgcatggccgccatctccgagagcaacatcaacctttgtggctcccactgcggcgtgtccattggggaagacgggccctcgcagatggccctggaagacctggccatgtttcggtcggtccctatgtccaccgtcttttacccaagtgatggagttgccacagagaaggcagtggaattagcagccaatacaaagggcatctgcttcattcggaccagccgcccagaaaatgccattatctatagcaacaacgaggatttccaggttggccaagccaaggtggtcctgaagagcaaggacgaccaagtgacagtgatcggggctggcgtaactctgcacgaggctctggctgctgcagagatgttgaagaaagagaagatcggtgtccgtgtactggaccccttcaccatcaagcccctggacaaaaagctcattctcgactgtgccagagcaaccaaaggcaggatcctcaccgtggaggaccactactatgaaggtggcataggcgaggcagtatctgctgtggtagtgggcgaacctggagtcacagtcactcgcctggcggtcagccaagtaccacgaagtgggaagccagctgagctgctgaagatgtttggtattgacaaagacgccattgtgcaagctgtgaagggccttgtcaccaagggctaggaaggacatgggatgccgggtgggtgaactacacattccagggatgttctggcaaaggtgctcaagggtgtaccgagtggaaaggtaaatatatgttttgagaaaaaccgaattc

SEQ ID NO: 1678 - protein, 655 aa, Rattus norvegicus
  ref <308>: DATABASE ACCESSION NUMBER: Refseq / NP_072114
  ref <309>: DATABASE ENTRY DATE: 2003-01-13
MDPVRQIQCDREGKRFPFLSAPPASTSSPDRAMEGYHKPDQQKLQALKDTANRLRISSIQATTAAGSGHPTSCCSAAEIMAVLFFHTMRYKALDPRNPHNDRFVLSKGHAAPILYAVWAEAGFLPEAELLNLRKISSDLDGHPVPKQAFTDVATGSLGQGLGAACGMAYTGKYFDKASYRVYCMLGDGEVSEGSVWEAMAFAGIYKLDNLVAIFDINRLGQSDPAPLQHQVDVYQKRCEAFGWHAIIVDGHSVEELCKAFGQAKHQPTAIIAKTFKGRGITGIEDKEAWHGKPLPKNMAEQIIQEIYSQVQSKKKILATPPQEDAPSVDIANIRMPTPPNYKVGDKIATRKAYGLALAKLGHASDRIIALDGDTKNSTFSELFKKEHPDRFIECYIAEQNMVSIAVGCATRDRTVPFCSTFAAFFTRAFDQIRMAAISESNINLCGSHCGVSIGEDGPSQMALEDLAMFRSVPMSTVFYPSDGVATEKAVELAANTKGICFIRTSRPENAIIYSNNEDFQVGQAKVVLKSKDDQVTVIGAGVTLHEALAAAEMLKKEKIGVRVLDPFTIKPLDKKLILDCARATKGRILTVEDHYYEGGIGEAVSAVVVGEPGVTVTRLAVSQVPRSGKPAELLKMFGIDKDAIVQAVKGLVTKG

SEQ ID NO: 1679 - DNA, 1332 bp, Rattus norvegicus
  ref <308>: DATABASE ACCESSION NUMBER: Refseq / NM_022209
  ref <309>: DATABASE ENTRY DATE: 2003-01-13
atggaggaggacattgatacccgcaaaatcaacaacagtttcctgcgcgaccacagctatgcaaccgaagctgacattatctctacggtagaattcaaccacactggagagttactagcgacgggggacaaggggggtagggttgtaatatttcagcgagaacaggagagtaaaaatcaggttcatcgtaggggtgaatacaatgtttacagcacattccagagccatgaacccgagttcgattacctgaaaagtttagaaatagaagaaaaaatcaataaaataagatggctccctcaacaaaatgcagcttactttcttctgtctaccaacgataaaactgtgaagctatggaaagttagtgagcgtgataagaggccagaaggctacaacctgaaagatgaggagggccggctccgggatcctgccaccatcacaaccctgcgggtgcctgtcctgagacccatggacttgatggtggaggccaccccacgaagagtgtttgccaatgcgcacacataccacatcaactccatatctgtcaacagcgactatgagacctacatgtctgctgatgacctgaggattaacctgtggaactttgagataaccaatcagagttttaatatcgtggacatcaagccagccaacatggaggagctcacagaagtgatcacagcagccgagttccacccccaccactgcaacacctttgtatacagcagcagcaaggggacaatccggctgtgtgacatgcgggcatctgcgctgtgtgacaggcacaccaagttttttgaagagccagaagatccaagcaatagatcgtttttctctgaaattatctcttcaatttcggatgtgaagttcagccacagtgggaggtatatcatgaccagagactatctgaccgcgaaagtctgggatctcaacatggaaaatcgccccgtagagacataccaggttcatgactacctccgtagcaagttgtgctccctctacgaaaatgactgcatttttgataaattcgagtgtgtgtggaatgggtcagacagcgtcatcatgacgggctcctacaataacttcttcaggatgttcgaccgaaacaccaagcgtgatgtgacccttgaggcctcaagggaaaacagcaaaccccgggctatcctcaaaccccgaaaagtgtgcgtcgggggcaagcgaagaaaagatgagatcagtgttgacagtctggactttagcaaaaagatcttgcatacagcttggcatccttcagaaaatattatagcagtggcggctacaaataacttatatatattccaggacaaggttaattag

SEQ ID NO: 1680 - protein, 443 aa, Rattus norvegicus
  ref <308>: DATABASE ACCESSION NUMBER: Refseq / NP_071545
  ref <309>: DATABASE ENTRY DATE: 2003-01-13
MEEDIDTRKINNSFLRDHSYATEADIISTVEFNHTGELLATGDKGGRVVIFQREQESKNQVHRRGEYNVYSTFQSHEPEFDYLKSLEIEEKINKIRWLPQQNAAYFLLSTNDKTVKLWKVSERDKRPEGYNLKDEEGRLRDPATITTLRVPVLRPMDLMVEATPRRVFANAHTYHINSISVNSDYETYMSADDLRINLWNFEITNQSFNIVDIKPANMEELTEVITAAEFHPHHCNTFVYSSSKGTIRLCDMRASALCDRHTKFFEEPEDPSNRSFFSEIISSISDVKFSHSGRYIMTRDYLTAKVWDLNMENRPVETYQVHDYLRSKLCSLYENDCIFDKFECVWNGSDSVIMTGSYNNFFRMFDRNTKRDVTLEASRENSKPRAILKPRKVCVGGKRRKDEISVDSLDFSKKILHTAWHPSENIIAVAATNNLYIFQDKVN

SEQ ID NO: 1681 - DNA, 3441 bp, Homo sapiens
  ref <308>: DATABASE ACCESSION NUMBER: Refseq / NM_004576
  ref <309>: DATABASE ENTRY DATE: 2000-11-01
ggccaggcaagcctgaatcctgtccctgccatctcgccactgcagctcgggtccagaaaggcaccattttgtcgcggctgcccgctctcccagggggaggagggatcttttttgcattttggagcggctgccaaggaggggaacctgttgggcatctccccagacccgcttgtgagcgcctccggggcgggcgggcgggaccagacccctcggggcacggcgtatcttggcacccggaggcagcggaggcaggcgcagcatcctcgctgggaactggagctggagtgagcgcaccgcgcgggaggagccgccgcagcctcgcagaacccgagtggaggaggtgacagctccattgccgggtttttattttttttctctccgcctccccgtctcctcctcaggctcggaccatggtgcagtcccactggctcccctgcccccctctcctgtgagactggctgcggggagggatcatggatacttgtctgccggcttctggttcccacgcaagtaagcctgctgtcaatggaggaggacattgatacccgcaaaatcaacaacagtttcctgcgcgaccacagctatgcgaccgaagctgacattatctctacggtagaattcaaccacacgggagaattactagcgacaggggacaaggggggtcgggttgtaatatttcaacgagagcaggagagtaaaaatcaggttcatcgtaggggtgaatacaatgtttacagcacattccagagccatgaacccgagttcgattacctgaagagtttagaaatagaagaaaaaatcaataaaataagatggctcccccagcagaatgcagcttactttcttctgtctactaatgataaaactgtgaagctgtggaaagtcagcgagcgtgataagaggccagaaggctacaatctgaaagatgaggagggccggctccgggatcctgccaccatcacaaccctgcgggtgcctgtcctgagacccatggacctgatggtggaggccaccccacgaagagtatttgccaacgcacacacatatcacatcaactccatatctgtcaacagcgactatgaaacctacatgtccgctgatgacctgaggattaacctatggaactttgaaataaccaatcaaagttttaatattgtggacattaagccagccaacatggaggagctcacggaggtgatcacagcagccgagttccacccccatcattgcaacaccttcgtgtacagcagcagcaaagggacaatccggctgtgtgacatgcgggcatctgccctgtgtgacaggcacaccaaattttttgaagagccggaagatccaagcaacagatcatttttctctgaaattatctcttcgatttcggatgtgaagttcagccacagtgggaggtatatcatgaccagggactacttgaccgtcaaagtctgggatctcaacatggaaaaccgccccatcgagacttaccaggttcatgactacctccgcagcaagctgtgttccctctatgaaaatgactgcatttttgataaatttgagtgtgtgtggaatgggtcagacagtgtcatcatgacaggctcctacaacaacttcttcaggatgttcgacagaaacaccaagcgtgatgtgacccttgaggcttcgagggaaaacagcaagccccgggctatcctcaaaccccgaaaagtgtgtgtggggggcaagcggagaaaagacgagatcagtgtcgacagtctggactttagcaaaaagatcttgcatacagcttggcatccttcagaaaatattatagcagtggcggctacaaataacctatatatattccaggacaaggttaactaggtggacaagttattacttaataatctcacatactgaatactagtcaaacaagtttttaaatgtttctttgggtcttcatttgatgcattgactttaatttccctatacaggaaatgattggaatagaattaaaaggagtccaacattcccagctccccagttctaagaaacttttgtcaaacccaataggtttgggacacttctgtttagaattgaaagctgccagctaacagtaattcttccatagttgacttgaacttctgatgcttttattgcccagttttctctggtgggtccagtgttttgttcctaggtgtctgctgcgataaaatgaggttgtctgtagtatttaaggagaaaagagataagttttttttaattaagcaattccatttgattgaaaaaaatcaacaaaaaataaacaccgtttactcttagacaaattcttcttgttttgtgaaaaaccagaactagtcagtatctcctgcccctccaccatttttttttccattttccattttcctttgaacaatttcatttaagccagagatttattgcatgaagctgagaagaggatgcagaatgacaaggaaagggcacatcaaccctgctatgctctttttttgtaagctccatagaaacagcctgagaatttggctagggaacttgaatgcttcaggggacagaaagagagcactttcgacacagtgcttcccagagtgagcttggcagggccaggcggggccaaattccatctgctgccttgttactcttgctttttgtgctcttaaatggctccatataatcttctacttacatgttccttggcttttttctcttcaaccttttccagcttatttattccattgacttctaaaggccgagtcctgggtgcttattatctggtgttctaaatgaagcagtaagttggaagcagtgccaccacccctgagtccctgagaaaggctggtctgttctttttgggtgtttctcctaagcagcaccctcccctcctcctggttttggtaaccaaaagtaacaatccatcaacctccattgtacctagaacaaaaatagccaataaaaacgctgagttgtgaagtccaatcaggcacttctaactcaccccaagctcgccatctggaaaaacagaccagaaggcttctcttctacagaaatgaactgtggggaaatcaagcagctgtgacatgaagtgaatgaagtccacttgaagctgtggaagatggttcatccttttccccagttgaggatccagatttataacttctagaaagccatttccagaaggttctatgtggcacacccctaggaaaggcactaaatgcatgcaaaggatttataaacttaggaaagtagatgggtggagtccagaaaactggttctgggttaatatctctacatctgtcttgatgactcatttctcctaactcccatttagtgcagggtaaatggtttgagatgagagtttttcaatgaaagggaaattttctttcagtttacagatgtattagaagtcctgactttcaagtgtaatttgctttggaggaggaaaaaaaaaaaaaa

SEQ ID NO: 1682 - protein, 443 aa, Homo sapiens
  ref <308>: DATABASE ACCESSION NUMBER: Refseq / NP_004567
  ref <309>: DATABASE ENTRY DATE: 2000-11-01
MEEDIDTRKINNSFLRDHSYATEADIISTVEFNHTGELLATGDKGGRVVIFQREQESKNQVHRRGEYNVYSTFQSHEPEFDYLKSLEIEEKINKIRWLPQQNAAYFLLSTNDKTVKLWKVSERDKRPEGYNLKDEEGRLRDPATITTLRVPVLRPMDLMVEATPRRVFANAHTYHINSISVNSDYETYMSADDLRINLWNFEITNQSFNIVDIKPANMEELTEVITAAEFHPHHCNTFVYSSSKGTIRLCDMRASALCDRHTKFFEEPEDPSNRSFFSEIISSISDVKFSHSGRYIMTRDYLTVKVWDLNMENRPIETYQVHDYLRSKLCSLYENDCIFDKFECVWNGSDSVIMTGSYNNFFRMFDRNTKRDVTLEASRENSKPRAILKPRKVCVGGKRRKDEISVDSLDFSKKILHTAWHPSENIIAVAATNNLYIFQDKVN

SEQ ID NO: 1683 - DNA, 443 bp, Rattus norvegicus
  ref <308>: DATABASE ACCESSION NUMBER: EMBL / AI103396
  ref <309>: DATABASE ENTRY DATE: 2000-03-03
ggcacgaggaggggttatataaatttatttctcatgtaatgattgctttagaaaaaaaaatccccactttcaatgttgatcccatctcacgggtttttaaaaagtgataaaaaggacaaggacctttgcggccgctattctacgctccattcccaacaaactaggaggagtcgtagccctaatcttatcaatcctaatcttagccttcctaccattcctgcatacttcaaaacaacgcagcttaacattccgcccaatcacccaaatcctttactgaatcctagtagccaacctcctagtcttaacatgaatcggaggccaaccagtagaacacccatttatcattattggccaactagcctccatcagctacttttcaattatcctcattctcataccaatctctggaattgttgaagacaaaatgttaaaatgaaattaat

SEQ ID NO: 1684 - DNA, 2528 bp, Rattus norvegicus
  ref <308>: DATABASE ACCESSION NUMBER: Refseq / NM_013113
  ref <309>: DATABASE ENTRY DATE: 2003-01-14
gagcccgcgctccactcctttcgtccttcccggtgactttccctccttgtccctggtccatctcgccagaggtcatagcaggcagagtggtgcagctacagcttgaagcagcagctgcggggttcgctgagccccccgggaggcgatcggagcgcggggagagcaggagtgcggccacgcgcccacctctaggtgcggggctcggagccgcccagcccgcgcgcgccctcctccctcctccctcctccctccgcccccgccgcacctccccctcctcccgctctgcttaggctgctccgcggcgcgcctcgcactcggagagccgcagcggcagcggcgcgtctcgcctttggagacagagccgggccgcggggacaccgagcagtcgccgcgaggacgccagggcgcgcgcagcactcgctttccctcggcctcggccgccactgctgagcagacaccatggcccgcggaaaagccaaggaggaaggcagctggaagaaattcatctggaactcggagaagaaggagtttttgggcaggaccggtggtagttggtttaagatccttctgttctacgtgatattctatggctgcctggccggcatcttcatcgggaccatccaagtgatgctgcttaccatcagtgagctgaaacccacgtaccaggaccgtgtggccccgccaggattgacacagattcctcagatccaaaagactgaaatttccttccgtcctaatgaccccaagagctacgaggcctatgtgctaaacatcatcaggttcctggaaaagtacaaagattcggcccagaaggacgacatgattttcgaggattgtggcagtatgcccagtgaacccaaggagcggggagagttcaatcatgaacgaggagagcgcaaggtgtgcaggttcaagcttgactggctggggaactgctctggtctcaatgatgaatcctacggctacaaagaggggaagccctgtatcattatcaagctcaaccgaatgctgggcttcaaacctaagcctcccaagaatgaatccttggagacttaccctctgacgatgaagtataatccaaacgtcctacctgtccagtgcactggcaagcgcgatgaggataaggataaagttggaaacatagagtactttgggatgggcggattctatggctttcctctgcagtactatccctactacggcaaactcctgcagcccaagtacctgcagcccctgctggccgtgcagttcaccaacctcaccttggacactgaaatccgcattgagtgtaaggcgtatggtgagaacattgggtacagtgagaaagaccgttttcagggacgctttgatgtaaaaattgaagttaagagctgatcacaagcacaaatctttcccactagccatttaataagttaaagaaaaagatacacaaacctactagtcttgaacaaactgtcatacgtatgggacctacacttaatctctatgctttacactagcttctgcatttaataggttagaatgtaaatttaaagtgtagcaatagcaacaaaatatttattctactgtaaatgacaaaagaaaaaaataaaaattgagccttgggacgtgcccatttttactgtaattagactccgtaactgacttgtagtgagcagtgttctggcccctaagtatcgccgccgtctgttttatttagtgtacagtactataggtgcgcactctggtcattttccaagccatgttttatcatatctgttttctactttccgtgagcgaggtttgctgtccaaggtgtaaatactcatgggaataaaactggcatggtactttcccttcctttctcattttcttggctctgagatttcaaaggtaacggcccatcaacaagcatttttaacacactccatagtctttccctgtggtatcaggtctttactattgtttttctttgtttcctggggctggggggtgggctgtcgtgggggaactgccctttaaattctaagtgacgctgcagaaaaacaacggtgatgggttgtgttgtgctccgtgctgagtgctgtctcgccatctctccccttgtcctccagtgtgctccgaagctgtgtctgatctggatctgcccgtcactttggctagtgatggggctagttaatttgcttagtacatttccttttccttctttcctttctctggaggcatcatgtgctggtgctgtgtctttatgaatgttttaaccattttcatggtggaagaattttatatttatgcagttgtacaattttatttttttctgcaagaaaaagtgtaatgtatgaaataaaccaaagtcacttgtttgaaaataaaatctttattttgaactttataaaaagcaatgcagtaccccatagactggtgttaaatgttgtctacagtgctaatccatgttctagcatatgtagtgattgccaggagtacagtgctcttgttggtcttgtgtcagtcaggttaacacaatggacaataaaagaatgaacacattc

SEQ ID NO: 1685 - protein, 304 aa, Rattus norvegicus
  ref <308>: DATABASE ACCESSION NUMBER: Refseq / NP_037245
  ref <309>: DATABASE ENTRY DATE: 2003-01-14
MARGKAKEEGSWKKFIWNSEKKEFLGRTGGSWFKILLFYVIFYGCLAGIFIGTIQVMLLTISELKPTYQDRVAPPGLTQIPQIQKTEISFRPNDPKSYEAYVLNIIRFLEKYKDSAQKDDMIFEDCGSMPSEPKERGEFNHERGERKVCRFKLDWLGNCSGLNDESYGYKEGKPCIIIKLNRMLGFKPKPPKNESLETYPLTMKYNPNVLPVQCTGKRDEDKDKVGNIEYFGMGGFYGFPLQYYPYYGKLLQPKYLQPLLAVQFTNLTLDTEIRIECKAYGENIGYSEKDRFQGRFDVKIEVKS

SEQ ID NO: 1686 - DNA, 368 bp, Rattus norvegicus
  ref <308>: DATABASE ACCESSION NUMBER: EMBL / AI112237
  ref <309>: DATABASE ENTRY DATE: 2000-03-03
ccgcgcgcgggcagctggagacggtggagtccgtcatgttggcgatggtggacacattcagccccggtacagggagtttccccagcttacccagtcccaggtgatccatggtgaggtcttaagctcactcatgtggttctggattctttggagattttggcatgactcggatgctgtgctgggtcacttttcatatccagatccatcgaagtggacagatgaagaactgggggtccctcctgacgacgaggactgaaagtgtaaactcctctctgtacgagagcaaggtgagacaattcaagaaattacagccctcattaaaggtgtaaattaaagtggcttgccaaaatgaaaaaaaaaaaaaaaaa

SEQ ID NO: 1687 - DNA, 2089 bp, Rattus norvegicus
  ref <308>: DATABASE ACCESSION NUMBER: Refseq / NM_031785
  ref <309>: DATABASE ENTRY DATE: 2003-01-13
ctatgatggcggcaacagtggtatctcggatacgaaccgggacacggtgggctccagtcctgtggctgcttctgtcgttggtggcagtggcggcagcagtggctgcggagcagcaggtgccactggtactgtggtcgagtgaccgggacctctgggctcctgtggccgacacacatgagggtcatattaccagcgatatgcagctttctacctacttagaccctgccctggagctgggcccccgcaatgtattgctgttcctgcaggacaagctgagcattgaggatttcacagcatacggtggtgtgtttggaaataaacaggacagtgccttttctaacctggagaatgccctggacttggccccctcctcactggtacttcctgctgtggactggtatgcaatcagcactctgaccacctacctacaggagaagcttggagctagtcccttgcatgtggatctagctaccctaaaggagctgaagctcaatgccagccttcctgccctgctgctcatccgtctgccctacacagccagctccggtctgatggcgcccagggaggtccttacaggtaatgatgaggtcatcggacaggtactgagcacacttgagtctgaagatgttccttacaccgcggctcttactgcagtccgcccttctagagtggcccgtgatgtagccatggtggctgggggtctaggtcgccagctgcttcagactcaggtggcatcacctgcgatccatcctcctgtgagttacaatgacactgccccaaggatcctgttttgggcacaaaacttctctgtggcatacaaagacgaatggaaagacttgacctccctcacctttggtgtggagaatcttaacttgaccggctccttctggaatgactcctttgccatgctttcactgacctatgaaccactctttggtgcaacagtgacattcaagttcattctggctagtcgcttctacccagtatctgcccgatattggtttaccatggaacgacttgaaatccacagcaatggctcggttgcccatttcaatgtttcccaagtcacaggacctagtatctattctttccactgtgagtacgtcagcagtctgagcaagaaaggcagtctccttgtgaccaacgtgccctccctctggcagatgactcttcataacttccagatccaagccttcaatgtgactggtgaacagttctcctatgctagcgactgtgctggcttcttctctccgggcatctggatggggctgctcaccaccctcttcatgcttttcatattcacctatggtctgcacatgatactcagcctaaagaccatggatcgctttgatgaccgcaagggccccaccatcactttgacccagattgtgtgacatataccagagagggattgagggagtattggtgtctaggtttccattttgtgacacagtggatggaaaggtttgtcctcttcctactatagcatgaaccctacatacaccaccctcagcctgtcttgcttcctctttcctggacagggacttccctgaggctatcccccacttctaccaacaaagtgtattattcttcatagataaatcttccaggcttcatcaagaggggaagggaccttaattctagggtgcccccctttccctttctccttatttattcttgcccctctgctattatttcgtgctgtttatagtgcttttgtgtagtaaatactcactccccaagctttatggagctttccagcaatagccatgaacttgaggtcccttgaatttgagaggtgtggaaaggctagttaactgtccagcttagcctttatgggttttttttttttggcgggtgggggttaagaatgagcggtacactggggtttatttctgtgacctgagaaggaagaaatcaccacgagaactggagaaacaaagtgtactcattgggtttctggtttgttctcacaaggattgcctgtcaagaagccagaagtatgtgtgtgtgtgtgtggggggggtgtgctctgttgtttcattcctaataaaataaagacgtgttgccatgaaaaaaaaaaaaaaaa

SEQ ID NO: 1688 - protein, 463 aa, Rattus norvegicus
  ref <308>: DATABASE ACCESSION NUMBER: Refseq / NP_113973
  ref <309>: DATABASE ENTRY DATE: 2003-01-13
MMAATVVSRIRTGTRWAPVLWLLLSLVAVAAAVAAEQQVPLVLWSSDRDLWAPVADTHEGHITSDMQLSTYLDPALELGPRNVLLFLQDKLSIEDFTAYGGVFGNKQDSAFSNLENALDLAPSSLVLPAVDWYAISTLTTYLQEKLGASPLHVDLATLKELKLNASLPALLLIRLPYTASSGLMAPREVLTGNDEVIGQVLSTLESEDVPYTAALTAVRPSRVARDVAMVAGGLGRQLLQTQVASPAIHPPVSYNDTAPRILFWAQNFSVAYKDEWKDLTSLTFGVENLNLTGSFWNDSFAMLSLTYEPLFGATVTFKFILASRFYPVSARYWFTMERLEIHSNGSVAHFNVSQVTGPSIYSFHCEYVSSLSKKGSLLVTNVPSLWQMTLHNFQIQAFNVTGEQFSYASDCAGFFSPGIWMGLLTTLFMLFIFTYGLHMILSLKTMDRFDDRKGPTITLTQIV

SEQ ID NO: 1689 - DNA, 1688 bp, Rattus norvegicus
  ref <308>: DATABASE ACCESSION NUMBER: Refseq / NM_031851
  ref <309>: DATABASE ENTRY DATE: 2002-11-05
cagaaggagtcatggctgccaaagtgtttgagtccatcggaaagttcggcctggccttagcagttgcaggaggcgtggtgaactctgctctatataacgtggatgccggacacagagctgtcatcttcgaccgattccgtggcgtgcaggacatcgtggtaggggaagggactcacttcctcatcccctgggtacagaagccaatcatctttgactgccgctctcgaccacgtaatgtgccggtcatcaccggcagcaaagacttgcagaatgtcaacatcacactacgtatcctcttccggccggtggccagccagcttcctcgtatctacaccagcattggcgaggactatgatgagcgggtgctgccatctatcaccacagagatcctcaagtcggtggtggctcgattcgatgctggagaattgattacccagcgagagctggtctccaggcaggtgagtgatgacctcacagagcgagcagcaacattcgggctcatcctggatgacgtgtccctgacacatctgaccttcgggaaggagttcacagaggcggtggaagccaaacaggtggctcagcaggaagcagagagagccagatttgtggtggaaaaggctgagcagcagaagaaggcggccatcatctctgctgagggtgactccaaagcggctgagctgatcgccaactcactggccaccgccggggatggcctgatcgagctgcgaaagctggaagctgctgaggacattgcttatcagctctcccgctctcggaacatcacctacctgccagcagggcagtccgtgctcctccagctcccccagtaaggccagccagccagggcctccatcgctctgaatgacgccttccttctgccccaccccagaaatcactgtgaaatttaatgattggcttaacatgaaggaaataaaggtaaaatcacttcatatctctaattatcaaatgaagcttttattgttacactttttgcccactttcataacaaaattgccaagtgcctatgcagactggccttccaccctgggtgctggcagtcggcggaagaaaggcagggcagtgtgtgtggtggacggggagccagctggcagcctgagtagaccttgagcctccattctgccatatattgaagatttacagacagtggtgcacacacgtgaaccaaaagcaagccctcaatttttccagccatacgaacccggacagatgcagctgaggagggcctgaggaagtggtctgtcttaactgtaaggccattccctcttaaccgtgaccagcggaagcaggtgtgtgcgtgcgactagggcatggagtgaagaatctgcccatcacggtgggtgggcctaattttgctgcccccaccagagacctaaactttggatagacttggatagaataagaggcctggactgagatgtgagtcctgtggaagacttcctgtccaccccccacattggtcctctcaaataccaatgggattccagcttgaaggattgcatctgccggggctgagcacacctgccaaggacacgtgcgcctgccttcccgctccctctcttcgagattgcccttccttcccaagggctgtgggccagagctccgaaggaagcaatcaaggaaagaaaacacaatgtaagctgctgtcaataaatgacacccagaccctc

SEQ ID NO: 1690 - protein, 272 aa, Rattus norvegicus
  ref <308>: DATABASE ACCESSION NUMBER: Refseq / NP_114039
  ref <309>: DATABASE ENTRY DATE: 2002-11-05
MAAKVFESIGKFGLALAVAGGVVNSALYNVDAGHRAVIFDRFRGVQDIVVGEGTHFLIPWVQKPIIFDCRSRPRNVPVITGSKDLQNVNITLRILFRPVASQLPRIYTSIGEDYDERVLPSITTEILKSVVARFDAGELITQRELVSRQVSDDLTERAATFGLILDDVSLTHLTFGKEFTEAVEAKQVAQQEAERARFVVEKAEQQKKAAIISAEGDSKAAELIANSLATAGDGLIELRKLEAAEDIAYQLSRSRNITYLPAGQSVLLQLPQ

SEQ ID NO: 1691 - DNA, 3000 bp, Rattus norvegicus
  ref <308>: DATABASE ACCESSION NUMBER: Refseq / NM_013115
  ref <309>: DATABASE ENTRY DATE: 2003-01-14
ggcaatgttgcaagctgaggccccttgggggtgtgggctctgcaactggcaaagtcaactatgtctgcacttcgaggctgcacagtcgtgacagagagatgacttgagggggacggcgtttatctccacaacgatgtccataaacagttccaagcagccggcgtcctctgcagctggactcatcgccaacacgacttgccagacggagaaccggctttcagtgttcttttcaataatcttcatgacggtggggattgtatctaacagcctggccattgccatcctcatgaaggcatatcagagatttagacggaagtcgaaggcttctttcctgctcttggctagtggcctggtgatcacagacttcttcggccacctcatcaacggagggatagctgtcttcgtatacgcttctgataaagactggatccgcttcgatcaatcgaacatcctgtgcagtgtttttgggatctccatggtgttctctggcttgtgcccacttttcctgggcagtacgatggccattgagaggtgcatcggggtcaccaaccctctattccactctacaaagatcacgtctaagcatgtgaaaatgatactgagcggtgtgtgcatgtttgctgtcttcgtggccctgttgcccatccttggacaccgagattatcaaatccaagcatccagaacttggtgcttctacaacacagagcacatcgaagactgggaagacaggttctatctcttgttcttttcttccctgggactcttagctctcggcatctcattctcgtgcaacgccgtcacgggagtcacacttttgagagtgaagtttagaagtcagcagcacaggcaaggcaggtctcaccacctggagatggtcattcagctcctggccataatgtgtgtctcctgcgtctgctggagtccctttctggtgacgatggccaacattgcaatcaatggaaataattccccagtgacctgtgagacgacgctctttgctctccgaatggcaacctggaaccagatattagacccctgggtctacattctgctacggaaggctgtccttaggaacctgtacaagcttgccagtcgctgctgtggagtgaacatcatcagcttgcacatctgggaactcagctccatcaagaattccttaaaggttgctgctatctctgagtcaccggctgcagagaaggagaatcagcaagcatctagtgaggctggactgtaagtcaatgcacagctagaagaaagttatgggaacttccgaaacatcttacctgaccagactcagagcataactggaacacttggacctctgtgtgtagttcgggagtacactggtcagacaaagcttctgacttttgttatgctggctgctgcatggttgtgcattttcatttgttggtgtcaacaggagattcaacatggtggagttaagtagagtacacattttatctgcgtgacttatgtttttggaataaatgaatctgttgaggccctgtgcctttatttgacctatttttccaagcaccttaatgctacctgcaccgtgacatggccatttgaggagcactgacttgcagacaaagcttaaagtaacacaagactttttgtgtttgtgtgtgcagctctgctctgtttaccaacccacgtgtcctcaatgtctgcatgaccatgacatctgagtctcatggtgactttgatggccactatgtaggcagctcagcttgacattgtggggctgatgaggataatcattcttgtcacaactcacatgtgtggttgcttgcatttgttgttgtgaaggtcaattattttttccacattggctgtcctcctataaagtcataggttttcagtgtctaagtaatccccctttcctctgaaaattgtagaggaatacaggctttatcttagcacagattcagctcatgatagcatatcataagccctattgtggatgatgcaaacattgaaatcccacttacacatgccaagaacatggcagacattgctttacctgagctatcatttctgtgtcagagaataaaaaacgatcaagacacattcgaagtctcttggagctattgtgtttctgccttacacacacaggcataagggagttctgttaacagtaatttcactaaataagttgaaccacacttccaaaagcctgtgttatcagtgaggagtggaaagatctgaaattagccaggagttgggatcactgttgtggttaacccgaggctaagggacaagattctgtcgccaagtttcccaatcttaattcacacttctcctttgtataatttaacacaaagatactcaatttcagtaatcactctaaacattagttccatcagtggctacggttagtggttatattttataaagaaatgtattttcatatttaaaaaattcctttcttttatcgtttgtctttatttaaaaatttctatttttttctttgctatatgtatgagtgtttcacccgaatgtatttccgagcattacgtaccttcctagaacttacttaaaccagaaaaggacatcgggtccttacagatggttataagctaccatgtggatactaggaattgagcccaggttctctggaagagcagctgtagagagaattttaatccagcaatttgtgaattcaatagacttaaaatagtacctccaacatggtttctctggcaaaagatcacatccgaagagcttctaggtttatatgatctggcttgaatgcagacattctctggattatagtacaatctggctgtaacacagacacacccttagtacacacctttaatccctaacagtgaaggaaagttagtttgtagaaggaagtagtcacttttgaaatcgatgtccagttgagggtcagacagagtgacgaatcagagaaagttttgacagaatgagttagagaaaagatgtgctcaattcacgtgagaacagtacggaaagagaggatgccgaaaaggg

SEQ ID NO: 1692 - protein, 366 aa, Rattus norvegicus
  ref <308>: DATABASE ACCESSION NUMBER: Refseq / NP_037247
  ref <309>: DATABASE ENTRY DATE: 2003-01-14
MSINSSKQPASSAAGLIANTTCQTENRLSVFFSIIFMTVGIVSNSLAIAILMKAYQRFRRKSKASFLLLASGLVITDFFGHLINGGIAVFVYASDKDWIRFDQSNILCSVFGISMVFSGLCPLFLGSTMAIERCIGVTNPLFHSTKITSKHVKMILSGVCMFAVFVALLPILGHRDYQIQASRTWCFYNTEHIEDWEDRFYLLFFSSLGLLALGISFSCNAVTGVTLLRVKFRSQQHRQGRSHHLEMVIQLLAIMCVSCVCWSPFLVTMANIAINGNNSPVTCETTLFALRMATWNQILDPWVYILLRKAVLRNLYKLASRCCGVNIISLHIWELSSIKNSLKVAAISESPAAEKENQQASSEAGL

SEQ ID NO: 1693 - DNA, 2099 bp, Rattus norvegicus
  ref <308>: DATABASE ACCESSION NUMBER: Refseq / NM_030846
  ref <309>: DATABASE ENTRY DATE: 2003-01-13
aagctaggctgctctgctgcttctgcgatcgggcggcggcggggcgagccaagctgcggcgggggacggcggtctgggcagcgggcgccgcagtcagggagcagcagtgaggttggcggccgcgggcggcacacaaggcgggccaggccgggtgagggagcggacggcacgtcgcgggtggcattgtgtgtcccagtgtgcaagaatagccccagaagaggaaaggctgagcccagagcgcttcagcagggaagattcccttccccccgcttcaggctgctgagcactgagcggcgctcagaatggaagccatcgccaaatatgacttcaaagctactgctgacgatgagctgagcttcaagaggggggacatccttaaggttttgaatgaagagtgtgatcagaactggtataaggcagaactcaatgggaaagatggcttcatccccaagaattacatagaaatgaaaccacatccgtggttttttggcaaaatccccagagcaaaggcagaagaaatgcttagcaaacagcggcatgacggggccttcctgatccgagagagcgagagcgctcctggggatttctccctgtcagtcaagtttggaaatgatgtacagcacttcaaggtgcttcgtgacggagccgggaagtacttcctgtgggtggtgaagtttaattctttgaatgagctggtagattaccacagatcaacatccgtgtccaggaaccagcagatattcctccgggacatagaacaggtgccacaggaggatggtgagctgggctttcgccgaggagacttcattcatgtcatggataactcagatcccaattggtggaaaggggcctgccatgggcagaccggcatgtttccccgcaattatgtcaccccagtgaaccggaacgtctaagaagcaaaagagattatttaaagaaagtgaaaagttgagaccgttcacaagaattacacccacacgctgcctgtcacagcctgtgagggaacgcagaacacctggctgggtcccacgggcgaccctctcacttaagttgcaacttttgggggtgggaaggggtgtttgatttcataatgccaaaacttaacctattgaatgaattacagtttttattacggaatctcgccgctactcgtgttcccttcctgtgtccttttttcgcgttctttctttcctgtccagtgcatgatgtttaaggccacatatagtccagctgatgccaataataaaagaaaagaaaccaagtgggctggtattttctctatgcaaatgtctgtggagatggatggactagaggagccggattcttcacacacaggggcagccattgtatcggggcccttggttgggattcactggagatgcctaagggcatctgcctccggcctgaagcctggagcattccatcagagttggaattagggcaggagcctgctgcccacccatggtctcctgagagccagactgcagagctgccctccccactgcctcccttcagtgtctcacttgttttcatagtgcctttgtcttatttcaagggtgttcatgagtggtgtctttaccttttttatttttttaaataagttaaagatagtccagagcttttcagttgattagtctcctatcctatgtacatattttcctctcagggcaggagaaagaggacagagaaaggagctggcagaagcagagagggtgtatttcccatcttaaatgggccagaggtcttgaaggatcagcttttacattgtgagctttgacacctgcttcagctcagactcaccggccctcagagtccctgccctccaggtcccagttgccctttctatgcctagagccactaagggtcaaaacacaaggcaggcaggggggagcgggtggcatccttccctctcataggcctacaagcaggtggaagttgaaaattctggcctttaatttttcttgctcttacaattaagtcctcgttctcagttgcacatttccccccacctgtccacgagtacgaatggcaggattcgggggctggttcgatggttgcatctctgtgcacaacagtggtgtttcgacgtcgtctccgtc

SEQ ID NO: 1694 - protein, 203 aa, Rattus norvegicus
  ref <308>: DATABASE ACCESSION NUMBER: Refseq / NP_110473
  ref <309>: DATABASE ENTRY DATE: 2003-01-13
MEAIAKYDFKATADDELSFKRGDILKVLNEECDQNWYKAELNGKDGFIPKNYIEMKPHPWFFGKIPRAKAEEMLSKQRHDGAFLIRESESAPGDFSLSVKFGNDVQHFKVLRDGAGKYFLWVVKFNSLNELVDYHRSTSVSRNQQIFLRDIEQVPQEDGELGFRRGDFIHVMDNSDPNWWKGACHGQTGMFPRNYVTPVNRNV

SEQ ID NO: 1695 - DNA, 324 bp, Rattus norvegicus
  misc_feature (1)..(324): n=a, c, g or t
  ref <308>: DATABASE ACCESSION NUMBER: Refseq / NM_012875
  ref <309>: DATABASE ENTRY DATE: 2003-01-14
tctctcttgattcagatcctcgccatgtcttctcacaagactttcagaatcaagcgattcctggcaaagaaacaaaagcaaaatcgtcctattcctcaatggattcggatgaaaactggtaacaaaatcaggtacaactctaagagaagacactggaggagaacgaagctgggtctataaggagtcacactacggccagactgaggatttctactgaatcaccgtcatcgatcagtccgaccagatggatttcaacatttttaacctagagatttacttgtgtctgaactaatttgtccagtaataaaatttagaacctttcan

SEQ ID NO: 1696 - protein, 51 aa, Rattus norvegicus [sequence omitted]

SEQ ID NO: 1697 - DNA, 538 bp, Rattus norvegicus
  ref <308>: DATABASE ACCESSION NUMBER: EMBL / AI171355
  ref <309>: DATABASE ENTRY DATE: 2000-03-03
ggcacgaggcaccccctattcaaaatcatcaaccactcttttatcgacctccccgccccatctaacatctcatcatgatgaaacttcggttctctactaggagtatgcctcatagtacaaatcctcacaggcttattcctagcaatacactacacgtctgataccataacagcattctcatcagtcacccacatctgccgagacgtaaactacggctgactaatccgatacctacacgccaacggcgcctcaatatttttcatctgcctattcctccatgtgggacgaggactatactatggatcctacactttcctagaaacctgaaacattgggatcatcctactatttgcagtcatagcaactgcattcatgggctatgtactcccatgaggacaaatatcattctgaggagctacagtaattacaaacctattatcagctatcccttacattgggactaccctagtcgaatgaatctgaggaggcttctcagaagacaaagaaaccctaacacgcttcttcgcaaaaaaaaaaa

SEQ ID NO: 1698 - DNA, 1761 bp, Rattus norvegicus
  ref <308>: DATABASE ACCESSION NUMBER: Refseq / NM_012600
  ref <309>: DATABASE ENTRY DATE: 2003-01-14
atggatccccgagccccccgccgccgacacacccaccagcgcggctacctgctgacgcgggacccgcatctcaacaaggacttggcttttactctggaagagaggcaacagctgaagattcatggcttgttgccaccctgcattgtcaaccaggagatccaggtccttagagtaattaagaatttcgagcgtctgaactctgacttcgacaggtatcttctgttaatggatctgcaagataggaatgagaagctcttctacagtgtgcttatgtctaatgttgaaaagttcatgcctatcgtttacactcccaccgtgggtcttgcatgccagcaatacagtttggcattccggaagccaagaggcctctttatcagtatccacgacaaagggcatattgcttcagttcttaacgcatggccagaagatgttgtcaaggctattgtggtgactgatggagagcgaatcctcggcttgggcgaccttggttgtaacgggatgggcatccctgtgggtaaactggccctgtacacagcgtgcggaggggtgaatccacaacagtgtctacccatcactttggacgtcggcacagaaaatgaggagttacttaaagatcccttgtatattgggctgcggcacaggcgagtgagaggccctgaatatgatgcgtttttggatgaattcatggaggcagcgtcttccaaatatggcatgaattgccttattcagtttgaagattttgccaatctgaatgcatttcgtctcctgaacaagtatcgaaacaagtattgcacatttaacgatgatattcaaggaacagcgtctgtggcagttgccggccttcttgctgctcttcggataaccaagaacaagctctctgatcagacagtgctgttccagggagccggcgaggctgccttggggattgctcatctgattgttatggccatggagaaggaaggtttatcaaaggagaaagctagacaaaagatatggttggttgactcaaaaggattaatagttaaggggcgtgcttctctcacagaagagaaagaggtgtttgcccatgaacatgaagaaatgaagaacctagaagccattgttcagaagataaaaccaaccgctctcataggagttgctgcaattggtggtgctttcacagaacaaattctcaaggatatggctgccttcaacgagcggcccatcatctttgctttgagtaatccgaccagcaaagctgagtgttctgcagaggagtgctataaagtgaccaagggccgtgcgatctttgccagcggcagtccttttgatccagtcactcttccagatggacggactctgtttcctggccaaggcaacaactcctatgtgttccctggagttgctcttggggtagtggcctgtggactgagacacatcaatgattcggtcttcctcaccacggctgaggtcatatcccagcaagtgtcagataaacacctagaagaaggccggctctatcctcctttgaataccatccgagatgtttccttgaaaatcgcagtaaagattgtgcaagatgcatacaaagaaaagatggccactgtttatcctgaaccccaaaacaaagaagaatttgtctcctcccagatgtacagcactaattatgaccagatcctacctgattgttattcgtggcctgaagaagttccagaaaatacagaccaaagtcaatcagtaacacaacagctagaatttttaactttattaataagatcttga

SEQ ID NO: 1699 - protein, 586 aa, Rattus norvegicus
  ref <308>: DATABASE ACCESSION NUMBER: Refseq / NP_036732
  ref <309>: DATABASE ENTRY DATE: 2003-01-14
MDPRAPRRRHTHQRGYLLTRDPHLNKDLAFTLEERQQLKIHGLLPPCIVNQEIQVLRVIKNFERLNSDFDRYLLLMDLQDRNEKLFYSVLMSNVEKFMPIVYTPTVGLACQQYSLAFRKPRGLFISIHDKGHIASVLNAWPEDVVKAIVVTDGERILGLGDLGCNGMGIPVGKLALYTACGGVNPQQCLPITLDVGTENEELLKDPLYIGLRHRRVRGPEYDAFLDEFMEAASSKYGMNCLIQFEDFANLNAFRLLNKYRNKYCTFNDDIQGTASVAVAGLLAALRITKNKLSDQTVLFQGAGEAALGIAHLIVMAMEKEGLSKEKARQKIWLVDSKGLIVKGRASLTEEKEVFAHEHEEMKNLEAIVQKIKPTALIGVAAIGGAFTEQILKDMAAFNERPIIFALSNPTSKAECSAEECYKVTKGRAIFASGSPFDPVTLPDGRTLFPGQGNNSYVFPGVALGVVACGLRHINDSVFLTTAEVISQQVSDKHLEEGRLYPPLNTIRDVSLKIAVKIVQDAYKEKMATVYPEPQNKEEFVSSQMYSTNYDQILPDCYSWPEEVPENTDQSQSVTQQLEFLTLLIRS

SEQ ID NO: 1700 - DNA, 2212 bp, Homo sapiens
  ref <308>: DATABASE ACCESSION NUMBER: Refseq / NM_002395
  ref <309>: DATABASE ENTRY DATE: 2001-03-23
ccgccgccacagctgcagtcagcaccgtcaccccagcagcatccgccgcctgcaccgcgcgtgcggcccgccccggcctgaccccgccgccgaacccggcgccagccatggagcccgaagccccccgtcgccgccacacccatcagcgcggctacctgctgacacggaaccctcacctcaacaaggacttggcctttaccctggaagagagacagcaattgaacattcatggattgttgccaccttccttcaacagtcaggagatccaggttcttagagtagtaaaaaatttcgagcatctgaactctgactttgacaggtatcttctcttaatggatctccaagatagaaatgaaaaactcttttatagagtgctgacatctgacattgagaaattcatgcctattgtttatactcccactgtgggtctggcttgccaacaatatagtttggtgtttcggaagccaagaggtctctttattactatccacgatcgagggcatattgcttcagttctcaatgcatggccagaagatgtcatcaaggccattgtggtgactgatggagagcgtattcttggcttgggagaccttggctgtaatggaatgggcatccctgtgggtaaattggctctatatacagcttgcggagggatgaatcctcaagaatgtctgcctgtcattctggatgtgggaaccgaaaatgaggagttacttaaagatccactctacattggactacggcagagaagagtaagaggttctgaatatgatgattttttggacgaattcatggaggcagtttcttccaagtatggcatgaattgccttattcagtttgaagattttgccaatgtgaatgcatttcgtctcctgaacaagtatcgaaaccagtattgcacattcaatgatgatattcaaggaacagcatctgttgcagttgcaggtctccttgcagctcttcgaataaccaagaacaaactgtctgatcaaacaatactattccaaggagctggagaggctgccctagggattgcacacctgattgtgatggccttggaaaaagaaggtttaccaaaagagaaagccatcaaaaagatatggctggttgattcaaaaggattaatagttaagggacgtgcttccttaacacaagagaaagagaagtttgcccatgaacatgaagaaatgaagaacctagaagccattgttcaagaaataaaaccaactgccctcataggagttgctgcaattggtggtgcattctcagaacaaattctcaaagatatggctgccttcaatgaacggcctattatttttgctttgagtaatccaactagcaaagcagaatgttctgcagagcagtgctacaaaataaccaagggacgtgcaatttttgccagtggcagtccttttgatccagtcactcttccaaatggacagaccctatatcctggccaaggcaacaattcctacgtgttccctggagttgctcttggtgttgtggcgtgtggattgaggcagatcacagataatattttcctcactactgctgaggttatagctcagcaagtgtcagataaacacttggaagagggtcggctttatcctcctttgaataccattagagatgtttctctgaaaattgcagaaaagattgtgaaagatgcataccaagaaaagacagccacagtttatcctgaaccgcaaaacaaagaagcatttgtccgctcccagatgtatagtactgattatgaccagattctacctgattgttattcttggcctgaagaggtgcagaaaatacagaccaaagttgaccagtaggataatagcaaacatttctaactctattaatgaggtctttaaacctttcataatttttaaaggttggaatcttttataatgattcataagacacttagattaagattttactttaacagtctaaaaattgatagaagaatatcgatataaattgggataaacatcacatgagacaattttgcttcactttgccttctggttatttatggtttctgtctgaattattctgcctacgttctctttaaaagctgttgtacgtactacggagaaactcatcatttttatacaggacactaatgggaagaccaaaattactaataaattgaaataaccaacattaaaactcataattattttgttgaccattttgttaaaatctacttttc

SEQ ID NO: 1701 - protein, 572 aa, Homo sapiens
  ref <308>: DATABASE ACCESSION NUMBER: Refseq / NP_002386
  ref <309>: DATABASE ENTRY DATE: 2001-03-23
MEPEAPRRRHTHQRGYLLTRNPHLNKDLAFTLEERQQLNIHGLLPPSFNSQEIQVLRVVKNFEHLNSDFDRYLLLMDLQDRNEKLFYRVLTSDIEKFMPIVYTPTVGLACQQYSLVFRKPRGLFITIHDRGHIASVLNAWPEDVIKAIVVTDGERILGLGDLGCNGMGIPVGKLALYTACGGMNPQECLPVILDVGTENEELLKDPLYIGLRQRRVRGSEYDDFLDEFMEAVSSKYGMNCLIQFEDFANVNAFRLLNKYRNQYCTFNDDIQGTASVAVAGLLAALRITKNKLSDQTILFQGAGEAALGIAHLIVMALEKEGLPKEKAIKKIWLVDSKGLIVKGRASLTQEKEKFAHEHEEMKNLEAIVQEIKPTALIGVAAIGGAFSEQILKDMAAFNERPIIFALSNPTSKAECSAEQCYKITKGRAIFASGSPFDPVTLPNGQTLYPGQGNNSYVFPGVALGVVACGLRQITDNIFLTTAEVIAQQVSDKHLEEGRLYPPLNTIRDVSLKIAEKIVKDAYQEKTATVYPEPQNKEAFVRSQMYSTDYDQILPDCYSWPEEVQKIQTKVDQ

SEQ ID NO: 1702 - DNA, 420 bp, Rattus norvegicus
  ref <308>: DATABASE ACCESSION NUMBER: EMBL / AI171542
  ref <309>: DATABASE ENTRY DATE: 2000-03-03
aagaagaattctggcaaaaccagcatcctcagccgtatatcttcccagactctcctgggggtacttcctatgagagatacgagtgctacaaggttccagaatggtgcttagattactggcatccttctgagaaagcagtgtatcctgattacttttccaagagagagcagtggaagaaactgaggatggagagctgggatcggaaggttaaacagctggaggaagaaacgtcacctgatggtattatgactgaagctttgcctcctgccagaaaggaaggcgacttgcccccattgtggtggcatattgtgaccagacctcgggaacggcccacatagagacaggcaccgcactgttcatgcttgcaagtgagagttacagaacacattcacacttgccctaataaaagtaactagagac

SEQ ID NO: 1703 - DNA, 740 bp, Homo sapiens
  ref <308>: DATABASE ACCESSION NUMBER: Refseq / NM_005005
  ref <309>: DATABASE ENTRY DATE: 2002-11-05
ggcagagccccgctcagtcacccgcagcaggcgtgcagtttcccggctctccgcgcggccggggaaggtcagcgccgtaatggcgttcttggcgtcgggaccctacctgacccatcagcaaaaggtgttgcggctttataagcgggcgctacgccacctcgagtcgtggtgcgtccagagagacaaataccgatactttgcttgtttgatgagagcccggtttgaagaacataagaatgaaaaggatatggcgaaggccacccagctgctgaaggaggccgaggaagaattctggtaccgtcagcatccacagccatacatcttccctgactctcctgggggcacctcctatgagagatacgattgctacaaggtcccagaatggtgcttagatgactggcatccttctgagaaggcaatgtatcctgattactttgccaagagagaacagtggaagaaactgcggagggaaagctgggaacgagaggttaagcagctgcaggaggaaacgccacctggtggtcctttaactgaagctttgccccctgcccgaaaggaaggtgatttgcccccactgtggtggtatattgtgaccagaccccgggagcggcccatgtagaaagagagagacctcatctttcatgcttgcaagtgaaatatgttacagaacatgcacttgccctaataaaaaatcagtgaaatggaaaaaaaaaaaaaaaaaaaaaaaaaaaaaaaaaaaa

SEQ ID NO: 1704 - protein, 179 aa, Homo sapiens
  ref <308>: DATABASE ACCESSION NUMBER: Refseq / NP_004996
  ref <309>: DATABASE ENTRY DATE: 2002-11-05
MAFLASGPYLTHQQKVLRLYKRALRHLESWCVQRDKYRYFACLMRARFEEHKNEKDMAKATQLLKEAEEEFWYRQHPQPYIFPDSPGGTSYERYDCYKVPEWCLDDWHPSEKAMYPDYFAKREQWKKLRRESWEREVKQLQEETPPGGPLTEALPPARKEGDLPPLWWYIVTRPRERPM

SEQ ID NO: 1705 - DNA, 831 bp, Rattus norvegicus
  ref <308>: DATABASE ACCESSION NUMBER: Refseq / NM_031629
  ref <309>: DATABASE ENTRY DATE: 2003-01-13
ggcacgagtgactaagatggaagcgttttgggagtcacggactggccactgggcggaggtccggggcagttttaccggcgtcccgtcacccccagctgcctcatggatccgatgtctgcgcctgcgaggtccatcactcggacccagaatccgatgctgactgggacatccgtactaggggtgaagttcgactgcggagtggtgattgctgcagacatgctgggctcctacggctccctggctcgtttccgcattatctctcgtattatgcgagtcaacgacagcactatgctaggtgcttcaggagactatgctgatttccagtatttgaagcaagttctcggccagatggtgattgatgaggagctgttcggagatggacatagctatagtcctagagctatccattcatggttgacaagggccatgtacagtcgccgctccaagatgaaccctctgtggaacaccaaggtcattggaggctatgctggtggagaaagctttcttggttatgtggacatgcttggtgtagcttatgaagccccttcactagccactggttatggtgcatacttggctcagcctctgcttcgagaagttctagagaagcaaccggtgctgagtcagacagaggcccgagagcttgtggagcgctgcatgcgagtgctgtactaccgagacgctcgttcgtataaccggtttcaagttgctactgtaactgaaaaaggtgtggagatagaaggaccactgtcagcacagaccaactgggacattgctcacatgatcagtggctttgaatgaaatccagatgaagtgtccagagttaagctt

SEQ ID NO: 1706 - protein, 232 aa, Rattus norvegicus
  ref <308>: DATABASE ACCESSION NUMBER: Refseq / NP_113817
  ref <309>: DATABASE ENTRY DATE: 2003-01-13
MDPMSAPARSITRTQNPMLTGTSVLGVKFDCGVVIAADMLGSYGSLARFRIISRIMRVNDSTMLGASGDYADFQYLKQVLGQMVIDEELFGDGHSYSPRAIHSWLTRAMYSRRSKMNPLWNTKVIGGYAGGESFLGYVDMLGVAYEAPSLATGYGAYLAQPLLREVLEKQPVLSQTEARELVERCMRVLYYRDARSYNRFQVATVTEKGVEIEGPLSAQTNWDIAHMISGFE

SEQ ID NO: 1707 - DNA, 1712 bp, Rattus norvegicus
  ref <308>: DATABASE ACCESSION NUMBER: Refseq / NM_080886
  ref <309>: DATABASE ENTRY DATE: 2003-01-13
ggccgctgcacctgcccggtcttgcgccgagaccgctgtcaatcgcggggcaccaggaataaaaggccccttgcagagatttgaaaatggccatgaacaaaagtgttggcctcttcagctccgcatccctggctgtggactacgtagattccctgctgcctgagaatcctctgcaggaaccctttaagaatgcttgggtctacatgttggacaactatacaaagttccagatcgcaacctggggctccctgatcgttcatgagacgatctatttcctgttctctttacctggctttctattccagtttatacctttcatgagaaagtacaagattcaaaaggataaaccagaaacctttgaaggccagtggaagtgtttgaaaggaattctgtttaatcatttttttatccagttgcctctgatttgtggaacatactattttacagagtttttcaatattccttatgattgggaaagaatgccaagatggtatttcactttggcaaggtgtttgggctgtgcagtcatcgaggatacctggcactatttcctgcacagactccttcaccacaagaggatttataaatacattcataaagtccatcacgagttccaggctccatttggaatcgaagcagaatatgcacatcccttggaaaccctaattcttgggactggatttttcattggaattgtgcttttgtgtgatcatgtaattcttctgtgggcatgggtgaccatgcgtttgctagaaaccatcgatgtgcacagtggttatgatatccctctcaacccgttgaactacatccctttttataccggggctcggcatcacgatttccaccacatgaacttcattgggaattacgcctccaccttcacgtggtgggacagaatctttgggacggatgtccagtaccatgcctacactgaaaagatgaagaagcttgggaaaaagtctgagtgagcacctgctctccgccctcctgactgcagctggcaactaacattgcttctggggagcagaactaagcacgtgactcggctgctggtgataggaacattaacaacctttaagtactctgcgggatgagaactcttctgctcgacacccaagatctgtaaatgtgggaacaaagaaatagatacataagtacagttttcaggaggaggttttaaaggccatattgccaacctcaccgaaaggtttcaggaacccgaggaagtgttaatgtacaactcaccacttcacgccacccgaggctgaagttgacgttgccttttaagcctttttacatacactggccatttcagaaaattctcaacaataatgtctgccttcgagtttaagtcatggtgttttttagaattgacttgaaatgaaaatatcacaaagtgaatatatcagctggtgatcgagtgactgaaacccccctggtctgcggttgaccagttcaggactattctttctgtgaaggattgtttgattgtagtatctttatcagcatcttgtaaattggctcatttcctacgtgatgtacatagaatactataacttaacgactttcaagttacttggggcatttttaaattgaggagccccacttctgatgtccacccccttgtctttgtgtgtcaggtggtctcggagctttgtgaattctctatctgcacctgtcagagctggtgaaataaatgtgatttttgtccg

SEQ ID NO: 1708 - protein, 293 aa, Rattus norvegicus
  ref <308>: DATABASE ACCESSION NUMBER: Refseq / NP_543162
  ref <309>: DATABASE ENTRY DATE: 2003-01-13
MAMNKSVGLFSSASLAVDYVDSLLPENPLQEPFKNAWVYMLDNYTKFQIATWGSLIVHETIYFLFSLPGFLFQFIPFMRKYKIQKDKPETFEGQWKCLKGILFNHFFIQLPLICGTYYFTEFFNIPYDWERMPRWYFTLARCLGCAVIEDTWHYFLHRLLHHKRIYKYIHKVHHEFQAPFGIEAEYAHPLETLILGTGFFIGIVLLCDHVILLWAWVTMRLLETIDVHSGYDIPLNPLNYIPFYTGARHHDFHHMNFIGNYASTFTWWDRIFGTDVQYHAYTEKMKKLGKKSE

SEQ ID NO: 1709 - DNA, 650 bp, Rattus norvegicus
  ref <308>: DATABASE ACCESSION NUMBER: Refseq / NM_031570
  ref <309>: DATABASE ENTRY DATE: 2003-01-13
cactccgtaagacgaagccatgtctagctcgagcgccaagattgtgaagcccaatggcaagaagcgagacgagttcgagtctggcatctctcaggcgctgctcgagctggagatgaactccgaactgaagacgcagctgtgggaactcaacatcaccgcggcaaaggaaatcgaagtcggtggtggtcgaaaagccatcataatttttgtaccagttcctcagctgaaatctttccagaaaatggccaagtccggcaaggttcgcgaattggagaaaaagttcagtgggaaacacgtagtcttcattgctcagaggaggattctgcccaagccaacccgaaaaagccgtacgaaaaataagcaaaaggcccagaagccgaccctgacgagcagtgcagaccgacgcatccttgaggatttggtcttcccaagtgaaattgtgggcaagaggatccgtgtgaaactggtaggcagccggctcataaaagttcatttagacaaagcacagcagaacaacgtggagcacaaggtcgaaactttttctggcgtgtacaagaagccactaggcaaggatgttaactttgaattcccagaagtttcagtttaaagaaaaatgactgaataaaatgtcattcataataaaaaaaaaa

SEQ ID NO: 1710 - protein, 195 aa, Rattus norvegicus
  ref <308>: DATABASE ACCESSION NUMBER: Refseq / NP_113758
  ref <309>: DATABASE ENTRY DATE: 2003-01-13
MSSSSAKIVKPNGKKRDEFESGISQALLELEMNSELKTQLWELNITAAKEIEVGGGRKAIIIFVPVPQLKSFQKMAKSGKVRELEKKFSGKHVVFIAQRRILPKPTRKSRTKNKQKAQKPTLTSSADRRILEDLVFPSEIVGKRIRVKLVGSRLIKVHLDKAQQNNVEHKVETFSGVYKKPLGKDVNFEFPEVSV

SEQ ID NO: 1711 - DNA, 200 bp, Homo sapiens
  misc_feature (1)..(200): n=a, c, g or t
  ref <308>: DATABASE ACCESSION NUMBER: EMBL / AA080984
  ref <309>: DATABASE ENTRY DATE: 2000-03-03
tacaactgaaactctgggaattcaaaattaacatccttgcctgtgagcttcttgtacacaccagaaaaagtttcaaccttgtgttccacgttgttctgctgtgctttgtctaagtgaacttttatgagcccggctgccatccagtttcacacggatccnncttaccccacaatttcaccttggggaaagacctaangtcc

SEQ ID NO: 1712 - DNA, 5109 bp, Rattus norvegicus
  ref <308>: DATABASE ACCESSION NUMBER: Refseq / NM_012505
  ref <309>: DATABASE ENTRY DATE: 2002-11-05
tctgccagggtctccagctgccccagacaggcggtgtggtcttgggatcctcctggtgacctttccagcctaggtcccctcagccactctgccccaagatgggacgtggggcagggcgtgagtactcgcctgccgccaccactgcggagaatgggggtggcaagaagaaacagaaagagaaggagctcgatgagctgaagaaggaggttgccatggatgaccacaagctgtccttggatgagctgggccgaaaataccaagtggatctgtccaagggcctcaccaaccagcgagctcaggatattctggctagagacggacccaacgccctcactccaccccctacaactcctgagtgggtcaagttctgccgtcagctttttgggggcttctctatcctgctgtggattggggcgcttctctgcttcttagcctatggtatcctggccgccatggaggacgaaccatccaatgacaatttatatctaggtatcgtgctagcagctgtagttatcgtcactggctgcttctcctactaccaggaagccaaaagctccaagattatggactccttcaagaacatggtgcctcagcaagctctggtcatccgagagggagagaagatgcagatcaatgcagaggaggtggtcgtgggagacctggtggaagtgaagggtggagaccgtgtccccgctgacctccggatcatctcctcccacggttgcaaggtggataactcatccctgacaggggagtcggagccccagacccggtcccctgagttcacccatgagaatcccttggagacccgcaatatctgtttcttctctaccaactgtgtggaaggcactgccaggggcattgtgatcgccacaggtgaccggacggtgatgggccgcatagccactcttgcctctggcctagaggtgggacagacgccgatagccatggagatcgagcatttcatccagctgatcacgggggtggccgtgttcctgggggtctccttctttgttctgtcgctcatcctgggctacagctggctggaggctgtcatcttcctcatcggcatcatcgtagccaacgtccccgaagggctcttggccactgttactgtgtgcctgacgctgacagccaagcgcatggctcgcaagaactgcctggtgaagaacctggaggcggtggagacgctgggctccacgtccaccatctgctcggacaagacaggcaccctcacccagaaccgcatgacggtggctcacatgtggtttgacaaccagatccatgaggctgacaccactgaagatcagtctggggccacttttgacaagcggtccccgacgtggacagccctgtctcggatcgctggtctctgcaatcgtgccgtcttcaaggctgggcaggagaacatctccgtgtctaagcgggacacagctggtgacgcctctgagtcagctctgctcaagtgcatcgagttgtcctgtggctcagtgaggaagatgagggacaggaatcccaaggtggcagaaattcccttcaactctaccaacaaatatcagctttccatccatgagagggaagacagcccccagagccatgtgctggtgatgaaaggtgccccggagcgcatcctggaccgatgctctaccatcctggtacagggcaaggagatccctcttgacaaggagatgcaagatgcctttcaaaacgcctacatggagctgggaggactcggggagcgagtgctgggcttctgtcagctgaacctgccttctggaaagtttcctcggggcttcaaatttgacacggatgagctgaactttcccacagagaagctctgctttgtggggctcatgtctatgattgatccccccagagcagctgtgccagatgctgtgggcaagtgcagaagtgcaggcatcaaggtgatcatggtgactggggatcaccctatcacagccaaggccattgccaaaggtgtgggcatcatatcagagggtaacgagactgtggaagacattgcagccaggctcaacattcctgtgagtcaagtcaatcccagagaagccaaggcatgtgtagtgcacggctcagacctgaaggacatgacttcagagcagctggatgagatcctcagggaccacacggagatcgtgtttgcccggacctcccctcagcagaagctcatcattgtggagggctgtcagaggcagggagccatcgtggcagtgactggtgacggggtgaacgactcccccgcgctgaagaaggctgacattggcattgccatgggcatctctggctctgatgtctctaagcaggcagctgacatgatccttctcgacgacaactttgcctccattgtgacgggcgtggaggaggggcgcctgatctttgacaacctgaagaagtccatcgcgtacaccctgaccagcaacatccctgagatcacccccttcctgctgttcatcattgccaacatcccccttcccctgggcaccgtgaccatcctgtgcatcgacctgggcacagacatggttcctgccatctcattagcatacgaagcggctgagagcgacatcatgaagaggcagccacggaactcccagacggacaagctggtgaacgagaggcttatcagcatggcttacggacagatcggcatgatccaggctctgggcggcttcttcacctactttgtaatactggcagagaacggcttcctgccatcgaggctgcttgggatccgccttgactgggatgatcggactaccaacgacctggaggacagctatggacaagagtggacctatgagcagcggaaggtggtggagttcacatgccacacggccttctttgccagcatcgtggttgtgcagtgggctgacctcatcatttgcaagacccggcgcaactcggtgttccagcagggcatgaagaacaagatcctgatttttgggctgctagaagagacggctctggctgccttcctgtcttactgcccgggtatgggggtggccctccgaatgtacccactcaaggtcacgtggtggttctgtgcctttccctacagtctcctcatcttcatctatgatgaagtccgaaagctcatcctgcggcggtaccctgggggctgggtggagaaggagacgtactactgagctcaccgacaaaaggaagaacaggggagatggggtgctccagaggggctggtgggtgttgtggtgaagggaagggctggggagacacaaggaagcgatggtggcgtgaactcagtgggtaggcttgggtaaataaacttgaggagactgctccaactgctccataggtcccgctgtgaaccctaagacagtgcatgttggggtcgcctcctcagatccttcccgtcccactctcccacattgtctacattttctgaagaaccgggggtcgccctagccctccctgtgtcccagtccttcaccctcacctgcattattccattattcaaacagatcaacacccaaaggttaatcctgtctaaccctggaggaaagcctgtcagaccaccagtacccaccactaccaccaccaccaccaccaccaccaccaccaccaccaccaccaccaccaccccctgttcactcctcttcccattcttgccttcctcaccttcctgcctgagtcttcccttgctcctccccttacaccttgaaaacacaaaattctgcttctgtgagtgcaagagcctagggccagaaaaggaagccagttggagagatggggcctgtctcccagccaagaccagtcaggaaccagaggggagctgggctggcaagtggaggttggggtgcactggctgagaaagaaagaaaggaaggaaggaaggaaggaaggaaggaaggaagaaaggaaggaaggaagtgaccacaggtgtgtcatctccagccttcaggtatatgggacaggctctggatctgtgagagacttaagagactagcacaccagcagaccaaattcccatctcatcagactagcagtaagtgccacccagtgcccctctgacccttgggtagtggtcctctctgtccacaaggctcagatttcacagaaggttcagctatctcaaccacatactcttgggaacaccccccttctttagaataattagttctctggggcctcgtgctgttctgagagccccattagctgccacttctcctcgtgctctctcactgccttctgcttcctacccacctgctgaacccacgttatgtccagtatcgccttgcttgtcctgaaaaaggatctcttggccattggcaggaatcagtgtagaaatgtttccaggacatccctgactttcgggaacatgcagaatcagtgtagctcatgacacagtcagaaactttagacacaagagaaattcttaagagacctatgcacctttgacctctcagattgagacaggaagctggcttcaggttcctatggcatagagttatctttccttactctcttctcaacctaacgtattcgctcttcagacagctgcctgttctctaatcctggcctagaaagcatagcatagatgcacctggatcaatgagggaagcaagagagaatcagcaaggaaactggaaggcttgaggtgggaatatgaaagtcaagacaagcatcaagccaggcccaagggcctcccaaaggctactgtctcatcgtggtggatggagttttgccttaccctaaataccttgaaatttgtcagtcatgcatagccttcagtcggaagtcaaaatgggacaccgtatttatttgggcctgactaatttgagatcactgactttgaacaaaagtttacctttgcacaatcaataaaatcatctgctaggtaattcaagagcataaacgatactgctaggagcagcatagttagtttcaaagtatgctttccgagcactttagcaatctccctttagaatcaggaagtgcataggctaattactatcagtcccgatatatttgttaaaggaacacctacaagatccttactggtgaccttctgtgagacactagtttgaggcactacatgtgtacttgaaaataataaagttgcatttctttatgaat

SEQ ID NO: 1713 - protein, 1020 aa, Rattus norvegicus
  ref <308>: DATABASE ACCESSION NUMBER: Refseq / NP_036637
  ref <309>: DATABASE ENTRY DATE: 2002-11-05
MGRGAGREYSPAATTAENGGGKKKQKEKELDELKKEVAMDDHKLSLDELGRKYQVDLSKGLTNQRAQDILARDGPNALTPPPTTPEWVKFCRQLFGGFSILLWIGALLCFLAYGILAAMEDEPSNDNLYLGIVLAAVVIVTGCFSYYQEAKSSKIMDSFKNMVPQQALVIREGEKMQINAEEVVVGDLVEVKGGDRVPADLRIISSHGCKVDNSSLTGESEPQTRSPEFTHENPLETRNICFFSTNCVEGTARGIVIATGDRTVMGRIATLASGLEVGQTPIAMEIEHFIQLITGVAVFLGVSFFVLSLILGYSWLEAVIFLIGIIVANVPEGLLATVTVCLTLTAKRMARKNCLVKNLEAVETLGSTSTICSDKTGTLTQNRMTVAHMWFDNQIHEADTTEDQSGATFDKRSPTWTALSRIAGLCNRAVFKAGQENISVSKRDTAGDASESALLKCIELSCGSVRKMRDRNPKVAEIPFNSTNKYQLSIHEREDSPQSHVLVMKGAPERILDRCSTILVQGKEIPLDKEMQDAFQNAYMELGGLGERVLGFCQLNLPSGKFPRGFKFDTDELNFPTEKLCFVGLMSMIDPPRAAVPDAVGKCRSAGIKVIMVTGDHPITAKAIAKGVGIISEGNETVEDIAARLNIPVSQVNPREAKACVVHGSDLKDMTSEQLDEILRDHTEIVFARTSPQQKLIIVEGCQRQGAIVAVTGDGVNDSPALKKADIGIAMGISGSDVSKQAADMILLDDNFASIVTGVEEGRLIFDNLKKSIAYTLTSNIPEITPFLLFIIANIPLPLGTVTILCIDLGTDMVPAISLAYEAAESDIMKRQPRNSQTDKLVNERLISMAYGQIGMIQALGGFFTYFVILAENGFLPSRLLGIRLDWDDRTTNDLEDSYGQEWTYEQRKVVEFTCHTAFFASIVVVQWADLIICKTRRNSVFQQGMKNKILIFGLLEETALAAFLSYCPGMGVALRMYPLKVTWWFCAFPYSLLIFIYDEVRKLILRRYPGGWVEKETYY

SEQ ID NO: 1714 - DNA, 5511 bp, Homo sapiens
  ref <308>: DATABASE ACCESSION NUMBER: Refseq / NM_000702
  ref <309>: DATABASE ENTRY DATE: 2000-10-31
tctctgtctgccagggtctccgactgtcccagacgggctggtgtgggcttgggatcctcctggtgacctctcccgctaaggtccctcagccactctgccccaagatgggccgtggggctggccgtgagtactcacctgccgccaccacggcagagaatgggggcggcaagaagaaacagaaggagaaggaactggatgagctgaagaaggaggtggcaatggatgaccacaagctgtccttggatgagctgggccgcaaataccaagtggacctgtccaagggcctcaccaaccagcgggctcaggacgttctggctcgagatgggcccaacgccctcacaccacctcccacaacccctgagtgggtcaagttctgccgtcagcttttcggggggttctccatcctgctgtggattggggctatcctctgcttcctggcctacggcatccaggctgccatggaggatgaaccatccaacgacaatctatatctgggtgtggtgctggcagctgtggtcattgtcactggctgcttctcctactaccaggaggccaagagctccaagatcatggattccttcaagaacatggtacctcagcaagcccttgtgatccgggagggagagaagatgcagatcaacgcagaggaagtggtggtgggagacctggtggaggtgaagggtggagaccgcgtccctgctgacctccggatcatctcttctcatggctgtaaggtggataactcatccttaacaggagagtcggagccccagacccgctcccccgagttcacccatgagaaccccctggagacccgcaatatctgtttcttctccaccaactgtgttgaaggcactgccaggggcattgtgattgccacaggagaccggacggtgatgggccgcatagctactctcgcctcaggcctggaggttgggcggacacccatagcaatggagattgaacacttcatccagctgatcacaggggtcgctgtattcctgggggtctccttcttcgtgctctccctcatcctgggctacagctggctggaggcagtcatcttcctcatcggcatcatagtggccaacgtgcctgaggggcttctggccactgtcactgtgtgcctgaccctgacagccaagcgcatggcacggaagaactgcctggtgaagaacctggaggcggtggagacgctgggctccacgtccaccatctgctcggacaagacgggcaccctcacccagaaccgcatgaccgtcgcccacatgtggttcgacaaccaaatccatgaggctgacaccaccgaagatcagtctggggccacttttgacaaacgatcccctacgtggacggccctgtctcgaattgctggtctctgcaaccgcgccgtcttcaaggcaggacaggagaacatctccgtgtctaagcgggacacagctggtgatgcctctgagtcagctctgctcaagtgcattgagctctcctgtggctcagtgaggaaaatgagagacagaaaccccaaggtggcagagattcctttcaactctaccaacaagtaccagctgtctatccacgagcgagaagacagcccccagagccacgtgctggtgatgaagggggccccagagcgcattctggaccggtgctccaccatcctggtgcagggcaaggagatcccgctcgacaaggagatgcaagatgcctttcaaaatgcctacatggagctggggggacttggggagcgtgtgctgggattctgtcaactgaatctgccatctggaaagtttcctcggggcttcaaattcgacacggatgagctgaactttcccacggagaagctttgctttgtggggctcatgtctatgattgaccctccccgggctgctgtgccagatgctgtgggcaagtgccgaagcgcaggcatcaaggtgatcatggtaaccggggatcaccctatcacagccaaggccattgccaaaggcgtgggcatcatatcagagggtaacgagactgtggaggacattgcagcccggctcaacattcccatgagtcaagtcaaccccagagaagccaaggcatgcgtggtgcacggctctgacctgaaggacatgacatcggagcagctcgatgagatcctcaagaaccacacagagatcgtctttgctcgaacgtctccccagcagaagctcatcattgtggagggatgtcagaggcagggagccattgtggccgtgacgggtgacggggtgaacgactcccctgcattgaagaaggctgacattggcattgccatgggcatctctggctctgacgtctctaagcaggcagccgacatgatcctgctggatgacaactttgcctccatcgtcacgggggtggaggagggccgcctgatctttgacaacttgaagaaatccatcgcctacaccctgaccagcaacatccccgagatcacccccttcctgctgttcatcattgccaacatccccctacctctgggcactgtgaccatcctttgcattgacctgggcacagatatggtccctgccatctccttggcctatgaggcagctgagagtgatatcatgaagcggcagccacgaaactcccagacggacaagctggtgaatgagaggctcatcagcatggcctacggacagatcgggatgatccaggcactgggtggcttcttcacctactttgtgatcctggcagagaacggtttcctgccatcacggctactgggaatccgcctcgactgggatgaccggaccatgaatgatctggaggacagctatggacaggagtggacctatgagcagcggaaggtggtggagttcacgtgccacacggcattctttgccagcatcgtggtggtgcagtgggctgacctcatcatctgcaagacccgccgcaactcagtcttccagcagggcatgaagaacaagatcctgatttttgggctcctggaggagacggcgttggctgcctttctctcttactgcccaggcatgggtgtagccctccgcatgtacccgctcaaagtcacctggtggttctgcgccttcccctacagcctcctcatcttcatctatgatgaggtccgaaagctcatcctgcggcggtatcctggtggctgggtggagaaggagacatactactgaccccattggaagaagaaccaggcatggaaagatggggagctctggaggtgttgtggggatggtgatggagagggatggaaataacgggtggcattgggtggcaacatttggggagagataatgaggcaactcagcaggctaagttgcggggtatataaattggggtgatgaccccatagacctaactgtgaacaatcagattagacactatgtgttagagtccccccgaccagatccttttccatcccactccactatgttgtctattttttctgaggaattaagggttaccccaccctgcccactcccatcccttcaaccccacttcctactgtaatagatcagcatccaaaagcaggaacccatctaaaccagaaggaagccctctcagatcaccccagcctcactccatttcccacttccacccccgttagcttcctgcaggactctatccctggcttccccttcagaccttgcaatcacaaaaggttcttctggtgagtgcaagagcctgagactggaaaaggtggacttgtctcccagtcgaggctggtaagggaccttcagggagagctgggcagacaggtgggagatggaggtagggctggctggaggaaggaaacaacaaaggaagtgaggtagtgccaatgacaggacatttgacatgagtctccagatagatgtcgtggactccagctctacgtcccacattttagaataccccaccagcagaacaaactcagatctcatcagggtagcagcagaggcaggaccagaaggcaatcaagagcttccagaaatgccacacttgtgtgccacagagttccccgctgacccttggttaggggtcctcttagtccacaaggtccggatgtcactcatgtacttaataacacttcaccttctgtaatactaagtcctcagagctccatgctgttctgaaagggatggccacaagttctttcccagcctcttccattccctttcttttcatgcccatcccgatgaacctgcatcattccccgacactgccaagccaaccctggaaaaggagttcgctggccattggctagaatcagggtggagaagttccctgaaccttcctgtctcccagggacatgtatgcttccagggacaagcttaggtcatgaacatggtcagaacctttggacaagaggaaaaatactaagagatttgctttttctgggtgcggtggctcatgcctgtaatcccagcactttgggaggccgaggcaggtggatcatgaggtcaggagttcgaggcgagcctggccaacatggtgaaaccctgtctctactaaaagtacaaaaaattagccagtcatggtggcacacgcctgtaatctcagctactcaggaggctgaggcaggagaattgcttgaacctgtgaggaagaggttgcagtgagctgagatcgtgccattacactccagcctgggcgaaagggtgagactccatctcaaaaaaaaaaaaaatgatttgcttttgacgtcttaggtggcagggctgttccctccaggcaaatgcccttcaaaccgacgatcattgtgcccacttaccctgggctggagagttggtttcaggttcctacaggagatagctttctttcccttactccctatctaacacttttgctctgcaggcagccttgcccattctctaagcctggcttagaaggcactgggaatgtcctgtagagagagacctagataggtcatgcaagtgagaaagacatctgaggaaaatggaagacctaaggcagacaggaaggaagcacaaaagacaagcattgggtcagacccataaaccacctcccaaaggctgtcatttcattgcactggaattttgctttatcagaagcaaggaagtaagggagtcattgccttgggcctgggaatctaagtgggagacaatattaatttggatccgattaattggagattactaactgtggacaaaagtttatctttgcacaatcaataaaaatggcatttttttagtaaattaagagcataaacaatattgctagaggtggcatgtttagtctaccaaaaacaatacttttcaggcactttagaaatatccttttagaagcagcgagtgcatgggctaattatcatcaatctttatgtatttgttaaagaaacatctacaggatctttattggtgaccttttgtaagacattagtttgaggtactacctatctacttgaaaataataaagtggcatttctttatgaaaaaaaaagaaatctcttccataattcagatttctacactttatacttgcctccctcctaaatcgtgatattgaaatatggtg

SEQ ID NO: 1715 - protein, 1020 aa, Homo sapiens
  ref <308>: DATABASE ACCESSION NUMBER: Refseq / NP_000693
  ref <309>: DATABASE ENTRY DATE: 2000-10-31
MGRGAGREYSPAATTAENGGGKKKQKEKELDELKKEVAMDDHKLSLDELGRKYQVDLSKGLTNQRAQDVLARDGPNALTPPPTTPEWVKFCRQLFGGFSILLWIGAILCFLAYGIQAAMEDEPSNDNLYLGVVLAAVVIVTGCFSYYQEAKSSKIMDSFKNMVPQQALVIREGEKMQINAEEVVVGDLVEVKGGDRVPADLRIISSHGCKVDNSSLTGESEPQTRSPEFTHENPLETRNICFFSTNCVEGTARGIVIATGDRTVMGRIATLASGLEVGRTPIAMEIEHFIQLITGVAVFLGVSFFVLSLILGYSWLEAVIFLIGIIVANVPEGLLATVTVCLTLTAKRMARKNCLVKNLEAVETLGSTSTICSDKTGTLTQNRMTVAHMWFDNQIHEADTTEDQSGATFDKRSPTWTALSRIAGLCNRAVFKAGQENISVSKRDTAGDASESALLKCIELSCGSVRKMRDRNPKVAEIPFNSTNKYQLSIHEREDSPQSHVLVMKGAPERILDRCSTILVQGKEIPLDKEMQDAFQNAYMELGGLGERVLGFCQLNLPSGKFPRGFKFDTDELNFPTEKLCFVGLMSMIDPPRAAVPDAVGKCRSAGIKVIMVTGDHPITAKAIAKGVGIISEGNETVEDIAARLNIPMSQVNPREAKACVVHGSDLKDMTSEQLDEILKNHTEIVFARTSPQQKLIIVEGCQRQGAIVAVTGDGVNDSPALKKADIGIAMGISGSDVSKQAADMILLDDNFASIVTGVEEGRLIFDNLKKSIAYTLTSNIPEITPFLLFIIANIPLPLGTVTILCIDLGTDMVPAISLAYEAAESDIMKRQPRNSQTDKLVNERLISMAYGQIGMIQALGGFFTYFVILAENGFLPSRLLGIRLDWDDRTMNDLEDSYGQEWTYEQRKVVEFTCHTAFFASIVVVQWADLIICKTRRNSVFQQGMKNKILIFGLLEETALAAFLSYCPGMGVALRMYPLKVTWWFCAFPYSLLIFIYDEVRKLILRRYPGGWVEKETYY

SEQ ID NO: 1716 - DNA, 2874 bp, Rattus norvegicus
  ref <308>: DATABASE ACCESSION NUMBER: Refseq / NM_012570
  ref <309>: DATABASE ENTRY DATE: 2002-11-14
gtccaggcctgcaagctctgatcttctgtgctcccgccgctctcgcctcagcccgccgccatgtaccgccgtctgggcgaagtgctgctactgtcccgcgccgggcccgctgccctgggctctgcggctgcagactcagccgcactgctgggctgggctcgcggacaaccctctgctgtcccgcaacccgggctcacgccggtcgccaggcgccactacagcgaagcggccaccgaccgcgaagacgaccccaacttcttcaagatggtggagggcttcttcgaccgcggcgccagcatcgtggaggacaagctggtggaagacctgaagacccgggagaacgaggagcagaagcggaaccgagtgcgcggcatcctgcggatcatcaagccttgcaaccatgtgttgagcctctccttccccatccggcgcgacgacggctcctgggaggtcatcgaaggctaccgggcccagcacagccagcaccgcacgccctgcaagggaggtatccggtacagcactgacgtgagtgtggatgaggtgaaggcgctggcgtccctaatgacctacaagtgtgcagtggttgatgtgccatttggaggtgctaaagcaggcgttaagatcaatcccaagaactatacagataatgaattagaaaagattacacgaagattcaccatggagctggcaaagaagggttttattggtcctggcattgatgtgcctgccccagacatgagcacgggcgagcgggagatgtcctggatcgctgacacctatgccagcaccatagggcactatgatatcaatgcacacgcctgtgtcactggtaaacccatcagccaaggaggcatccacggacgcatctccgctactggccggggtgtttttcatgggattgagaacttcatcaatgaagcttcctacatgagcatcttagggatgaccccggggcttggcgataagacgtttgttgttcagggatttggtaatgtgggcctgcactctatgagatatttacatcgttttggtgctaagtgtgttggtgttggagaatctgatgggagtatatggaatccagatggtattgacccaaaagaactggaagatttcaagttgcaacatggatcaattctgggcttccccaaagccaaggtctatgaaggaagcatcttggaggctgactgcgacattttaattcctgcagccagcgagaagcagttgaccaaatccaatgcacccagagtcaaagccaagatcattgctgaaggagccaatggcccaaccactccagaggccgataagattttcctagaaagaaacatcatggttattccagatctctacctgaatgctggaggagtgacagtatcttactttgagtggctaaagaatctaaatcacgtcagctatggccgattgaccttcaaatatgaaagggactcgaactaccacttgctcatgtccgttcaagagagtttagagagaaagtttggaaagcacggcgggactatccctgtggtccccacagcagagttccaggacagaatatcgggtgcatctgagaaagacatcgtgcactctggcttggcctacacaatggagcgatctgccaggcaaattatgcgcacagccatgaagtataacctgggattggacctgagaacagctgcctacgtcaatgccattgagaaagtcttcaaggtgtacaatgaggctggcgtgaccttcacatagacaggtcacagctgacttctttaccaccctcttcacctataatttctgcagacctgtcacaagtttacatgtaaccacagaaatctgttcttgtgactcattagttaatggacactgttctcaacaagtcagttggaatcagccccttaagagaaagattaagttagcggatcatgtaccagctgatggtgtaaaggtaggaatcacgtgtatcctgccagttaggtgtttcgcttttaagtaaagtttctgctcctggccatgctgccttgctctggactcttcccaacagggttagtgctgttgccagggaaggcagtcaagagtcagtcacttcctgacaagtctgggtacttgagcacataagaagtaggcgtgtggcatttgcaaaggtggcatggtcttcgagtgagttattgctgctttacatcagcaaaataactcagtctctaagtcgcaaacaaataaaagctatttctcatgtattttattctttcagaataaaccagttcatgctgctgtaataaaattgccttcaaccacttaagcctaacctttactcaagcagtgaacgcctaaaatataggaaatggaagaagctagtttttataacataaaacagtataatttagcttatcggccctgcagcatagtccagcagaaataaagtagcacctgggggcaggcgtacctgcaagtgacacgggagggacacttgggaacttgttatgcagtccagagagtgaagtaaccactttaccaatttggagatctattatgttgagtaattgaaccatacttcaaatagagtgtcccagaagaaaagactggctccctgtttggaggctggcagacttcagactcagcctgtgtgtcccttctccaaggctttgccgtctacacagcacctcgctatccacaggctggagactgcctggggttgacttctgtttggggagttactggccagggcttttgaacaggagtgttccacagaagtaccagacattatttatataagaatgagcgcttctttttaacagtaccctttcagaaatttctaactactttgtaactgcatgattaacttggtgataaaagcagttattaaaagtctaccttttccaaaaaaaaaaa

SEQ ID NO: 1717 - protein, 558 aa, Rattus norvegicus
  ref <308>: DATABASE ACCESSION NUMBER: Refseq / NP_036702
  ref <309>: DATABASE ENTRY DATE: 2002-11-14
MYRRLGEVLLLSRAGPAALGSAAADSAALLGWARGQPSAVPQPGLTPVARRHYSEAATDREDDPNFFKMVEGFFDRGASIVEDKLVEDLKTRENEEQKRNRVRGILRIIKPCNHVLSLSFPIRRDDGSWEVIEGYRAQHSQHRTPCKGGIRYSTDVSVDEVKALASLMTYKCAVVDVPFGGAKAGVKINPKNYTDNELEKITRRFTMELAKKGFIGPGIDVPAPDMSTGEREMSWIADTYASTIGHYDINAHACVTGKPISQGGIHGRISATGRGVFHGIENFINEASYMSILGMTPGLGDKTFVVQGFGNVGLHSMRYLHRFGAKCVGVGESDGSIWNPDGIDPKELEDFKLQHGSILGFPKAKVYEGSILEADCDILIPAASEKQLTKSNAPRVKAKIIAEGANGPTTPEADKIFLERNIMVIPDLYLNAGGVTVSYFEWLKNLNHVSYGRLTFKYERDSNYHLLMSVQESLERKFGKHGGTIPVVPTAEFQDRISGASEKDIVHSGLAYTMERSARQIMRTAMKYNLGLDLRTAAYVNAIEKVFKVYNEAGVTFT

SEQ ID NO: 1718 - DNA, 499 bp, Rattus norvegicus
  ref <308>: DATABASE ACCESSION NUMBER: EMBL / AI229291
  ref <309>: DATABASE ENTRY DATE: 2000-03-03
cctggttaaaagcaaagcaacaccattctagttatcctatgaagccatggattctgagtttcatttcaaaagtgaaagccaagttggtgtatgtaaaggatttccatgtagctgtggtgctagttattactggctacattatatgctaagtgtatttgtgttcccaagtgtacaagccttctgtcaaaagtatgttctattatcactcatattcaaagtgtagggtattaaaatgcaagcttaggagagcactttacccagctggtgtcctccactgaaattgtttgtaacgatagtcttttacaggttttcatttaaagatgtttgtgtgcttttaattgacaactaacttcttgctgctgtatagtaaaatattaacatattttttatcattaaactgctgcatgactatcatctttgagtgcagagaaaatgccataaaaaagatgccctaaatacagtacattttggttcggcactctgtagaaagtattttggt

SEQ ID NO: 1719 - DNA, 485 bp, Rattus norvegicus; identical to SEQ ID NO: 259
  ref <308>: DATABASE ACCESSION NUMBER: Refseq / NM_053586
  ref <309>: DATABASE ENTRY DATE: 2003-01-13

SEQ ID NO: 1720 - protein, 129 aa, Rattus norvegicus; identical to SEQ ID NO: 260
  ref <308>: DATABASE ACCESSION NUMBER: Refseq / NP_446038
  ref <309>: DATABASE ENTRY DATE: 2003-01-13

SEQ ID NO: 1721 - DNA, 492 bp, Rattus norvegicus
  ref <308>: DATABASE ACCESSION NUMBER: EMBL / AI230632
  ref <309>: DATABASE ENTRY DATE: 2000-03-03
gggacgctgtgctgcctcatgctctggctgtgtgcactgtttgtaaacagctgtctgggtggattgtggtgacagtgctgccacacagtagaaagccagccacacagtgggactgcttgtcttggactgctcaaggaggtgctccatcctacgtcaaagacagcgcaggggacacgtgcccctgcccctcctgtgctgtgactccacaagggcttttaggcaacagagcagtctggggtttgtattttcactttcttggatggttatctgcgtgtccattgctggcgacggactctgtcattcaaacctgactccgaggttaagggagctgcactgtggtttattctttctgacctggataaactaacctggaatagcaaagagaaatggttaatgttgagatgtgtcatttttaaacaaaaataatctttaaagcaatatagaattgtgatttattagttaattttaaattaaaatgttgagatcctgttg

SEQ ID NO: 1722 - DNA, 2019 bp, Homo sapiens
  ref <308>: DATABASE ACCESSION NUMBER: Refseq / NM_002577
  ref <309>: DATABASE ENTRY DATE: 2002-12-23
gaccttggcttgcccggggccatttcataattctgaatcatgtctgataacggagaactggaagataagcctccagcacctcctgtgcgaatgagcagcaccatctttagcactggaggcaaagaccctttgtcagccaatcacagtttgaaacctttgccctctgttccagaagagaaaaagcccaggcataaaatcatctccatattctcaggcacagagaaaggaagtaaaaagaaagaaaaggaacggccagaaatttctcctccatctgattttgagcacaccatccatgttggctttgatgctgttactggagaattcactggcatgccagaacagtgggctcgattactacagacctccaatatcaccaaactagagcaaaagaagaatcctcaggctgtgctggatgtcctaaagttctacgactccaacacagtgaagcagaaatatctgagctttactcctcctgagaaagatggccttccttctggaacgccagcactgaatgccaagggaacagaagcacccgcagtagtgacagaggaggaggatgatgatgaagagactgctcctcccgttattgccccgcgaccggatcatacgaaatcaatttacacacggtctgtaattgaccctgttcctgcaccagttggtgattcacatgttgatggtgctgccaagtctttagacaaacagaaaaagaagcctaagatgacagatgaagagattatggagaaattaagaactatcgtgagcataggtgaccctaagaaaaaatatacaagatatgaaaaaattggacaaggggcttctggtacagttttcactgctactgacgttgcactgggacaggaggttgctatcaaacaaattaatttacagaaacagccaaagaaggaactgatcattaacgagattctggtgatgaaagaattgaaaaatcccaacatcgttaactttttggacagttacctggtaggagatgaattgtttgtggtcatggaataccttgctggggggtcactcactgatgtggtaacagaaacagcttgcatggatgaagcacagattgctgctgtatgcagagagtgtttacaggcattggagtttttacatgctaatcaagtgatccacagagacatcaaaagtgacaatgtacttttgggaatggaaggatctgttaagctcactgactttggtttctgtgcccagatcacccctgagcagagcaaacgcagtaccatggtcggaacgccatactggatggcaccagaggtggttacacggaaagcttatggccctaaagtcgacatatggtctctgggtatcatggctattgagatggtagaaggagagcctccatacctcaatgaaaatcccttgagggccttgtacctaatagcaactaatggaaccccagaacttcagaatccagagaaactttccccaatatttcgggatttcttaaatcgatgtttggaaatggatgtggaaaaaaggggttcagccaaagaattattacagcatcctttcctgaaactggccaaaccgttatctagcttgacaccactgatcatggcagctaaagaagcaatgaagagtaaccgttaacatcactgctgtgggctcatactcttttttccattttctacaagaagccttttagtatatgaaaatgatgactctgttgggggtttaaagaaatggtctgcataacctgaatgaaagaaggaaatgactattctctgaagacaaccaagagaaaattggaaaagacaaggtatgactttgttatgaacccctgcttttaggggtccaggaagggatttgtgggacttgaattcactaggcttaggtctttcaggaaacaggctatcaggggcatttatcatgtgtgagattggattctacttgggtgatttggtggatagacccatgaatggcccctgggggttttcaatcttggattggaggtgggggtttcagagtgttgccacgtctagctcctctccc

SEQ ID NO: 1723 - protein, 525 aa, Homo sapiens [sequence omitted]

SEQ ID NO: 1724 - DNA, 542 bp, Rattus norvegicus
  ref <308>: DATABASE ACCESSION NUMBER: EMBL / AI231547
  ref <309>: DATABASE ENTRY DATE: 2000-03-03
aatgcaaaaggtccatgcgctccgactggcctcacatctcaatctggccatgtgtcacctgaaactgcaggccttctcagctgccatcgaaagctgtaacaaggccttggagctggacagcaacaatgagaagggcctgtttcgccggggagaggcacacctggccgtgaatgactttgacctggcacgagctgacttccaaaaggtcctgcagctctatcccagcaacaaagccgccaagacccagctggctgtgtgccagcagcggacccgcaggcagcttgcccgggaaaagaagctctatgccaacatgtttgagaggctggctgaggaggaacataaggccaagacagaagtggctgcaggagaccatcccactgatgctgagatgaagggtgagccgaacaatgtggcaggcaaccaggctcaggtgaagacagaagcatagcctgcctctccgcctacccacccctgcggctgcctccctgctcccttccctactccaccctgttagttttgtaaaaactgaagaattttgagtg

SEQ ID NO: 1725 - DNA, 2251 bp, Homo sapiens
  ref <308>: DATABASE ACCESSION NUMBER: Refseq / NM_002014
  ref <309>: DATABASE ENTRY DATE: 2003-01-15
gccgcgtgcagaggtgctcaagcctcctcgcggtccgcagtcagtgccgccgcgcccggcctcccgcacgccccgcaggtagcgcccccgcccgcggcccagagtgcgctcgcgccggcaccagctcccggataaacggcgcgccgcgcggagatgacagccgaggagatgaaggcgaccgagagcggggcgcagtcggcgccgctgcccatggagggagtggacatcagccccaaacaggacgaaggcgtgctgaaggtcatcaagagagagggcacaggtacagagatgcccatgattggggaccgagtctttgtccactacactggctggctattagatggcacaaagtttgactccagtctggatcgcaaggacaaattctcctttgacctgggaaaaggggaggtcatcaaggcttgggacattgccatagccaccatgaaggtgggggaggtgtgccacatcacctgcaaaccagaatatgcctacggttcagcaggcagtcctccaaagattccccccaatgccacgcttgtatttgaggtggagttgtttgagtttaagggagaagatctgacggaagaggaagatggcggaatcattcgcagaatacagactcgcggtgaaggctatgctaagcccaatgagggtgctatcgtggaggttgcactggaagggtactacaaggacaagctctttgaccagcgggagctccgctttgagattggcgagggggagaacctggatctgccttatggtctggagagggccattcagcgcatggagaaaggagaacattccatcgtgtacctcaagcccagctatgcttttggcagtgttgggaaggaaaagttccaaatcccaccaaatgctgagctgaaatatgaattacacctcaagagttttgaaaaggccaaggagtcttgggagatgaattcagaagagaagctggaacagagcaccatagtgaaagagcggggcactgtgtacttcaaggaaggtaaatacaagcaagctttactacagtataagaagatcgtgtcttggctggaatatgagtctagtttttccaatgaggaagcacagaaagcacaggcccttcgactggcctctcacctcaacctggccatgtgtcatctgaaactacaggccttctctgctgccattgaaagctgtaacaaggccctagaactggacagcaacaacgagaagggcctcttccgccggggagaggcccacctggccgtgaatgactttgaactggcacgggctgatttccagaaggtcctgcagctctaccccaacaacaaagccgccaagacccagctggctgtgtgccagcagcggatccgaaggcagcttgcccgggagaagaagctctatgccaatatgtttgagaggctggctgaggaggagaacaaggccaaggcagaggcttcctcaggagaccatcccactgacacagagatgaaggaggagcagaagagcaacacggcagggagccagtctcaggtggagacagaagcatagcccctctccaccagccctactcctgcggctgcctgccccccagtctccccactccaccctgttagttttgtaaaaactgaagaattttgagtgaattagacctttatttttctatctggttggatggtggctttaggggaagggggaaaggtgtaggctgggggattgaggtggggaatcattttagctggtgtcagcccctcttcccttcctccattgcacatgaacatatgtccatccatatatattcatcagaatgttaatttattttgctccctctgttaggtccattttctaagggtagaagaggcaagtggtagggatgaggtctgataagaacccagggtggagagggagactcctgggcagccgttttcctcatcctttccctctcccagtccatttccaaatgtggcctccatgtgggtgctagggacatgggaaaaaccactgctatgccatttcttctctctgttcccttcctcacccccgacggtgtggctgatgatgtcttctggtgtcatggtgaccaccccctgttccctgttctggtatttcccctgtcagtttcccctctcggccaggttgtgtcccaaaatcccctcagcctcttctctgcacgttgctgaaggtccaggcttgcctcaagttccatgcttgagcaataaagtggaaacaataaaacctgggtgtcagacaaaaaaaaaaaaaaaaaaaa

SEQ ID NO: 1726 - protein, 459 aa, Homo sapiens
  ref <308>: DATABASE ACCESSION NUMBER: Refseq / NP_002005
  ref <309>: DATABASE ENTRY DATE: 2003-01-15
MTAEEMKATESGAQSAPLPMEGVDISPKQDEGVLKVIKREGTGTEMPMIGDRVFVHYTGWLLDGTKFDSSLDRKDKFSFDLGKGEVIKAWDIAIATMKVGEVCHITCKPEYAYGSAGSPPKIPPNATLVFEVELFEFKGEDLTEEEDGGIIRRIQTRGEGYAKPNEGAIVEVALEGYYKDKLFDQRELRFEIGEGENLDLPYGLERAIQRMEKGEHSIVYLKPSYAFGSVGKEKFQIPPNAELKYELHLKSFEKAKESWEMNSEEKLEQSTIVKERGTVYFKEGKYKQALLQYKKIVSWLEYESSFSNEEAQKAQALRLASHLNLAMCHLKLQAFSAAIESCNKALELDSNNEKGLFRRGEAHLAVNDFELARADFQKVLQLYPNNKAAKTQLAVCQQRIRRQLAREKKLYANMFERLAEEENKAKAEASSGDHPTDTEMKEEQKSNTAGSQSQVETEA

SEQ ID NO: 1727 - DNA, 552 bp, Rattus norvegicus
  ref <308>: DATABASE ACCESSION NUMBER: Refseq / NM_022500
  ref <309>: DATABASE ENTRY DATE: 2003-01-13
atgacctctcagattcgtcagaattattccaccgaagtggaagctgccgtgaaccgcctggtcaacttgcacctgcgggcctcttacacctacctctctctgggcttcttttttgatcgggatgacgtggctttggaaggcgtaggccacttcttccgcgaattggccgaggagaagcgcgagggcgccgagcgtctcctcaagttgcagaacgaacgcgggggccgtgcactcttccaggatgtgcagaagccatctcaagatgagtggggtaaaaccctggaggccatggaagctgccttggccctggagaagaacctgaaccaggccctcttggatctgcacgccctgggctctgcccgcacagaccctcacctctgtgacttcttggaaagccacttcctggataaggaggtgaagctcatcaagaagatgggcaaccacctgaccaacctccgtagggtgcagggcccacaaccagcgcagactggcgtggcccaggcatctctgggcgagtatctctttgagcgcctcactctgaagcacgactag

SEQ ID NO: 1728 - protein, 183 aa, Rattus norvegicus
  ref <308>: DATABASE ACCESSION NUMBER: Refseq / NP_071945
  ref <309>: DATABASE ENTRY DATE: 2003-01-13
MTSQIRQNYSTEVEAAVNRLVNLHLRASYTYLSLGFFFDRDDVALEGVGHFFRELAEEKREGAERLLKLQNERGGRALFQDVQKPSQDEWGKTLEAMEAALALEKNLNQALLDLHALGSARTDPHLCDFLESHFLDKEVKLIKKMGNHLTNLRRVQGPQPAQTGVAQASLGEYLFERLTLKHD

SEQ ID NO: 1729 - DNA, 125 bp, Homo sapiens
  ref <308>: DATABASE ACCESSION NUMBER: EMBL / AI003447
  ref <309>: DATABASE ENTRY DATE: 2000-03-03
gcatcttcaggagacgctcgtagccctcgcgcttctcctcggccaattcgcggaagaagtggctcacgccttccagagccacatcatcgcggtcgaaatagaagcccagagagaggtagggatag

SEQ ID NO: 1730 - DNA, 552 bp, Rattus norvegicus; identical to SEQ ID NO: 1727
  ref <308>: DATABASE ACCESSION NUMBER: Refseq / NM_022500
  ref <309>: DATABASE ENTRY DATE: 2003-01-13

SEQ ID NO: 1731 - protein, 183 aa, Rattus norvegicus; identical to SEQ ID NO: 1728
  ref <308>: DATABASE ACCESSION NUMBER: Refseq / NP_071945
  ref <309>: DATABASE ENTRY DATE: 2003-01-13

SEQ ID NO: 1732 - DNA, 125 bp, Homo sapiens; identical to SEQ ID NO: 1729
  ref <308>: DATABASE ACCESSION NUMBER: EMBL / AI003447
  ref <309>: DATABASE ENTRY DATE: 2000-03-03

SEQ ID NO: 1733 - DNA, 1054 bp, Rattus norvegicus
  ref <308>: DATABASE ACCESSION NUMBER: Refseq / NM_017166
  ref <309>: DATABASE ENTRY DATE: 2003-01-14
ggtccgagccgcctggcttaggcggaggcgacggcagggtagggagcagccgggaacgcggcgagcccctagccggggacacgggacgggcggagacctcgagccctgggctttccttgccagtggattgtgtagagtgtacagccagtctcttgtcttctgtccaacatggcatcttctgatattcaggtgaaagagctggagaagcgagcttccggccaggcttttgagctgattctcagccctcgatcaaaagaatctgtccccgagttccccctttcccccccaaagaagaaggatctttccctggaggaaattcagaagaaattagaagctgcagaagaaagacgcaagtctcatgaagcagaagtcttgaagcagctcgctgagaagcgggagcatgaaaaagaagtgctccagaaagccattgaggagaacaacaacttcagcaaaatggcagaggagaaactgacccacaaaatggaggctaacaaagagaaccgggaggcgcaaatggctgccaagctggagcgtttgcgagagaaggacaagcacgttgaagaggtgcggaagaacaaagaatccaaagaccccgcggacgagaccgaggctgactaagttgttccgagaactgactttctccccgaccccttcctaaatatccaaagactgtactggccagtgtcatttactttttcctccctgacaaatattctagaagctgatgtaggaaccgtataggtagatccagaccgtgagatgttttaggggctcaaggggagaaactgaaagtgttttgctcttttttaaagtgttggtctttctaacgtagctatttttctcgttgcatcttttcctctcgggcacactcggtgtgctgggttaatggctagtgctgtattgactgtggaagacgttcgtgaagagtatgtagtggcttcttccaacccattagatgctgagtatctgttcactttgcgatcccaattctgtcccaatctcaccagatgctactgtactggaatggttaataaactgcacagtgctgttggtc

SEQ ID NO: 1734 - protein, 149 aa, Rattus norvegicus
  ref <308>: DATABASE ACCESSION NUMBER: Refseq / NP_058862
  ref <309>: DATABASE ENTRY DATE: 2003-01-14
MASSDIQVKELEKRASGQAFELILSPRSKESVPEFPLSPPKKKDLSLEEIQKKLEAAEERRKSHEAEVLKQLAEKREHEKEVLQKAIEENNNFSKMAEEKLTHKMEANKENREAQMAAKLERLREKDKHVEEVRKNKESKDPADETEAD

SEQ ID NO: 1735 - DNA, 737 bp, Rattus norvegicus
  ref <308>: DATABASE ACCESSION NUMBER: Refseq / NM_138548
  ref <309>: DATABASE ENTRY DATE: 2003-03-08
cctgtatgaaagttccgagcttgcagctgtagggaaccacgtaaggccagggcgcgtttccggtgcgggcagtcgccaccagagttaaagaccgggcgtcagaaggggaccatggccaacagcgagcgtaccttcatcgccatcaagcctgatggggtccagcgggggcttgtgggagagatcatcaagcgattcgagcagaagggattccgcctggttggtttgaaatttatacaggcttcagaggatcttctcaaggagcactacattgacctgaaggaccgccccttcttttctggcctggtgaagtacatgcactcaggaccggtggttgctatggtctgggagggactgaatgttgtgaagacaggccgggtgatgcttggagagaccaaccccgcagactctaagcctgggaccatacgaggagacttttgcattcaagttggcaggaacatcattcatggcagcgattctgtggagagtgcggagaaggagatcagtttgtggtttcagcctgaggagctggtggactacaagagctgtgcgcagaactggatctatgagtgacagcagggcccctgctttttttctgtctactgacccttgatctcacaggcaggggagcagcagctctagatctttctggaacttctctgaactggaagaagcctctgggcgctgtgactccctgtgcagtgttaagtgccactggtagattaaagtgttttgtctgt

SEQ ID NO: 1736 - protein, 152 aa, Rattus norvegicus
  ref <308>: DATABASE ACCESSION NUMBER: Refseq / NP_612557
  ref <309>: DATABASE ENTRY DATE: 2003-03-08
MANSERTFIAIKPDGVQRGLVGEIIKRFEQKGFRLVGLKFIQASEDLLKEHYIDLKDRPFFSGLVKYMHSGPVVAMVWEGLNVVKTGRVMLGETNPADSKPGTIRGDFCIQVGRNIIHGSDSVESAEKEISLWFQPEELVDYKSCAQNWIYE

SEQ ID NO: 1737 - DNA, 732 bp, Homo sapiens
  ref <308>: DATABASE ACCESSION NUMBER: Refseq / NM_000269
  ref <309>: DATABASE ENTRY DATE: 2002-11-05
tgctgcgaaccacgtgggtcccgggcgcgtttcgggtgctggcggctgcagccggagttcaaacctaagcagctggaaggaaccatggccaactgtgagcgtaccttcattgcgatcaaaccagatggggtccagcggggtcttgtgggagagattatcaagcgttttgagcagaaaggattccgccttgttggtctgaaattcatgcaagcttccgaagatcttctcaaggaacactacgttgacctgaaggaccgtccattctttgccggcctggtgaaatacatgcactcagggccggtagttgccatggtctgggaggggctgaatgtggtgaagacgggccgagtcatgctcggggagaccaaccctgcagactccaagcctgggaccatccgtggagacttctgcatacaagttggcaggaacattatacatggcagtgattctgtggagagtgcagagaaggagatcggcttgtggtttcaccctgaggaactggtagattacacgagctgtgctcagaactggatctatgaatgacaggagggcagaccacattgcttttcacatccatttcccctccttcccatgggcagaggaccaggctgtaggaaatctagttatttacaggaacttcatcataatttggagggaagctcttggagctgtgagttctccctgtacagtgttaccatccccgaccatctgattaaaatgcttcctcccagc

SEQ ID NO: 1738 - protein, 152 aa, Homo sapiens
  ref <308>: DATABASE ACCESSION NUMBER: Refseq / NP_000260
  ref <309>: DATABASE ENTRY DATE: 2002-11-05
MANCERTFIAIKPDGVQRGLVGEIIKRFEQKGFRLVGLKFMQASEDLLKEHYVDLKDRPFFAGLVKYMHSGPVVAMVWEGLNVVKTGRVMLGETNPADSKPGTIRGDFCIQVGRNIIHGSDSVESAEKEIGLWFHPEELVDYTSCAQNWIYE

SEQ ID NO: 1739 - DNA, 2874 bp, Rattus norvegicus; identical to SEQ ID NO: 1716
  ref <308>: DATABASE ACCESSION NUMBER: Refseq / NM_012570
  ref <309>: DATABASE ENTRY DATE: 2002-11-14

SEQ ID NO: 1740 - protein, 558 aa, Rattus norvegicus; identical to SEQ ID NO: 1717
  ref <308>: DATABASE ACCESSION NUMBER: Refseq / NP_036702
  ref <309>: DATABASE ENTRY DATE: 2002-11-14

SEQ ID NO: 1741 - DNA, 1403 bp, Rattus norvegicus
  ref <308>: DATABASE ACCESSION NUMBER: Refseq / NM_017148
  ref <309>: DATABASE ENTRY DATE: 2003-01-14
gctgtcgcccgtgcgcctcctagcagctgccagaatgccaaactggggaggaggcaagaaatgcggggtgtgccagaagacagtctactttgctgaggaggtccagtgcgagggcaacagcttccacaaatcctgcttcctgtgcatggtttgcaagaagaatctggacagcaccactgtggcagtgcatggagaagagatctattgcaagtcatgttatggcaagaagtatggaccaaaaggctacggctacgggcagggtgcaggcacgctgagcatggacaagggggagtctctgggcatcaagcatgaggaagcccccggacacaggcctaccaccaaccccaatgcatccaagtttgctcagaagatcggcggctctgagcgctgtccgcgatgcagccaggcagtctatgcagcggagaaggtgatcggtgccgggaagtcctggcataagtcctgcttccgatgtgccaaatgtggcaaaggcctcgagtcgaccaccctggcagacaaggatggtgagatctattgcaaaggatgctatgccaaaaactttgggcccaaaggttttggctttggacaaggagctggcgccttggtccattcagagtgaggctgccgctgcgtaccctgcctactcctgcactctcataagcagtccgttcctggaagccatggacacctccaagatcctctctctcactcagccctgctgcacatcactaatgccttggacttgggtgttctttggcttaggggtctgcctgagttccttccccactaagggcttcctcctgcctggcattcgatacccttatctttaggagacatctgtctagtcaccccttcccagataccaggtccctctcccccacaccttacccctacagacctctgtggccaggacactctctactggccaggacacctgaccccacatctttggagcccaaaagagcaaggcggaagacctgcgctagggaaggctgtggtctattgtatccagagtctctctctgggtaggatgctgagcttcttggtgcctctcagtctggaagtccccgtgagaggcagagaggtgcggataggattgtggggtcatcagaaggagcttgttctctgacctcttgcctttgaatgtggaaataataacttttcacttagggatgaagaagaacgcaggtcagaggaccccaaaatctagaggttgcctgacctcaagttccctgttccatgggcaagggagagcctaatgcataccttgaacaaggcattgacatggatcagtggtccagatcttagagtggtcagttctggttctaagcttgggtctggtggctgggatggacagcttctgttgcagcatagcccagggtagagctgtgttctagccactcctg

SEQ ID NO: 1742 - protein, 193 aa, Rattus norvegicus
  ref <308>: DATABASE ACCESSION NUMBER: Refseq / NP_058844
  ref <309>: DATABASE ENTRY DATE: 2003-01-14
MPNWGGGKKCGVCQKTVYFAEEVQCEGNSFHKSCFLCMVCKKNLDSTTVAVHGEEIYCKSCYGKKYGPKGYGYGQGAGTLSMDKGESLGIKHEEAPGHRPTTNPNASKFAQKIGGSERCPRCSQAVYAAEKVIGAGKSWHKSCFRCAKCGKGLESTTLADKDGEIYCKGCYAKNFGPKGFGFGQGAGALVHSE

SEQ ID NO: 1743 - DNA, 1738 bp, Rattus norvegicus
  ref <308>: DATABASE ACCESSION NUMBER: Refseq / NM_019132
  ref <309>: DATABASE ENTRY DATE: 2002-11-14
gcagcagcagctcccgcggctcctgctctgctccgcctcggccccggagcgaggggcggagagccgcgcgcttgccttagtccgagccgccaccctccccgcgttccccgctttcccggcccgcccgaggccgcccgccccgtccccgccgccccgcagcccggccgcgccccgccgccgccatgggctgcctcggcaacagtaagaccgaggaccagcgcaacgaggagaaggcgcagcgcgaggccaacaaaaagatcgagaagcagctgcagaaggacaagcaggtctaccgggccacgcaccgcctgctgctgctgggtgctggagagtctggcaaaagcaccattgtgaagcagatgaggatcctacatgttaatgggtttaacggagagggcggcgaagaggacccgcaggctgcaaggagcaacagcgatggtgagaaggccaccaaagtgcaggacatcaaaaacaacctgaaggaggccattgaaaccattgtggccgccatgagcaacctggtgccccccgtggagctggccaaccctgagaaccagttcagagtggactacattctgagcgtgatgaacgtgccaaactttgacttcccacctgaattctatgagcatgccaaggctctgtgggaggatgagggagttcgtgcctgctacgagcgctccaacgagtaccagctgatcgactgtgcccagtacttcctggacaagattgatgtgatcaagcaggccgactacgtgccaagtgaccaggacctgcttcgctgccgcgtcctgacctctggaatctttgagaccaagttccaggtggacaaagtcaacttccacatgttcgatgtgggcggccagcgcgatgaacgccgcaagtggatccagtgcttcaatgatgtgactgccatcatcttcgtggtggccagcagcagctacaacatggtcatccgggaggacaaccagaccaaccgtctgcaggaggctctgaacctcttcaagagcatctggaacaacagatggctgcgtaccatctctgtgatcctcttcctcaacaagcaagatctgcttgctgagaaggtcctcgctgggaaatcgaagattgaggactactttccagagttcgctcgctacaccactcctgaggatgcgactcccgagcccggagaggacccacgcgtgacccgggccaagtacttcatccgggatgagtttctgagaatcagcactgctagtggagatggacgtcactactgctaccctcactttacctgcgccgtggacactgagaacatccgccgtgtcttcaacgactgccgtgacatcatccagcgcatgcatcttcgccaatacgagctgctctaagaagggaacgcccaaatttaattcagccttaagcacaattaattaagagtgaaacgcaatcgtacaagcagttgatcacccaccatagggcatgatcaacaccgcaacctttcccttttctccccagtgattctgaaaaccccctcttcccttcagcttgcttagatgttccaaatttagtaagcttaaggcggcctacagaagaaaaagaaaaagaaaaaggccacaaaagttccctctcactttcagtaaataaaataaaagcagcaacaaacagaaataaagaaataaatgaaataaatgaaactcaaaatgaaataaatattgtgttgtgcagcattaaaaaatcaaaataaaaattaaaaatgagc

SEQ ID NO: 1744 - protein, 394 aa, Rattus norvegicus
  ref <308>: DATABASE ACCESSION NUMBER: Refseq / NP_062005
  ref <309>: DATABASE ENTRY DATE: 2002-11-14
MGCLGNSKTEDQRNEEKAQREANKKIEKQLQKDKQVYRATHRLLLLGAGESGKSTIVKQMRILHVNGFNGEGGEEDPQAARSNSDGEKATKVQDIKNNLKEAIETIVAAMSNLVPPVELANPENQFRVDYILSVMNVPNFDFPPEFYEHAKALWEDEGVRACYERSNEYQLIDCAQYFLDKIDVIKQADYVPSDQDLLRCRVLTSGIFETKFQVDKVNFHMFDVGGQRDERRKWIQCFNDVTAIIFVVASSSYNMVIREDNQTNRLQEALNLFKSIWNNRWLRTISVILFLNKQDLLAEKVLAGKSKIEDYFPEFARYTTPEDATPEPGEDPRVTRAKYFIRDEFLRISTASGDGRHYCYPHFTCAVDTENIRRVFNDCRDIIQRMHLRQYELL

SEQ ID NO: 1745 - DNA, 508 bp, Rattus norvegicus
  ref <308>: DATABASE ACCESSION NUMBER: EMBL / AI639044
  ref <309>: DATABASE ENTRY DATE: 2000-03-04
actggaacctcaacatctacttcaactgcactgacttgaaccctagccgcgagcgctgtggggtgcccttctcctgctgtgttagggaccctgcggaagacgtcctcaatacccagtgtggctatgacatccgactcaaactggagctggagcagcaaggctccatctacaccaaaggctgcgtgggccagtttgagaagtggctccaagataacctgattgtggtggccggggtcttggtggccattgccctcctccagatatgtggcatctgcttggcccagaacctcgtgagtgacatcgaggcagtaaaggccaactggagcctgctgtctcagaccactccatattcaccatgaccttgaacctgcctggagctcaccttggcctcagtgtcacagcctctgaaatgggtccaagaatcctctctgtctctctctctcgcttgcctctcaggaccacacatggtgatggctacgagcgactcaataaacactttgaaaaacaa

SEQ ID NO: 1746 - DNA, 416 bp, Rattus norvegicus
  ref <308>: DATABASE ACCESSION NUMBER: EMBL / AI639093
  ref <309>: DATABASE ENTRY DATE: 2000-03-04
cggcacgagagaggacgctgcaagtgtccgtgctagtggctttcgcctctggagtggtccttggctggcaagcgaatcggttgcggaggcgttacctggactggaggaagcggaggctgcaggacaagctggcgacgactcagaaaaagctggacttggcctgagcacgttgggttcttctccaagcctcgtgcagcccgtatccggggagctgcgcgactacacgccctgagtcccggctcgtccttgcacggcttgcaggaacgtggcttgcttccagacctcagaaagaaaatagttttgtcttcgctaacagcctgtgctcagcttgtcgaagatggatataaagcacgggaaagaaaacatttcttgcactttatgaatctatttttaaaataaaaaattttaaacttcaa

SEQ ID NO: 1747 - DNA, 360 bp, Homo sapiens
  ref <308>: DATABASE ACCESSION NUMBER: EMBL / F30755
  ref <309>: DATABASE ENTRY DATE: 1999-05-08
ttccgagtactccctgggctggcaggcgaaccgactgcggaggcgctacttggactggaggaaaaggaggctgcaggacaagctggcggcgacgcagaagaagctggacctggcctgagactctgcgccttccgccccattctgtccccctcatggccaccttgccatgtccgcgccggagccccggtccgccggcgcccagaaccaggcttgccacacagtccccgcctgccatggccggctcttcctggagtgttgcttgttgaagatgcatatagactaccggaaagaaatgacttcttcttgcactttatgaatcaattttatttttaaaataaaaaaattaaacatcaaaaaaaa

SEQ ID NO: 1748 - DNA, 355 bp, Rattus norvegicus; identical to SEQ ID NO: 299
  misc_feature (1)..(355): n=a, c, g or t
  ref <308>: DATABASE ACCESSION NUMBER: EMBL / H31144
  ref <309>: DATABASE ENTRY DATE: 2000-03-04

SEQ ID NO: 1749 - DNA, 4548 bp, Homo sapiens; identical to SEQ ID NO: 300
  ref <308>: DATABASE ACCESSION NUMBER: Refseq / NM_005781
  ref <309>: DATABASE ENTRY DATE: 2002-05-30

SEQ ID NO: 1750 - protein, 1036 aa, Homo sapiens; identical to SEQ ID NO: 301
  ref <308>: DATABASE ACCESSION NUMBER: Refseq / NP_005772
  ref <309>: DATABASE ENTRY DATE: 2002-05-30

SEQ ID NO: 1751 - DNA, 440 bp, Rattus norvegicus
  ref <308>: DATABASE ACCESSION NUMBER: EMBL / H31707
  ref <309>: DATABASE ENTRY DATE: 2000-03-04
cctaaagatggttctagccatgtccttcctgtatgtgctctttgagaaccattcctgtccctcagtacattcccagggcagggtgggggtggaaagtgggagggggtgttcccctccctcttgtgtaccgttaggaccttgctgctgctattgcacttcaccaggggctggctccggcctcaacaccctcagtctcttctccccacatttcgggtcccgtggggtggggtcagccactgctctgtacagaactacaggaactgttgtgtatatatataactatttaatatgggatatgttcccctaaccctgtgcatccctgaattcctccttccggctttacttccagttgaagtattgaactgggctgaggtagggtcactgtcttgggagaggtcagggattcatctgtgcttgtaaataaataatgtcatgactgt

SEQ ID NO: 1752 - DNA, 1701 bp, Homo sapiens
  ref <308>: DATABASE ACCESSION NUMBER: Refseq / NM_144568
  ref <309>: DATABASE ENTRY DATE: 2002-12-04
actggttgcggagtgagctgggcgcgcggcgcgcaggcgccctggggacccggtagcggcggtggcggtggcggcggtggcggtggctgcggcgacggcagaggcgaagggagccggatcgccgacctgagcgggaggcggcggtggcggccatggcggcagatggagagcgttccccgctgctgtctgagcccatcgacggtggcgcgggcggcaacggtttagtggggcccggcgggagtggggctgggcccgggggaggcctgaccccctccgcaccaccgtacggagccgcatttcccccgtttcccgaggggcatccagccgtgttgcctggggaggacccacccccctattcacccttaactagcccggacagtgggagtgcccctatgatcacctgccgagtctgccaatctctcatcaacgtggaaggcaagatgcatcagcatgtagtcaaatgtggtgtctgcaatgaagccaccccaatcaagaatgcacccccagggaaaaaatatgttcgatgcccctgtaactgtctccttatctgcaaagtgacatcccaacggattgcatgccctcggccctactgcaaaagaatcatcaacctggggcctgtgcatcccggacctctgagtccagaaccccaacccatgggtgtcagggttatctgtggacattgcaagaatacttttctgtggacagagttcacagaccgcactttggcacgttgtcctcactgcaggaaagtgtcatctattgggcgcagatacacacgtaagagatgtatctgctgcttcttgcttggcttgcttttggcagtcactgccactggccttgcctttggcacatggaagcatgcacggcgatatggaggcatctatgcagcctgggcatttgtcatcctgttggctgtgctgtgtttgggccgggctctttattgggcctgtatgaaggtcagccaccctgtccagaacttctcctgagcctgatgacccacagactgtgcctggcccctccctggtggggacagtgacactacgaagggagctggggtagttaaaggctcccggggcttctagaaggaagccaagcagctgccttccttttccctggggagaggtaggaaggaaccaggccctcacttaggtttggaggggcagataagagcactgctgaccatctgctttcctccaagggttctgtgtctagggtgaagtaggcaaaacgttgcccttaaaactgggccctgaagacggttccagccttgtccttcctgtgtgctccctgagagccattcctgtcccttacacattccagggcagggtgggggtgggtagccctgggggttcccctccctcttgtgcaccattaggactttgctgctgctattgcacttcaccagaggttggctctggcctcagtaccctcagtctcctctccccacattgtgtcctgtgggggtggggtcagccgctgctctgtacagaaccacaggaactgatgtgtatataactatttaatgtgggatatgttcccctattcctgtatttcccttaattcctcctcccgaccttttttacccccccagttgcagtatttaactgggctgggtagggttgctcagtctttgggggaggttagggacttatcctgtgcttgtaaataaataaggtcatgactctaaaaaaaaaaaaaaaa

SEQ ID NO: 1753 - protein, 277 aa, Homo sapiens
  ref <308>: DATABASE ACCESSION NUMBER: Refseq / NP_653169
  ref <309>: DATABASE ENTRY DATE: 2002-12-04
MAADGERSPLLSEPIDGGAGGNGLVGPGGSGAGPGGGLTPSAPPYGAAFPPFPEGHPAVLPGEDPPPYSPLTSPDSGSAPMITCRVCQSLINVEGKMHQHVVKCGVCNEATPIKNAPPGKKYVRCPCNCLLICKVTSQRIACPRPYCKRIINLGPVHPGPLSPEPQPMGVRVICGHCKNTFLWTEFTDRTLARCPHCRKVSSIGRRYTRKRCICCFLLGLLLAVTATGLAFGTWKHARRYGGIYAAWAFVILLAVLCLGRALYWACMKVSHPVQNFS

SEQ ID NO: 1754 - DNA, 1742 bp, Rattus norvegicus
  ref <308>: DATABASE ACCESSION NUMBER: EMBL / S61973
  ref <309>: DATABASE ENTRY DATE: 2000-06-10
gaattcggcaggcgcaggccaagcaactcggccgtccagcgggtgcaggtgcggaccaccatcaccgcgcgcgcttgcagccaccgtagacaccggtctctggctccctagagcggggcagccacagaacccgaggccatgtaccatgaaaagagtttcttggtctctggggacagctatcctcccccaaaccctggctatcctgtggggccacaagcccctatgcctccctatgttcagcctccctaccctggggccccatacccacaggccgctttccagccctctccctatggtcaaccagggtatccccatggtcccggtccctatcacaaggtggttacccctcaaggacctactcaaggaggctacccaccagggccattacccacagagccccttcccccctaacccctatggacagccaccacccttccaggaccctggctcacctcagcatgggaactaccaggaggaagggcctccatcctactatgacaaccaggacttcccctcggtcaactgggacaagagcattcgccaggccttcatccgaaaggtgttcctggtgctgaccctgcagctgtcggtaaccctgtcgactgtggccattttcacttttgtcggggaggtgaagggctttgtccgggccaatgtctggacctactatgtctcctacgccatcttcttcatctccctcattgtcctcagctgttgcggggacttccggaaaaagcatccctggaaccttgttgccctgtcgatcctgaccatcagtttgtcctacatggtgggcatgatagccagtttttacaacacggaggcggtcatcatggccgtgggcatcaccacagctgtctgcttcacggtggtcatcttctccatgcagacccgctacgacttcacctcgtgcatgggcgtgctcctggtgagcgtggtggtgctcttcatcttcgccatactctgcatcttcatccggaaccgcatcctggagatcgtgtacgcctcgctgggcgctctgctcttcacctgcttcctggctgtggacacccagctgctcctggggaacaagcaactgtccctgagcccagaagaatatgtgtttgcggccctgaatctgtacacggacatcatcaacatcttcctatacattctcaccatcattggccgtagccaaggaataggacaagccccagctcaggtggcatggtgggctcagacccatgcccctgccatgacattgccatctgtgcttccccctctctggttcccagccatggcctggagcagagggagcccctctcgccctcgtgtatgtacactgcaaatacttaacgttcggaccctctctgccacagcatggaaacctttatcccttttgcccttgccaaggggtgacagggctgcatttctgtgccaccttctgtctactcattgttgcatgagccctgtctgccagcccatcccggggtctgggatcaacaccaggtcccaggggagaaggatcataccaagaggtgagggtgcacgtcttccctcctgtcccagctcccctggcatagagtccccatgtcccctcctcaccctgccttctgaggggcttgcagggtggggcctcgttcttgttctgggccccgagaccaagagagggtggcatgtttcaggggagaggctctcttgtgtgctgccattgtaaaatgccaataaaagggtatcttctgctaaaaaaaaaaaccgaattc

SEQ ID NO: 1755 - DNA, 351 bp, Rattus norvegicus
  ref <308>: DATABASE ACCESSION NUMBER: EMBL / S68135
  ref <309>: DATABASE ENTRY DATE: 2000-03-04
tcttccaactcaaccaaccactcgattaatctttccttgcctgagaccagttgaaagcactggagtgcagggaggagagggaagggccaggctgggctgccaggttcaggtctcctgtgcactgagggccagacaaacaccatgagaaggacctcggaggctgagaacttactgctgaagacacggacactcctgccctgctgtgtatagatggaagatatttatatattttttggttgtctattaaatacagacactaagttatagtatatatctggacaaacccacttgtaaatacaccaacaaactcctgtaactttacctaagcagatataaatggctggtttttag

SEQ ID NO: 1756 - DNA, 206 bp, Rattus norvegicus
  ref <308>: DATABASE ACCESSION NUMBER: EMBL / S69315
  ref <309>: DATABASE ENTRY DATE: 2000-06-28
gggggtggaggcggctcctgcgaccgaaaaggacttgcgactctccggccacgcaccatgagggtcctgtgggtgctgggcctctgctgcgtcctgctgaccttcgggtttgtgagagctgacgatgaagtcgatgtggatggcacggtagaagaggacctgggtaaaagtagagaaggctcacggacagacgatgaaggttgtgc

SEQ ID NO: 1757 - DNA, 1925 bp, Rattus norvegicus; identical to SEQ ID NO: 152
  ref <308>: DATABASE ACCESSION NUMBER: EMBL / S87522
  ref <309>: DATABASE ENTRY DATE: 2000-03-04

SEQ ID NO: 1758 - DNA, 3502 bp, Rattus norvegicus
  ref <308>: DATABASE ACCESSION NUMBER: Refseq / NM_053865
  ref <309>: DATABASE ENTRY DATE: 2003-01-13
gaaaagcacatcccttaatcagagcctgccattagcaggcccggggctgacgtgctttagggaggactcggaccaagcaggccattttcacctgcgtaataacaggcttgggagtagcgaacgagcgcaggcacagcgagcggcctctggagcaggggaggagcgcaggcggcagccgccccggggccccggaggaagaggagggggagaaggaggagccgaagcgcccagaacagcagcagcgtctcggcctgagttgcagaaaaagcagcgacggtggcgcggagactctgcagcctcctggagcccggagtcccggtaggcaagcagcaggcagcgtccgcgtccctagccaccgcacccgggccttgccaagctacagtcgcccagcctggggcatagccagtcatggccgcaccgccggatctgcaagatgagccactgtctccggctaaccccgggtcccagttgttcgggggccggggggagggggaagaagcgacgccgaagggggccagaccagcgcagcaggacggggagcccgcttgggggtccggcgctggagctggggtagtgtcgtcgcggggactgtgctccggccccgcccggtcgcctcccgtcgccatggaaactgcatccacaggtgtggcagctgttcctgatgccctcgatcactcttcctctccaacactaaaagatggggaaggggcatgttacacatccctgatttctgacatctgttatccacctcgagaggactctgcatactttactggaattcttcagaaagaaaatggtcacatcaccacttccgagagtcctgaggagctggggacccccggaccctctttaccagaagtgcctgggacggagccacatggcttattgagttctgattctggaatagagatgactcctgctgagtccactgaggtgaacaagatcctagctgaccccctagaccagatgaaagcagaggcctgtaaatatattgacataaccaggccacaggaggcaaaaggccaggaggagcaatcccctgggctagaagacaaagacttggactttaaagacaaggactctgaagtctccacaaaaccagaaggggtccatgcacctaaccagccatctcctgtggaggggaagctcatcaaggacaacttatttgaagaatctacctttgctccttacatagatgagctttctgatgagcaacacaggatgtctctggtcactgcccctgtcaagatcacactgacggaaatcggacctcctgtcatgactgccacacacgagacaatccccgagaagcaagacctgtgtctaaagccaagtcctgacacagttcccactgtgactgtctcagagcctgaagatgacagcccaggatctgtcactcctccatcttctggaacagaaccatctgctgcagagtcccaggggaaaggcagcgtctccgaggatgagttgattgctgccattaaagaagcaaaggggttatcatatgaaacaaccgagagtccaaggccagtgggccaggcggccgacagacccaaagtcaaggccaggtccgggctgcccacaatccccagctccctggaccaggaggccagcagtgcggagtccggagactcagaaattgaactggtgtcagaggaccccatggcctctgaggatgcgctaccctctggctatgtgagcttcggccacgtgtcgggcccgcctccctctcctgcctctccatctatccagtacagcatcctgcgggaggagcgggaggccgagctggacagcgagctcatcatcgagtcctgcgatgcctcctcggcctcagaggagagccccaagcgcgagcaggactcgcccccgatgaaaccgggcgtcctggatgccatccgcgaagagacaagctctcgggccaccgaagagcgagcgcccagccaccaaggccctgtggaacctgacccgatactcagcttcacccctgtcaccctccagtcccgcccagagccatcatcaggtgatggagccccggtcccagagccgcccaagtcacagcagcagaagcctgaagaggaagctgtgagttccagccaaagtcccgcggccaccgaaattcctggaccacttggttctgacctcgtgccccctctgcctttcttcaacaagcaaaaagctattgaccttctgtactggcgggacatcaagcagacggggattgtgttcgggagcttcctgctgctgctcttctccctgacccagttcagcgttgtgagcgtcgtcgcctacctggccctggctgccctctctgccaccatcagcttccgcatctacaagtccgttctacaagctgtgcagaaaacagatgagggtcaccctttcaaggcctacctggagctggagatcaccctgtcccaggagcagatccagaagtacacagactgcctgcagctatacgtgaacagcactctgaaggagctacggaggctcttcctggtccaggacctggtggattccttaaaatttgcagtcctcatgtggctcctgacctacgttggcgcactcttcaatggcctgaccctgctgcttatggctgtggtttcgatgtttactctacctgtggtatatgttaagcaccaggcacaggttgaccaatatctgggacttgtgaggactcacataaacaccgttgtggcaaagatccaggctaaaatccccggcgccaagaggcacgctgagtagatggttgccccaggagaagccggacatgaatgggggtgtctggagtggtaacagctctctccttcctcgttactgcgaattgattgtttcccttccccagtaccataatcttagaggcaaacttcgagacaggtgttttcaggcttttcctgtactcttaggatatttgagtccccccgccccttgtcaagcactaaagtatagagtgtgttagatgtggtttttaattttgtgttgctaaaaaaaaaagtgcatgatggtgagagctcacgttctccttcgtcccttgctgtcctccccctgcaatgcttctgtggcttctactgtccctgtggctaggcccttcttgccaagtgcgctgacacatagtgggtcgcttatcatgtccttgggttgctggttggattcatctctaataacactatatagaatcgtaggccaatgttttagcattttacccccccacacacagaacataaaaattaatataaaacagttgaccgtgtatatggtgatccgttttgtataactaagaatgatcgaattaaagaataaatccaaaaatgaacgcacagtacttttattgtatgggatgcctgggctgatttacatgtatggtaactaaagtgccagcatgttgactttattacgatttgtatttcttcctctgtagttcctaacggactcaatcacagactctgggtatttgcacttatgtacttgatactgaatgcatcaataaatgtgactcaatgtaaac

SEQ ID NO: 1759 - protein, 777 aa, Rattus norvegicus
  ref <308>: DATABASE ACCESSION NUMBER: Refseq / NP_446317
  ref <309>: DATABASE ENTRY DATE: 2003-01-13
MAAPPDLQDEPLSPANPGSQLFGGRGEGEEATPKGARPAQQDGEPAWGSGAGAGVVSSRGLCSGPARSPPVAMETASTGVAAVPDALDHSSSPTLKDGEGACYTSLISDICYPPREDSAYFTGILQKENGHITTSESPEELGTPGPSLPEVPGTEPHGLLSSDSGIEMTPAESTEVNKILADPLDQMKAEACKYIDITRPQEAKGQEEQSPGLEDKDLDFKDKDSEVSTKPEGVHAPNQPSPVEGKLIKDNLFEESTFAPYIDELSDEQHRMSLVTAPVKITLTEIGPPVMTATHETIPEKQDLCLKPSPDTVPTVTVSEPEDDSPGSVTPPSSGTEPSAAESQGKGSVSEDELIAAIKEAKGLSYETTESPRPVGQAADRPKVKARSGLPTIPSSLDQEASSAESGDSEIELVSEDPMASEDALPSGYVSFGHVSGPPPSPASPSIQYSILREEREAELDSELIIESCDASSASEESPKREQDSPPMKPGVLDAIREETSSRATEERAPSHQGPVEPDPILSFTPVTLQSRPEPSSGDGAPVPEPPKSQQQKPEEEAVSSSQSPAATEIPGPLGSDLVPPLPFFNKQKAIDLLYWRDIKQTGIVFGSFLLLLFSLTQFSVVSVVAYLALAALSATISFRIYKSVLQAVQKTDEGHPFKAYLELEITLSQEQIQKYTDCLQLYVNSTLKELRRLFLVQDLVDSLKFAVLMWLLTYVGALFNGLTLLLMAVVSMFTLPVVYVKHQAQVDQYLGLVRTHINTVVAKIQAKIPGAKRHAE

SEQ ID NO: 1760 - DNA, 3202 bp, Homo sapiens
  ref <308>: DATABASE ACCESSION NUMBER: Refseq / NM_021136
  ref <309>: DATABASE ENTRY DATE: 2000-11-02
ctgagacaccgcagcttccctgagcgccgagtccctccggggacagcagcagggagcgcccgcgcagccaccgagcctctgcccagccaagccgccgtcgccgcgccgggggaccgccagccatggccgcgccgggggatccgcaggacgagctgctgccgctggccggccccgggtcccagtggctcaggcaccgaggggagggggagaacgaagcggtgacgccgaaaggggccacgccggcgccgcaggctggggagcccagcccggggttgggcgccagggcccgggaagcggcgtcgcgggaagccggctcgggccccgcccggcagtcgcccgttgccatggaaactgcatccacaggtgtggcaggtgtttccagtgccatggaccacaccttctcaacaacatcaaaagatggggaaggatcgtgttacacatctctcatttctgacatctgctatccacctcaggaggattctacatattttactggaattcttcagaaggaaaatggccacgtcaccatttcagagagccctgaggagctgggtacacccggcccctccttaccagatgtgcctgggatagagtctcgtggcttatttagttctgattctggaatagagatgactcctgcagagtccacggaagtgaacaagatcttagcagaccctctggaccagatgaaagcagaggcctataaatacattgacataaccagacccgaggaggtgaagcaccaagaacaacatcaccccgagctggaagataaagacttggactttaagaataaagacactgacatctcaattaaacctgaaggagtccgtgaacctgacaaaccagctcctgtggagggaaaaatcatcaaggaccatttattggaagaatccacatttgctccatacatagatgatctctctgaagaacagcgcagggctcctcagatcaccacccctgtcaaaatcacactgacggaaatagaaccttctgttgaaaccactacccaagagaagacccctgagaagcaagatatatgtctaaagccaagtcctgacacagtccccactgtcactgtctcggagcctgaagacgacagcccaggatctatcacccctccatcttctggaacagaaccatctgctgcagaatcccaggggaaaggcagcatctccgaggatgagctgatcaccgccatcaaagaagcaaagggattatcgtatgaaaccgccgagaacccacggccggtgggccagctggccgacaggcccgaggtcaaggccaggtccggaccgccaaccatccccagccccctggaccacgaggccagcagcgcggagtcgggggactcagagatcgagctggtgtccgaggaccccatggccgcggaggacgcgctgccctcaggctatgtgagctttggccacgtgggcggcccgccgccctcgcccgcctcgccatccatccagtacagcatcctgagggaggagcgcgaggccgagctggacagcgagctcatcatcgagtcgtgcgacgcctcctcggcctcggaggagagccccaagcgggagcaggactcacccccgatgaagcccagcgccctggatgccatccgggaggagactggcgtccgggccgaggagcgtgcgccaagccggcggggcctggccgagccgggttccttcctcgactacccctcaactgagccccagcctggccccgagctgccccctggagacggagccctggagcctgagacgcccatgttgccacggaagcctgaagaagactcgagttccaaccaaagtcctgcggccacaaagggccctgggcctctaggtcctggcgccccgcccccactgctgtttctcaataagcaaaaagctattgacctgttgtattggcgggacatcaagcagacgggcatcgtgtttgggagtttcctgctgctgctcttctccctgacccagttcagcgtggtgagcgtcgtggcctacctggccctggccgcactctcagccaccatcagtttccgcatctacaagtctgttttacaagcagtgcagaaaaccgacgaaggccaccctttcaaggcctacttggagcttgagatcaccctttctcaggagcagattcagaagtacacggactgcctgcagttctacgtgaacagcacacttaaggaactgaggaggctcttccttgtccaggacctggtggattccttaaaatttgcagtcctgatgtggctcctgacctacgttggcgctctcttcaatggcctgaccctgctgctcatggctgtggtttcaatgtttactctacctgtagtgtatgttaagcaccaggcacagattgaccaatatctgggacttgtgaggactcacataaatgctgttgtggcaaagattcaggctaaaatcccaggcgctaagaggcacgctgagtaaactgatttcccaccggggactggacacaaacaggaatgtctggagtggtaacagctctcttcttactcattactgcaaattgattgtctttcccccctccctccagtaccataatcttagagacaaaccttaaaacagctgtttttaggctgttccttgtactcttaggatatttgagtcacttgtgtcaaccactaaagtatagagaaaagtgtattagatgtggtttttaattttgtgttgctaaaaaaagtgcatgatggtgagagcccaagttatctttccctcttcggtgttcttcttctcttctctgcaatgcttctgtagcttctaatgttccccgtggctaggcctttcctgccgagtgctctgatgcaatagtggaaatcgcttatatgtccttgggttgctggttggattaatctttaataacaatatatagaattgtagactgatgttttagcatttttccaacacacacaacgtaaaaataaaagcagtcgaccgcacttatggtaatcagttttgtataacttaaaataattaaataaatgaataaatccaaaacaaacatgcagtacttttgttgtatgggattggtgggctgatttacatgtatggttactaaaaagtaccagcatgttaactttattacaatttgtattactttctctgtagttcctaatggattcaattacggactctggatatttgcacttatgtacttgatactgaatgcataaataaat

SEQ ID NO: 1761 - protein, 776 aa, Homo sapiens
  ref <308>: DATABASE ACCESSION NUMBER: Refseq / NP_066959
  ref <309>: DATABASE ENTRY DATE: 2000-11-02
MAAPGDPQDELLPLAGPGSQWLRHRGEGENEAVTPKGATPAPQAGEPSPGLGARAREAASREAGSGPARQSPVAMETASTGVAGVSSAMDHTFSTTSKDGEGSCYTSLISDICYPPQEDSTYFTGILQKENGHVTISESPEELGTPGPSLPDVPGIESRGLFSSDSGIEMTPAESTEVNKILADPLDQMKAEAYKYIDITRPEEVKHQEQHHPELEDKDLDFKNKDTDISIKPEGVREPDKPAPVEGKIIKDHLLEESTFAPYIDDLSEEQRRAPQITTPVKITLTEIEPSVETTTQEKTPEKQDICLKPSPDTVPTVTVSEPEDDSPGSITPPSSGTEPSAAESQGKGSISEDELITAIKEAKGLSYETAENPRPVGQLADRPEVKARSGPPTIPSPLDHEASSAESGDSEIELVSEDPMAAEDALPSGYVSFGHVGGPPPSPASPSIQYSILREEREAELDSELIIESCDASSASEESPKREQDSPPMKPSALDAIREETGVRAEERAPSRRGLAEPGSFLDYPSTEPQPGPELPPGDGALEPETPMLPRKPEEDSSSNQSPAATKGPGPLGPGAPPPLLFLNKQKAIDLLYWRDIKQTGIVFGSFLLLLFSLTQFSVVSVVAYLALAALSATISFRIYKSVLQAVQKTDEGHPFKAYLELEITLSQEQIQKYTDCLQFYVNSTLKELRRLFLVQDLVDSLKFAVLMWLLTYVGALFNGLTLLLMAVVSMFTLPVVYVKHQAQIDQYLGLVRTHINAVVAKIQAKIPGAKRHAE

SEQ ID NO: 1762 - DNA, 2143 bp, Rattus norvegicus
  misc_feature (1)..(2143): n=a, c, g or t
  ref <308>: DATABASE ACCESSION NUMBER: EMBL / U30485
  ref <309>: DATABASE ENTRY DATE: 2000-03-04
ggagtctgggggcttaaaacaaggactgggagggccagcctgcgggagggagacgttttttagcctgtcctacggaagcctgcgagggagggtggtatccactcccccaatccagtgtcctgatgcccagcgccaacgccagccgtaagggtcaggagaagccgcgggagatcgtggacgcggcggaagattatgctaaagagagatatggggtatcctctatgatacaatcacaagaaaaaccagatagagtgttggttcgagttaaggatctgacagtacaaaaagctgatgaggttgtttgggtccgtgcaagagttcatacaagcagagcaaaagggaagcagtgcttcttagtcctgaggcagcagcagtttaatgtccaggctcttgtggcggtgggagaccatgcaagcaagcagatggtgaaatttgctgccaacatcaacaaagaaagtattattgacgtagaaggcattgtgagaaaagtaaatcagaaaattggaagctgtacacagcaggatgttgagttgcacgtccagaagatttatgtgattagcttggctgagcctcgcctgcccttgcagctggatgatgccattcggcctgaggtggaaggagaagaggacgggagagctaccgttaaccaagatacaagattagacaacagaatcattgaccttaggacatcaaccagccaggccatcttccatctccagtccggcatttgccatctcttccgagaaacgttaattaacaaaggttttgtggaaatccagactcctaaaataatttcagctgccagcgaaggaggagccaatgtttttactgtgtcttattttaaaagtaatgcctacctcgctcagtctccacagctatataagcagatgtgcatttgtgctgattttgagaaggttttctgcattgggccagttttcagagctgaagactccaatacccatagacatctgactgaatttgttggtttggatattgaaatggcctttaattatcattaccatgaagttgtagaagagatcgctgacactttggtgcaaatattcaaaggacttcaagaaaggtttcagactgaaatccaaactgtaaacaaacagttcccatgtgagccgttcaaatttttggagccaactttaagactggagtattgtgaggctttggctatgcttagagaagccggagttgaaatggacgatgaggaagatctgagtacaccaaatgaaaaactgttgggtcgtttggtgaaggaaaagtatgatacagacttttatgttcttgataaatatccattggctgtaagacctttctataccatgcctgacccaagaaatcctaagcagtccaactcttacgatatgttcatgagaggagaagaaatattgtctggagcacaaagaatacatgatcctcagttgcttacagagagagctttacaccatggaattgatttggagaaaataaaagcttacattgattccttccgctttggagcccctcctcacgctggtggcggcattgggttggaaagagtgacgatgctgtttttaggattgcataatgtacgtcagacctcaatgttccctcgtgacccgaagcgactcacgccttaaagccacactttttattctctctttgattagcttatacctgaggtacttaagatatgcagtagaattaatgcattactaaagtgccacaattattttttaagtagctcaatacgaattcatttaagtcaaaacgttttagaacttcagatatgcttaaataggaaatacttgaacattttaatgagaaatttctatggttgaaattcatagtctatcactataggaaatgttaaggacaatttaaacagtttaggattatataatttttttttcttttctatattgtggtgaccaccatactaatatcctaaattttcaatatttgaacttttaactcttgacattgagaaaaaaaaattggagaaattaccaagattttaacatatataaaactggtatgtcttaaaagttactttcagaaatcatgtaaagtatctgaaaacactggctagaagcagtaacactgaaaccttgttatcaattctgaggctgaaattcaataaaaacttaaagcn

SEQ ID NO: 1763 - DNA, 4749 bp, Rattus norvegicus
  ref <308>: DATABASE ACCESSION NUMBER: Refseq / NM_053476
  ref <309>: DATABASE ENTRY DATE: 2003-01-14
gaattcggcacgaggccatgtagtaaaacatcagcatgtagacggcaggtgtgctaactgtttcctatttttatggttattttgtgcctgaaaatggtggcggtgtaaagttggaagtggaagggcatgcagttttcttcctgtctgtttcagccagtttgtttatactttattcctggtgtaatctagctgtgtaactatcgaattgttacaggtgccagagtggtacagttcggacaaactgcctggactgtctggatagaacaaacagtgtgcaggcgttccttggcttagagatgctagctaaacagctggaagctctgggcttggctgaaaagcctcagttggtgactcgctttcaagaagttttccggtccatgtggtctgtgaatggcgattcaatcagtaaaatatatgcaggcaccggagccctggaagggaaggccaagttaaaagatggtgcgcgatctgtcaccagaaccattcagaataacttcttcgacagctccaagcaagaagccattgatgttctgcttctgggaaacactctgaacagcgacttagccgacaaagcccgggcacttctaactactgggagtttgcgtgtgtctgaacagacattacagtcagcatcttccaaagtcttaaagaacatgtgtgagaacttctacaagtactcaaagcccaagaagatccgagtgtgtgttggaacctggaatgtgaacggcgggaaacagttccgcagcatagcattcaagaaccagaccctcaccgactggcttcttgatgcacccaagttagctggcatccaggagtttcaagataagagaagtaagccaactgatatatttgcaattggctttgaagaaatggtggagctgaatgctgggaacattgtgaatgcaagcacaacaaaccagaagctgtgggcagtggaactgcagaagaccatctccagagacaacaagtatgttctcctggcctcggagcagttggtgggtgtctgcctgtttgtctttatcagaccgcagcatgctccctttatcagggatgttgcagtcgatactgtgaaaactgggatgggaggcgcgactggaaataagggcgctgttgcaatccggatgctcttccacaccaccagcctttgctttgtctgcagtcactttgctgcaggccagtcccaagtcaaagagagaaatgaagatttcgtagaaatagcacgaaaattgagtttccccatgggaagaatgctcttctcccatgattacgtattctggtgtggtgatttcaactatcgaatcgatcttcctaatgaagaagttaaagagctcataagacagcaaaattgggattctcttatagctggagatcaactcatcaatcagaaaaatgcaggacagatctttagaggatttttagagggaaaagtaacgtttgctccaacctataaatatgacttgttttccgaagactatgacaccagtgaaaagtgccgcacccctgcttggacagaccgagtcctctggagaaggaggaagtggccttttgacagatcagctgaagacttagatcttctgaatgctagtttccaagatgaaagtaaaatcctgtatacatggactcctggcaccttgctgcactatggaagagccgagctgaagacttctgaccacaggcccgttgtcgccctgatcgatatagatatatttgaagttgaagctgaagagagacaaaaaatttataaagaagttattgcagtccagggcccaccggacggcacagtactggtctcaatcaaaagttctgcacaagagaatactttctttgacgatgctttgatcgatgagcttctgcagcagtttgcacacttcggcgaagttatacttataagattcgtagaagataaaatgtgggttacatttttggaggggagctctgccttgaatgttctgagcctaaatggtaaagagttattaaatcggactataacaattactttaaaaagtccagactggatcaaaactttggaagaagagatgagtttagagaaaatcagtgtcacattgccctcatcaaccagttccaccctgctcggtgaagatgcagaggtctcagcggactttgacatggaaggtgatgtcgacgactacagtgctgaggtggaggagcttcttcctcagcacctccagccatcctccagctctggcctcggcacctctccaagctcttcgccccggaccagtccctgccagtcacccacagcaccagagtactccgcaccttctcttcccatcagacctagtcgagcaccatcaagaactccaggacctctaagttcacagggtgctccagttgacacccagccagcagcccagaaggagtcttcccagaccatagagcccaagaggccaccccctccccgcccagttgctcctccagcacgtcctgccccaccacagaggccacctccaccttcaggggctaggagtccggcacctgctagaaaagaatttggaggtgtcggagcccctcccagtcccggggttactaggagagagatggaagcacccaaaagcccgggaacagcacggaaagataatatagggcgtaatcagccttcccctcaagccggacttgcaggcccaggaccttctggatatggtgcagctagaccgacaattccagctcgtgctggagtgatcagtgcccctcagagccaggctcgggtgtctgctggaaggctgactcctgaaagccaaagcaaacccttggagacatcgaaaggtcctgctgtccttccagaaccactgaagcctcaggctgcatttcctccgcagccttctctgcccacacctgctcaaaagttacaggacccacttgtccccatagcagcacctatgcctccctccattccccaatcgaatttggaaactccacccctgcccccacctcggagcaggtcatctcaaagcttgccttcagactcctcaccacagctacaacaggagcaaccaacagggtaacagcaggtaaaaataaatggagcttgtggtgtcaaacaagagccaacattgaagagtgacccatttgaagacctctcacttagtgtgcttgctgtatccaaggctcagccttctgctcagatttcacctgttctaaccccagacccaaagatgttgattcagttgccttctgcatcgcaaagtaaagttaactctttgagttctgtaagttgcatgctaaccatgcctccagttccagagcaaagcaagtcacaggaaagtgtggggagttctgcaaacccatttcccagcctgcctaccaggaacccttttacagacaggactgctgcccctggaaacccatttagagttcagtctcaagaatcagaggcaacttcttggctatccaaagaagagcctgtttctaacagtcctttccctcctctcatgcctctcagtcacgacatgagcaagccttcaagttcactagatggttttgaggacaattttgatctgcagagccagtctacagtaaaaacaagcaaccccaaaggatgggtaacatttgacgaagatgaagactttcctacaaaaggaaagtcaaggtcggtttatccagactccctgggtaatacagcagcttcatttgatgatgactggagtaaaggtacaaacgtttctttctgtgtgctgccagccagaaggccaccacctccaccacctcctgtccctctgctaccacctggcaccacctcatctgcaggacctagcacaaccctgtcatctaaggcatctcccacattggacttcacagaaagataatgacatggagggaagggagtttctcctggtgtggtgtgactgtttgtttctgtttgtcagggtagacccaagagaatggggcattaattagttgttatgtgcaataaataatcagtaagtgcactgatatctatataaaataccactagaggatgtggacaaagctggagtttgtgtatatcagaaatagcaaagacatcctcttaactggagttctggcctttctcttcagatgaatggaagagaataggaaccatttttaaaagtgcttaaaactactctagaatagtccttactcagatactcacatagcaatcacgtaaagcccacacaactgcagctgacagtactgccagcccattgtgctgttgacgattggtattcgtggatacttaccaaagagcttccagagttctggtgagattgctttgaacggcattactttagccaaaaggtctgtgtatatatacactgtgtgtgtatgtctgtatgtatgcacaaacacacatgtgtacatccacatacttataaaatctgtcttgatataattcagatcaaattttacctaacagttctgacaatgtcctttttttcaatatctcactatcaagaagctggctgccactgggtgtgcttcattacgtcactaactgcctcccagaatggaagggtcagtccctttacagagctgccatctcctgttacgctgcacctcagaccttcacattcatcctactaccttcctcctctggtatgcctttccctgggcatttacaatgggcagtacagacgtggtcagtcatgtgacagatactcaaaacagtaggcacctgccaccagattccaggaggaacactatcagtgtgctcctttctctgcacagccctttcccttcagacctttctgtttgcctcgtgccgaattc

SEQ ID NO: 1764 - protein, 908 aa, Rattus norvegicus
  ref <308>: DATABASE ACCESSION NUMBER: Refseq / NP_445928
  ref <309>: DATABASE ENTRY DATE: 2003-01-14
MLAKQLEALGLAEKPQLVTRFQEVFRSMWSVNGDSISKIYAGTGALEGKAKLKDGARSVTRTIQNNFFDSSKQEAIDVLLLGNTLNSDLADKARALLTTGSLRVSEQTLQSASSKVLKNMCENFYKYSKPKKIRVCVGTWNVNGGKQFRSIAFKNQTLTDWLLDAPKLAGIQEFQDKRSKPTDIFAIGFEEMVELNAGNIVNASTTNQKLWAVELQKTISRDNKYVLLASEQLVGVCLFVFIRPQHAPFIRDVAVDTVKTGMGGATGNKGAVAIRMLFHTTSLCFVCSHFAAGQSQVKERNEDFVEIARKLSFPMGRMLFSHDYVFWCGDFNYRIDLPNEEVKELIRQQNWDSLIAGDQLINQKNAGQIFRGFLEGKVTFAPTYKYDLFSEDYDTSEKCRTPAWTDRVLWRRRKWPFDRSAEDLDLLNASFQDESKILYTWTPGTLLHYGRAELKTSDHRPVVALIDIDIFEVEAEERQKIYKEVIAVQGPPDGTVLVSIKSSAQENTFFDDALIDELLQQFAHFGEVILIRFVEDKMWVTFLEGSSALNVLSLNGKELLNRTITITLKSPDWIKTLEEEMSLEKISVTLPSSTSSTLLGEDAEVSADFDMEGDVDDYSAEVEELLPQHLQPSSSSGLGTSPSSSPRTSPCQSPTAPEYSAPSLPIRPSRAPSRTPGPLSSQGAPVDTQPAAQKESSQTIEPKRPPPPRPVAPPARPAPPQRPPPPSGARSPAPARKEFGGVGAPPSPGVTRREMEAPKSPGTARKDNIGRNQPSPQAGLAGPGPSGYGAARPTIPARAGVISAPQSQARVSAGRLTPESQSKPLETSKGPAVLPEPLKPQAAFPPQPSLPTPAQKLQDPLVPIAAPMPPSIPQSNLETPPLPPPRSRSSQSLPSDSSPQLQQEQPTG

SEQ ID NO: 1765 - DNA, 4566 bp, Rattus norvegicus
  ref <308>: DATABASE ACCESSION NUMBER: Refseq / NM_031137
  ref <309>: DATABASE ENTRY DATE: 2003-01-13
ccagcttgcgtccatggccaccgctgcgaccgaggagcctttccctttccatggtcttctaccaaagaaagagactggggcctcctccttcctgtgccgctacccggagtatgacggacgcggggtgctcatcgccgtcctggacacaggggttgatcccggggccccgggcatgcaggtcacgactgatgggaaaccaaaaatcattgatatcattgatacaacaggaagtggtgatgtgaatactgctacagaagtagaaccaaaagatggcgaaatcactggtctttctggaagagtgcttaagattcctgcaaactggacaaatccttcaggaaaatatcatattggcattaaaaatggttatgacttctatccaaaggctctcaaggaaaggatacagaaagaacggaaggaaaaaatctgggatccaattcacagagttgcgcttgcagaagcttgtagaaaacaagaagaatttgatattgccaataatggctcttcccaagccaataaactaatcaaggaagagttgcagagtcaagtggaattacttaattcttttgagaaaaagtatagtgatccaggccctgtgtatgactgcttggtgtggcatgatggtgagacctggagagcctgtgttgattcgaatgaaaatggggacttgggtaaatctactgtattgagaaactacaaagaggctcaagaatatggttcttttggcacagctgagatgctgaattactctgttaatatttatgatgatggaaacctgctctccattgtgaccagtggaggagctcatggaacccatgtagcgagtatagctgctgggcattttccagaagagcctgaacggaatggagttgctcctggtgctcaaattctatccattaagattggtgatacaaggctaagcaccatggaaacaggcacaggcctcatcagagctatgatagaagttataaatcataagtgtgatcttgtcaactacagttatggagaagcaactcattggccaaattctgggagaatttgtgaagtaattaatgaagcagtatggaaacataatacaatttatgtttcaagtgctggaaataatggtccatgcctttctacagtgggttgtccaggaggaactacttccagcgtgataggtgttggagcttatgtttctcctgatatgatggttgcagagtattcactgagagagaaactacctgcaaatcaatatacatggtcttctagaggcccaagtgctgatggggcccttggtgtgagcatcagtgcaccaggaggtgctattgcttctgtgcctaactggacattgagggggactcagctaatgaatgggacatcaatgtcttcccccaatgcctgtggtggcattgccctggtactttcagggctgaaagcaaataatgttgactatactgttcactcagtcagaagagctctagaaaacactgcaataaaagctgacaatatagaagtatttgcccaaggacatggaattattcaggttgacaaagcttatgactacctcattcagaatacatcatttgctaacagattaggttttacagttacagttggaaataaccgtggcatctacctccgagatcctgttcaggtggctgctccttcagatcatggtgttggcattgagcctgtatttccagagaacacagaaaactctgaaaaaatatccttccagcttcatttagctttaacttcaaattcatcttgggttcaatgtcccagccatttggaactcatgaatcaatgtcggcacataaacatacgtgtggaccccaggggcttaagagaagggttacattatacagaggtatgtgggtatgatatagcatcccccaatgcaggtcctttattcagagttccaatcactgcagttatagcagcaaaagtaaatgaatcatcacattatgatctagcctttacagatgtacattttaaacctggtcagattcgaagacattttgttgaggttcctgagggggcaacttgggctgaagttaccgtgtgttcgtgttcttctgaggtatcagcaaaatttgttcttcatgcagtacagcttgtgaagcagagagcatatcgaagtcatgaattttataagttttgttcccttccagaaaaaggaacactcattgaagcctttcctgttctgggtgggaaagcaattgaattttgtattgctcgttggtgggcaagtctcagtgatgtcaatattgattataccatatcattccatggcatagtgtgtactgcaccacagttaaacattcatgcatctgaaggaatcaatcgttttgatgtccagtcctctttaaaatatgaagatctggctccttgcataactttgaagagctgggtgcaaacactacgcccagtaaatgcaaaaaccagacctttaggatcaagagatgttttgccaaataatcgccagctttatgagatggtcctgacatacagctttcatcagcccaagagcggagaagtaacacctagttgtccactcctttgtgaattattatatgagtcagaatttgacagtcagttgtggattatttttgaccagaacaaaagacagatgggctcaggcgatgcctatccacatcagtattctttgaaattggagaaaggagattatacgattcgattacagattcgtcatgagcaaatcagtgatttggatcgtctcaaagatcttccgtttattgtttcgcataggttgtctaataccttgagcttagatattcatgaaaatcatagccttgcacttctaggaaagaagaaatcaagcagtttgacattaccacccaaatataatcagccattctttgttacttccttacctgatgataaaatacctaagggggcaggacccggatgctaccttgcaggctccttgacattgtcaaagactgagcttggaaagaaagctgatgtgatccctgttcattactatctaatacctccaccaacaaagactaagaatggcagcaaagataaagaaaaggattcagaaaaagagaaagatttgaaagaagagtttactgaagctttacgagatcttaaaattcagtggatgaccaagctggattctactgacatttacaatgaattgaaagaaacatatcctgcttaccttcctttgtatgttgcacgtcttcatcaattagatgctgaaaaggagcggatgaaaagacttaatgaaattgttgatgctgccaatgctgttatttctcacatcgatcagaccgctctcgctgtttacattgccatgaagactgaccccaggcctgatgcagctactataaaaaatgatatggacaagcagaaatctaccctggtagatgccctctgcaggaaaggatgtgctctggcagaccaccttcttcatgcacagccccacgatggggcagcagctggagatgcagaagcaaaagaagaggaaggagaaagtaccttggaatctctatcagaaacctattgggaaactacaaagtggacagatctttttgacactaaggttttgacatttgcatacaagcatgcattagtaaataagatgtacgggagaggccttaagtttgcaaccaaactcgtagaagaaaaaccaacaaaagaaaactggaaaaattgtattcaactgatgaaattactcggatggacccattgtgcgtcttttactgaaaactggctccccatcatgtatcctcctgattattgtgtattctaaaatgggaaccaaaacgttaaatttcgaaagcagaaaattttatagtgaacaaatatatgaacaaatgtgtggcatttctagtctaactaatgcatgtcttcatccactatcgaatactgatcattaaaactctatgtatttatcagagaactcaatggtgtgtggcttcatacatgtaatgtagacagacctctgacatcatgctgctttcctgctgcctcccacacttggctagggagggcagagcctgcctgccagccccaacctgggtggatgcagctgctcactgcaggagaggttttcatctcttaatttttaactgtaaaacgtcatccagtttttattttataaatcaaaaaggttaaaacatgctaaatttttccaattatatagaggccttaaaaatgctacattgggtgtagctaaattatttatttgactaaaaattacgagaacataatttccagacttctaaaaataaattcaattaatgggtatggtggggaggtataaatacatggcaactgggaaaagaaacgtgttaatgtaatcttcactccggagtcacaacaagcaagttgtttttacagcatcctcaagtacacagcatcagaataagttaaaatttcatgtgttggtgccagacagttgaatctatctggttttgtaaagatatacacagtatgtttataacattgaaatcatgtaaaatacatgaataaatgtgcaaaacaacaggcacagcacaccatatgcactctgatacctgttttttataaataaaagtaaatattgaagctaaa

SEQ ID NO: 1766 - protein, 1249 aa, Rattus norvegicus
  ref <308>: DATABASE ACCESSION NUMBER: Refseq / NP_112399
  ref <309>: DATABASE ENTRY DATE: 2003-01-13
MATAATEEPFPFHGLLPKKETGASSFLCRYPEYDGRGVLIAVLDTGVDPGAPGMQVTTDGKPKIIDIIDTTGSGDVNTATEVEPKDGEITGLSGRVLKIPANWTNPSGKYHIGIKNGYDFYPKALKERIQKERKEKIWDPIHRVALAEACRKQEEFDIANNGSSQANKLIKEELQSQVELLNSFEKKYSDPGPVYDCLVWHDGETWRACVDSNENGDLGKSTVLRNYKEAQEYGSFGTAEMLNYSVNIYDDGNLLSIVTSGGAHGTHVASIAAGHFPEEPERNGVAPGAQILSIKIGDTRLSTMETGTGLIRAMIEVINHKCDLVNYSYGEATHWPNSGRICEVINEAVWKHNTIYVSSAGNNGPCLSTVGCPGGTTSSVIGVGAYVSPDMMVAEYSLREKLPANQYTWSSRGPSADGALGVSISAPGGAIASVPNWTLRGTQLMNGTSMSSPNACGGIALVLSGLKANNVDYTVHSVRRALENTAIKADNIEVFAQGHGIIQVDKAYDYLIQNTSFANRLGFTVTVGNNRGIYLRDPVQVAAPSDHGVGIEPVFPENTENSEKISFQLHLALTSNSSWVQCPSHLELMNQCRHINIRVDPRGLREGLHYTEVCGYDIASPNAGPLFRVPITAVIAAKVNESSHYDLAFTDVHFKPGQIRRHFVEVPEGATWAEVTVCSCSSEVSAKFVLHAVQLVKQRAYRSHEFYKFCSLPEKGTLIEAFPVLGGKAIEFCIARWWASLSDVNIDYTISFHGIVCTAPQLNIHASEGINRFDVQSSLKYEDLAPCITLKSWVQTLRPVNAKTRPLGSRDVLPNNRQLYEMVLTYSFHQPKSGEVTPSCPLLCELLYESEFDSQLWIIFDQNKRQMGSGDAYPHQYSLKLEKGDYTIRLQIRHEQISDLDRLKDLPFIVSHRLSNTLSLDIHENHSLALLGKKKSSSLTLPPKYNQPFFVTSLPDDKIPKGAGPGCYLAGSLTLSKTELGKKADVIPVHYYLIPPPTKTKNGSKDKEKDSEKEKDLKEEFTEALRDLKIQWMTKLDSTDIYNELKETYPAYLPLYVARLHQLDAEKERMKRLNEIVDAANAVISHIDQTALAVYIAMKTDPRPDAATIKNDMDKQKSTLVDALCRKGCALADHLLHAQPHDGAAAGDAEAKEEEGESTLESLSETYWETTKWTDLFDTKVLTFAYKHALVNKMYGRGLKFATKLVEEKPTKENWKNCIQLMKLLGWTHCASFTENWLPIMYPPDYCVF

SEQ ID NO: 1767 - DNA, 409 bp, Homo sapiens
  ref <308>: DATABASE ACCESSION NUMBER: EMBL / BF511874
  ref <309>: DATABASE ENTRY DATE: 2000-12-08
cggccgcaaatgttttttagaaaggtaagaaaataaattttactgtctccatttctttttaattaatagagcctgcattgattctaatgaagatggggacttgagtaaatctaccgtgttgagaaactacaaagaagcccaagaatatggctcttttggcacagctgagatgttgaattactccgttaatatatacgatgatggaaacctgctctccattgtgaccagtggaggtatcccatttcagattgaccaatgagatatagatttatgaggtgataaagtggtacgttgcgatagctcacagcaaccttctagagaattttaagctagagatcgtagctaaaggactaggtccagaatcataaaggtgatttgatttacctgcaagatgttgttttttaaggtc

SEQ ID NO: 1768 - DNA, 2813 bp, Rattus norvegicus
  ref <308>: DATABASE ACCESSION NUMBER: EMBL / U52102
  ref <309>: DATABASE ENTRY DATE: 2001-08-01
cccctctagatgcatgctcgagcgcccgccagtgtggtggaattcccgagtttctgtcctttctttcgtccctcccgggcctttgtcgcagctcccacgagtagcgcggccgggagacccgggtagagcgccaggcagacgttagttccagcggccgggcggagggctccagaggggccatgtctcatcaggggaagaagagcatcccgcacatcaccagtgaccggctcctcatcagaggcggacgcatcatcaatgatgaccagtccttctatgccgatgtctacctagaagatggactcataaagcaaataggagaaaacctgattgttcctggtggagtgaagaccatcgaggctaatggccgaatggtcattcctgggggcatcgatgtcaacacttacctgcagaagccgtcccagggcatgacctcagccgatgacttcttccagggcaccagagcagcgctggcaggtggaaccacgatgatcattgaccatgttgttcctgaacctgggtccagcttgttgacttcctttgagaaatggcacgaagcagcagacaccaaatcctgctgtgactattcgctccacgtggacatcacgagctggtatgatggcgttcgggaggagctggaggtgctagtgcaggacaaaggtgtcaactccttccaagtctatatggcatataaggacctgtaccagatgtctgacagccagctgtacgaagccttcaccttccttaagggtctgggagctgtgatcttagtccatgcggaaaatggagatttgatagctcaggaacaaaaacggatcctggagatgggcatcacaggtcctgagggacatgctctgagtagacctgaggagctggaggccgaggccgtgttccgggctattgccattgcaggccggatcaattgccctgtgtacatcaccaaggtcatgagcaagagtgcggcggacatcatcgcactggccaggaagaaaggccctcttgtcttcggtgagcccatagccgccagcttgggaacagatggcacccactactggagcaagaactgggccaaggcagctgcatttgtgacttcccctcccctgagcccagaccccaccactcctgactacttgacttccttgctggcctgtggagacttgcaggtcacaggtagtggccactgtccctacagtactgctcagaaggctgtgggcaaggacaacttcactctgatccccgagggcgtcaatggcatagaagagcggatgacagttgtctgggacaaggcagtggctactggcaagatggatgagaatcagtttgtagccgtcaccagcaccaacgcagccaagatcttcaacctgtacccaaggaaaggtcggattgctgtgggctccgatgctgatgtcgtcatctgggacccagataagatgaagaccttaacagccaaaagccataaatcaactgtggagtacaacatcttcgagggcatggagtgccatggctcccccctggtggtcatcagccagggcaagattgtctttgaggatgggaacatcagcgtcagcaagggcatgggccgcttcatccctcggaaaccattcccagagcacctctaccagcgtgtcaggatcaggagcaaggttttcgggttgcatagtgtctcaaggggcatgtacgatggccccgtgtacgaggtgccagctactcccaagcatgcagctcctgctccttctgccaagtcctcgccttctaaacaccagcccccgcccatcaggaacctccaccagtccaacttcagcttgtcaggtgcccagatagatgacaacaatccaaggcgtacagggcaccgcatcgtggcgccccctggtggccgctccaacatcaccagcctcggttgacctcagatgagccagatatgcaagagtgaaggattatgggaaaacgtccattccttttcctgtccgtgtttttgaagcccacagttttagttggtactgatggaggggagattgagtgatgctctttccttctctgtttaggaagaagtggtactagtgtggtgtgtttgcctggaagttccttgcccacagtgtgtgttaacaccgactccacctcagagcatggtgtctccattttcccttcctagtgaccccccaggtttagcatcgtcctatactgttccctccactcctccacgaccctctgagtgatggttcctttccaccctgtagctgttctaggataggatgcatgttagtaagttacgtacgcaagtctgagcgcggctgatgaacatcgtcgaggacgacatagacacgatgccaagaccttagctcccaggggagatgtccaaacttaaaaatgaaggcgccccatgagtcttcactagaaagatgtggtccccatccctaccctgactgagacctgtgaaaatgcagaatgacaggaaaggtcaccacccacgtcctgtgtcaacaacccggtccctgtggcacctgtaactggccatagtgtctctctggtctgtgtgtccttccagccagccttgggcttgggcccagccaggcttacacccagaaaggggtgtcctgacaccccactcaggccttgaggatggtgcggtaatggctttgcccaggctgcctgagtctctgtccctctgaggaggtcagcaaggcagtcagatttttaaagttttgtacagttttcctttgtattcacttccatttttacttaataattgacttgttggtggctcttatttctgaattcaaagcttgtgaaaaaaaataaagaaattaaattgcccgttg

SEQ ID NO: 1769 - DNA, 7090 bp, Homo sapiens
  ref <308>: DATABASE ACCESSION NUMBER: Refseq / NM_014556
  ref <309>: DATABASE ENTRY DATE: 2003-01-15
ccctccggctcggcgaagcagggaaggggagagaagcaggagtcgggagactgcacaggccagaaagtctgcggagcgggccgcgcccctggcccgcccgggctccaagtcccgcgtcgccgccctggcggggacggtgcagcaggcggcgggatgcggcggggcggcagcctgagcgccccggatggcccgcggcggggcggcctgcaagagcgacgcgcggctgctgctggggcgggacgcgctgcggccggcgcccgccctgctggcccccgccgtgctgctgggcgccgcgctcggcctcggcctcggcctttggcttggctgccgcgcgggccgccagcgcacgcgacaccagaaagacgacactcaaaatctgctcaagaatttggagtctaatgcgcagaccccctcggaaactggctccccatcaaggaggaggaagagagaagtgcagatgtcgaaggacaaggaagctgttgatgaatgtgagccgccttccaacagcaatatcacagcattcgccctgaaggccaaagtcatctaccccatcaatcagaagttccggcctctggccgatggctcctccaacccgtctctgcatgaaaacttaaagcaggctgttttgccacaccagccggtagaggcctctccttccagcagtctggggagcctgagccagggtgagaaggacgactgcagctcctcatccagcgtccactcggccaccagcgatgacaggtttctcagccgcaccttcctccgggtgaacgccttccctgaagtgctggcctgcgagagtgtagacgttgacctgtgtatctacagccttcacttaaaagacctgctgcatttggacacggcactgaggcaggaaaagcatatgatgtttattcagatttttaaaatgtgcctccttgaccttcttcctaaaaagaagtcagatgatgaattataccagaagatcctttcaaaacaagaaaaagatttggaggaactagaaaagggacttcaggtcaaactgtcaaacacagaaatgtcgggggctggtgactctgagtacatcaccctggctgatgtggaaaagaaggagagagaatactctgaacagctaatcgataatatggaagctttctggaaacagatggcaaatatccagcactttcttgtggaccagtttaagtgttccagctccaaagcccgacagctgatgatgactctgacggaaagaatgattgcagccgaagggctattgtgcgattctcaggagctgcaggctctggacgccctggagaggacgatggggcgggcgcacatggcaaaagtgattgagtttctgaagctgcaagtccaggaggagaccaggtgccggctggctgccatctcccacggcctggagctgctggctggtgaggggaagctgtccgggcggcagaaggaggagctgctcacgcagcagcacaaggccttctggcaggaggcagagcgcttcagccgggagtttgtccagcgaggcaaagacctggtcacggcgtctctggctcaccaggtggagggaacggcaaaactcacgctggcccaagaggaggaacagagaagcttcctggctgaggcccagccgactgctgacccggaaaagtttctcgaggcttttcatgaggtcctggagaggcagaggctgatgcagtgtgacctggaggaagaggagaatgtcagagccaccgaggctgtggttgcactctgccaggagctgtacttcagcaccgtggacactttccagaagttcgtggatgccctgttccttcagacgctccctggcatgactggcctccccccggaagagtgtgactacttgaggcaggaagtccaggagaacgctgcctggcagctggggaagtcaaatcgcttccggaggcagcagtggaaactcttccaggagctcctagagcaagaccagcaggtgtggatggaggagtgtgcgctgtccagcgtgctgcagacacacctgcgggaggaccacgagggcaccatccgcggcgtcttgggccgactgggcggcctcactgaagagtccacgcggtgtgtcctgcaggggcatgacctgctgttgcgctcagccctccggaggctggcactccgcggcaacgccctggccaccctgacgcagatgcggctatcggggaagaagcacctcctgcaggagctgcgggaacagcgtgcactggagcaggggtcctcccagtgcctggacgagcatcagtggcagctgctcagggccctggaggcgcgtgtgctggaggaggccagccggctagaggaggaagcacagcagacacggctgcagctccagcagcggctcctggccgaggcccaggaggtggggcagcttctgcagcagcacatggagtgcgccattgggcaggcgctgctggtgcatgcacggaatgcagccaccaagagccgggccaaggacagggatgacttcaagaggacactgatggaggcggcagtggagagcgtctacgtgaccagcgctggtgtcagccgcctggtgcaggcgtattaccagcaaatcggaaggatcatggaggaccacgaggagagaaaactgcagcacctgaagaccctgcagggtgagaggatggaaaattacaaactgcggaaaaagcaagaactcagcaacccttcgtcgggcagcaggacggcaggtggcgctcatgagacctcccaggcggtccaccagaggatgctgtcccagcagaagaggttcctggcccagttcccagtgcaccagcagatgcgtctgcacgcccagcagcagcaggcaggagtcatggaccttctggaagcccagctggagacccagctacaggaagctgaacagaacttcatctccgagctggcagccttggcccgagtgccccttgctgaaagcaaactgttgcctgctaagcgtgggctgctagagaagcccctaaggactaaaaggaagaagcccctgccccaggaaagaggggacctgggggtgcccaacaatgaggaccttgcctccggggaccagacctcaggctcactcagcagcaaaaggctgagtcagcaagaaagtgaagctggggacagtgggaactcaaagaagatgctaaagagaagaagcaacttgtagtttaagaccagtcggtgggacaagacctgaagccctgggtctgggtgtgaattccaccttccctcctgcagtgctgagaggcagcgaggacggagaggacagcggcatctctaggctcttctgagagggacagagaaagaatagaaatgtgccctaaaagcataaatgagtatcacctgagaaaattaggcattcccgtcttggaaacacgtctctgtgagtttgcatttcatttggcttggagccctggctcgatgcctcatggatctttctccccaaggagggacgtcttgaggggtccgagcctcaggccaaggacccctgatgcagactctggaatccctggcccaaaggcctgtctgggcccatctggggctgaggacacacagatacataatgacacctgcagaaatgtattctctgaggacacttagaatatgaggaagagggtgtggcccaaccctcacttcacctggggaggggcttcttccggacagtagacaccctgcccgtgcagagagatgtcatgggggcacctgctctccctgatagatgctgagagcatccagaaacttccagaccagccctctcaccacacccagaagaggcctttcccatctggagagaagcttccagaccagcccttcacacaccacagccaggaggggcctttcccacctggagagaaacttccagaccagcccctcataccacagccaagaggggcctttctcacctggagagaaatttccagaccatcccctctcaccacagccaggagaggcctttcccaccggtagagaaacttccagaccagcccctcacaccacagccaagagaagcctttccagcctggagagaaacttccagaccagccctctcactacagccaggagaggcctttcccgcctggaaacttccggacaagcctctcacacaccacagccaggagaggcctttcccacctggacagaaacttccagaccagcccctctcaccacagccaggagaggcctttaccacctggagagaagcttccagaccagcccctcacaccacagccaggagaggcctttcccacctggagagaaacttccagaccagcccctcataccacagccaagaggggcctttctcacctggagagaaacttccagaccagcccctcacaccaccgccaggagaggcctttcccaccgggagagaaacttccagaccagcccctcacaccacagccaggagaggcctttcccaccgggagagaaacttccagaccagccctctcactacagccagaagaggcctttcccaccgggagaggaacttccagaccagcccctcacaccacagccaggagaggcctttcccgcctggagagaagcttcaggccagctcctcacaccacagccaggagagaccttttctgcctggagagaaactttcagaccagccccacacaccacagccaggagaggccgttcctgcctggagagaagcttccagaccagcccttcacaccacagccaggagaggcctttcccacctggagagaaacttccagaccagcccctctcaccacagccaggagaggccgttcccacctggagggaaaattgctcctttgatggaggttagggactgtcaccctcagcactgtgaacataccgggcgagatcattcttcaggggaaggagctgcccagagcatcacaggatgttccagtgtccctggtctctgcccaccagatgccagcactcccaccattcgtggcaaccaaggatgtctccagacactgccccgtgtccatggggttatcacccactgtgctgagtcaaagggtgccttgccctggtctaatccaggacatagccgtggatacgtccaaaaatccccagaacctagtgagccctctggctctgggagcccctatctcaggaattttcagggtcatttgtgacttttcatttcttaaaacctgaaatagactctcttagaaacaagtgactccttcccagtggccaaaacttaatcatcagagcgcttccttcagttcctcacccatcagccagtgggctctccaaagttaaccaacagctccctcttgtggttcactaaaaaacttggttattccatggagttgtgcaaagctatggcttccttggtgcaatattcttaaaacctgctttgcatagaaatcacttttgcccaggctggagtgcagtggcgtgatctcggctcatggcaatctccatctcccgggttcaagcgattttcctgcctcagcctccccagtagctgggactacagacgtgtgccaccacgcctggctaaatcttttttgtattttattttagtagagacggggtttcaccatactggccaggctgctctcgaactcctgacctcatcgtccacctgcctcggcctccccaaagtgctgagattaggcgttagccaccgcgcccggccagaaatcacttttatattgtcacatgggccctctgcacagagtccgatggctcctcccggggaagcctgattttgtgacgtgtgtatagtaaatgcaggccctctggcagcaccataattggtcggttaccctgagcccagagctctgaaagcatctgtggaatgatcacgggacccttctcctctgagaaggctcccggctgcctccccgccaccgagcttgtagcctgaatgcctggctgtcgcatggagcattttgcttctggggtgtcttccttagccaaagggaacgtgtcatttgctcgaccctggcccacccttgccgcccagctgttgtgctgggcacagtctggggcacaggcctccatgatgaagacgcgtgggctgtcggtgctttcatccgtcacaaactggcacctgtacctgccagcaggagcatgatggggacttccatgctggaattgctccctgattaaaatgagatatggctatttggaagacactgcattttagccagtgtacctgggcacagactcggggctgccctgaagctgatgaaggcttgaaggacggaagggctgagccacatgaaggcagcactcagggccaggggagagagaagaggatcagcagtgcagccccaggatgcctcgcagacgtgccttctgccatgattgtgaagttctagccacgtggaactctctcggaagaactggttgttaaagagcacctctgccttcttcctctgttgccatgtgatctctgcacacgctagctctccttcgccttctgccatgctggaagtagcctgaggccctcaccagaagcagacgctggcaccgtgctgcttgtacagcctgcagagccgtgagccaagtaaacctctttaattacccagcctcaggtgctccgggaacgccttccgcggaatgaagcggcccatgcccttgttgacgttgatgtttccgtcttcaaagacgatcttgccctggctgatgaccactagtggggagccgtggcactccataccctcgaagatgttgtactccaccgcctgcaccaacagcctcagtgttacttcccaggatttgctctgccccaaacgagctgttcataacagcgattttgcctaacattatatcataagcgtgttccaatgtttttttttctctctaaaaataccttttattgactgtaatattccactgtatggtccacagtgtatataaccaacaactcaccgttgcgcatgtaggctgccggtggctttctataatcaaatcaatattgttctggggcatcacaaagaggaagggggtcccccggggttatgcaatgtggctgctttgactgtactggacataaaaataagtaaaatgttcttcattttacttaaaatgtgtctttaaataaaatttttttctctaggtttctaaaatcaaaaaaaaaaaaaaaaaa

SEQ ID NO: 1770 - protein, 992 aa, Homo sapiens
  ref <308>: DATABASE ACCESSION NUMBER: Refseq / NP_055371
  ref <309>: DATABASE ENTRY DATE: 2003-01-15
MARGGAACKSDARLLLGRDALRPAPALLAPAVLLGAALGLGLGLWLGCRAGRQRTRHQKDDTQNLLKNLESNAQTPSETGSPSRRRKREVQMSKDKEAVDECEPPSNSNITAFALKAKVIYPINQKFRPLADGSSNPSLHENLKQAVLPHQPVEASPSSSLGSLSQGEKDDCSSSSSVHSATSDDRFLSRTFLRVNAFPEVLACESVDVDLCIYSLHLKDLLHLDTALRQEKHMMFIQIFKMCLLDLLPKKKSDDELYQKILSKQEKDLEELEKGLQVKLSNTEMSGAGDSEYITLADVEKKEREYSEQLIDNMEAFWKQMANIQHFLVDQFKCSSSKARQLMMTLTERMIAAEGLLCDSQELQALDALERTMGRAHMAKVIEFLKLQVQEETRCRLAAISHGLELLAGEGKLSGRQKEELLTQQHKAFWQEAERFSREFVQRGKDLVTASLAHQVEGTAKLTLAQEEEQRSFLAEAQPTADPEKFLEAFHEVLERQRLMQCDLEEEENVRATEAVVALCQELYFSTVDTFQKFVDALFLQTLPGMTGLPPEECDYLRQEVQENAAWQLGKSNRFRRQQWKLFQELLEQDQQVWMEECALSSVLQTHLREDHEGTIRGVLGRLGGLTEESTRCVLQGHDLLLRSALRRLALRGNALATLTQMRLSGKKHLLQELREQRALEQGSSQCLDEHQWQLLRALEARVLEEASRLEEEAQQTRLQLQQRLLAEAQEVGQLLQQHMECAIGQALLVHARNAATKSRAKDRDDFKRTLMEAAVESVYVTSAGVSRLVQAYYQQIGRIMEDHEERKLQHLKTLQGERMENYKLRKKQELSNPSSGSRTAGGAHETSQAVHQRMLSQQKRFLAQFPVHQQMRLHAQQQQAGVMDLLEAQLETQLQEAEQNFISELAALARVPLAESKLLPAKRGLLEKPLRTKRKKPLPQERGDLGVPNNEDLASGDQTSGSLSSKRLSQQESEAGDSGNSKKMLKRRSNL

SEQ ID NO: 1771 - DNA, 102 bp, Rattus norvegicus
  ref <308>: DATABASE ACCESSION NUMBER: EMBL / U64705
  ref <309>: DATABASE ENTRY DATE: 2000-03-04
cggagaaaatgcatgccagggacttcacagtttctgctctgcatggtgacatggaccagaaggaaagagatgtcatcatgagggaattccgatcagggtcaa

SEQ ID NO: 1772 - DNA, 102 bp, Rattus norvegicus; identical to SEQ ID NO: 1771
  ref <308>: DATABASE ACCESSION NUMBER: EMBL / U64705
  ref <309>: DATABASE ENTRY DATE: 2000-03-04

SEQ ID NO: 1773 - DNA, 202 bp, Rattus norvegicus
  ref <308>: DATABASE ACCESSION NUMBER: EMBL / U70268
  ref <309>: DATABASE ENTRY DATE: 2000-03-04
cctagtgctaccttagcatgtgagctgctgctgtcacatactaatcacgtcttgccgtcccctctcctctgtatgcctgactgaactatgtacttgaaatgtagtgctacacttggagagttgttagcgctctgctcccactctctgtctctcttctttcatgtgtgggtaaataaaggcgcccggagagggcaagtgactt

SEQ ID NO: 1774 - DNA, 797 bp, Rattus norvegicus
  misc_feature (1)..(797): n=a, c, g or t
  ref <308>: DATABASE ACCESSION NUMBER: Refseq / NM_022952
  ref <309>: DATABASE ENTRY DATE: 2003-01-13
agccctgggccccacaactgcaagcagagccggagccgcccagttacagcgggacccgggcctctggggtccanacaggggtcgccatgatccgattcattctcatccagaaccgggcaggcaagacacgcctggccaagtggtatatgcagttcgatgatgacgagaagcagaagttgatcgaggaagtgcacgccgtggtcaccgtcagggatgccaagcacaccaactttgtggagttccggaacttcaagatcatctaccggcgctacgctggcctctacttctgcatctgcgttgacgtcaacgacaacaatctggcctatcttgaaggcatccacaacttcgtagaagtgttaaatgaatacttccacaatgtctgtgaactggacctggtgttcaacttctacaggttttacacggtggtagatgagattttcttggcaggagagatccgagagaggagccagacgaaggtgctgaagcagctgctgatgctgcagtcgctggagtgagggggggcttccgccccagcccggcntgntgggccaacatgcntgtttgtcccctgccaggtttgaggcccaccccagcagccccttccnttctttagntggcccagaggagtgacccagcagggtttaggccacaggggaggaggccagaacccactgcctttgggccctaagtggatggcagaggccaccgtgatgtcccgagtaactgtgccattattgtgtgatgctgtgagtgtgcgtgtgtgcagcccccaataaacctgtggtcctgcctgnaaa

SEQ ID NO: 1775 - protein, 142 aa, Rattus norvegicus
  ref <308>: DATABASE ACCESSION NUMBER: Refseq / NP_075241
  ref <309>: DATABASE ENTRY DATE: 2003-01-13
MIRFILIQNRAGKTRLAKWYMQFDDDEKQKLIEEVHAVVTVRDAKHTNFVEFRNFKIIYRRYAGLYFCICVDVNDNNLAYLEGIHNFVEVLNEYFHNVCELDLVFNFYRFYTVVDEIFLAGEIRERSQTKVLKQLLMLQSLE

SEQ ID NO: 1776 - DNA, 667 bp, Homo sapiens
  ref <308>: DATABASE ACCESSION NUMBER: Refseq / NM_021575
  ref <309>: DATABASE ENTRY DATE: 2003-01-15
cgtgcaccctgagccggagctgcccagtcgccgcgggaccggggccgctggggtctggacgggggtcgccatgatccgctttatcctcatccagaaccgggcaggcaagacgcgcctggccaagtggtacatgcagtttgatgatgatgagaaacagaagctgatcgaggaggtgcatgccgtggtcaccgtccgagacgccaaacacaccaactttgtggaggtcttaaacgaatatttccacaatgtctgtgaactggacctggtgttcaacttctacaaggtttacacggtcgtggacgagatgttcctggctggcgaaatccgagagaccagccagacgaaggtgctgaaacagctgctgatgctacagtccctggagtgagggcaggcgagcaccccaccccggccccggcccctcctggaatcgcctgctcgcttccccttcccaggcccgtggccaacccagcagtccttccctcaactgcctaggaggaagggacccagctgggtctgggccacaagggaggagacttcaccccacttcctctgggccctggctgtgggcagaggccaccgtgtgtgtcccgagtaaccgtgccgttgtcgtgtgattccataagcgtctgtgcgtggagtccccaataaacctgtggtcctgcctggc

SEQ ID NO: 1777 - protein, 104 aa, Homo sapiens
  ref <308>: DATABASE ACCESSION NUMBER: Refseq / NP_067586
  ref <309>: DATABASE ENTRY DATE: 2003-01-15
MIRFILIQNRAGKTRLAKWYMQFDDDEKQKLIEEVHAVVTVRDAKHTNFVEVLNEYFHNVCELDLVFNFYKVYTVVDEMFLAGEIRETSQTKVLKQLLMLQSLE

SEQ ID NO: 1778 - DNA, 797 bp, Rattus norvegicus; identical to SEQ ID NO: 1774
  misc_feature (1)..(797): n=a, c, g or t
  ref <308>: DATABASE ACCESSION NUMBER: Refseq / NM_022952
  ref <309>: DATABASE ENTRY DATE: 2003-01-13

SEQ ID NO: 1779 - protein, 142 aa, Rattus norvegicus; identical to SEQ ID NO: 1775
  ref <308>: DATABASE ACCESSION NUMBER: Refseq / NP_075241
  ref <309>: DATABASE ENTRY DATE: 2003-01-13

SEQ ID NO: 1780 - DNA, 667 bp, Homo sapiens; identical to SEQ ID NO: 1776
  ref <308>: DATABASE ACCESSION NUMBER: Refseq / NM_021575
  ref <309>: DATABASE ENTRY DATE: 2003-01-15

SEQ ID NO: 1781 - protein, 104 aa, Homo sapiens; identical to SEQ ID NO: 1777
  ref <308>: DATABASE ACCESSION NUMBER: Refseq / NP_067586
  ref <309>: DATABASE ENTRY DATE: 2003-01-15

SEQ ID NO: 1782 - DNA, 1433 bp, Rattus norvegicus
  ref <308>: DATABASE ACCESSION NUMBER: Refseq / NM_013181
  ref <309>: DATABASE ENTRY DATE: 2000-11-01
ggcgttgagggaggcagacgcgaggaggaacggaggagaggcggagatcaccgaacagcagaacaatctagaggatccctcgacacctgagaaccatggcgtctggcagtatggcagccagtgaggaagagcggagtctccgggaatgcgagctctatgtgcagaagcacaacatccaggccctgctgaaggactccatcgtgcagctgtgcactgctcggcccgagaggcccatggcattccttcgggaatactttgagaggctggagaaggaggaggcaagacagattcagagcctacagaaatccggcattcgtacagactcgagggaggatgagatctctcctccacccccaaatccggtggtgaagggccgtcggcgccgcggtgctatcagcgctgaggtttacactgaggaagatgctgcgtcctacgttagaaaggttataccaaaagattataagacaatggctgctttagccaaggccatcgaaaagaacgtgttattttcacaccttgatgacaatgagagaagtgacatttttgatgcaatgtttccagtctcctttattgctggagagacagttattcagcaaggggatgaaggggataacttctatgtgattgatcaaggagaaatggatgtgtatgtcaataatgaatgggcaaccagtgttggggaaggagggagctttggagagctggctttgatttacggaacacccagagcagccactgtcaaagcaaagacaaacgtgaaactgtggggcattgaccgagacagctaccggagaatcctcatgggaagcactctgcgaaagaggaagatgtatgaagaatttcttagtaaagtgtctattttagagtctctggacaagtgggagcgtctcacagtagctgatgcactggagcctgtccagtttgaagatggacagaagattgtggtgcaaggagaaccgggggatgagttcttcattattttagagggcacggccgctgtgctgcagcgtcggtcagaaaacgaagagtttgttgaagtgggacgcctggggccttctgactattttggtgaaattgccctgctgatgaatcgtcctcgggctgccactgtggttgcgcgtggccctttgaagtgcgttaagttggaccgacctcggtttgaacgcgtccttggcccatgctcagatatcctcaagcgaaacatccagcagtacaacagctttgtgtcactgtccgtctgagatccgcctcctgtgcctctcctccccagtctatgcttcactcacgcagactgctttctcctccctctctgcagcgccaagtggccactggcttcacagcttcttgtctctgtatactaaaggttgctttattgcaccattttccattggagcgttactgaatgctcactcacaataaatagagttgtatgg

SEQ ID NO: 1783 - protein, 381 aa, Rattus norvegicus
  ref <308>: DATABASE ACCESSION NUMBER: Refseq / NP_037313
  ref <309>: DATABASE ENTRY DATE: 2000-11-01
MASGSMAASEEERSLRECELYVQKHNIQALLKDSIVQLCTARPERPMAFLREYFERLEKEEARQIQSLQKSGIRTDSREDEISPPPPNPVVKGRRRRGAISAEVYTEEDAASYVRKVIPKDYKTMAALAKAIEKNVLFSHLDDNERSDIFDAMFPVSFIAGETVIQQGDEGDNFYVIDQGEMDVYVNNEWATSVGEGGSFGELALIYGTPRAATVKAKTNVKLWGIDRDSYRRILMGSTLRKRKMYEEFLSKVSILESLDKWERLTVADALEPVQFEDGQKIVVQGEPGDEFFIILEGTAAVLQRRSENEEFVEVGRLGPSDYFGEIALLMNRPRAATVVARGPLKCVKLDRPRFERVLGPCSDILKRNIQQYNSFVSLSV

SEQ ID NO: 1784 - DNA, 624 bp, Rattus norvegicus
  ref <308>: DATABASE ACCESSION NUMBER: EMBL / U95001
  ref <309>: DATABASE ENTRY DATE: 2000-03-04
aaacatttggactaagttcatgtcacctgggtcaggattttcttcaacgccgtgtagcaaaactgtctttagtctatgcaaatagcgagtcactgagtgtgacagaatgcaacttcactgttaaacttcacctgagggttcctcattctcctggaatccagactgcaagattataaaggaaaagacctaaggcaattcagttctttttgcaaatcaattgaatccacgagagatgtctaccagcgagatgtctaccagcccagccgcctgcagcctgctgtgtgtgcttatttgtgcgctgaataaaatggggcagctaaattctccagttccatatgcctccgaagttcaaagaaaaaaaaagcaaagtaacatgttagacttgacttgtgtggcggcgtaaagaaatggcatcttcccactaagaacgaaccatccagttcttttgtcagtcacactatgaaacagggaaggtgaagggaagaaatggttatgtgtgcacgaatcgctttgcatggtctcatgagatggctgcattcgaactgttttaagaattgtaaggatcttgacttttttacatttggaaacatcaaataaaaacaaacataatctgtgaaaaaaaaa

SEQ ID NO: 1785 - DNA, 1548 bp, Rattus norvegicus
  ref <308>: DATABASE ACCESSION NUMBER: EMBL / X02002
  ref <309>: DATABASE ENTRY DATE: 1993-05-08
atgaacccagtcatcagcatcactctcctgctttcagtcttgcagatgtcccgaggacagagggtgatcagcctgacagcctgcctggtgaaccagaaccttcgactggactgccgtcatgagaataacaccaacttgcccatccagcatgagttcagcctgacccgagagaagaagaagcacgtgctgtcaggcaccctgggggttcccgagcacacttaccgctcccgcgtcaaccttttcagtgaccgctttatcaaggtccttactctagcgaacttcaccaccaaggatgagggcgactacatgtgtgaacttcgagtctcgggccagaatcccacaagctccaataaaactatcaatgtgatcagagacaagctggtcaagtgtggtggcataagcctgctggttcaaaacacttcctggctgctgctgctcctgctttccctctccttcctccaagccacggacttcatttctctgtgactggttgggcccaaggagaaacaggaaacctcaaggtctgctgaagaggtcttgcttcacccggcagctgactccctccccaagaccttcaaatatctcaaaacgcggggagaaatgggaccctgtccctcctagggaaccccagtgctgcatgccatcacccccaccctcacccccgccacttcaccctcagtgcacaccacgagctgccattttgtactctgtattccggggctgcttctgattagtttgtcctggagacccgatggaacaccagggtgtatgatgggcagtgaagaggcaggatatcacccccccgggtgagttcctccttgccttctaagccagatgcctgaaagagatatggatgagggaagttggactgtgtctgtgcctggtatagtgatactctgttgaaagtatcgcccagtaggcagggagggggaggggcctcaagataggagagcgctgctgagcctttgtggaccaaacaataaggatgagaacttagattgtaccaggtcattctcagcccccttctatcaccgaagaagggccagggcacactcaataaagatgcaggtccagccagggaatgttggggaaaggggtaggaggtcagggacagatcaccccccccctctaaaacatgatcctgctgtttccaaaggccacactgcctacagtgagggtagcagaccagtcccccttctctgcctccaaggagccagaactctgactccaggtctaaatcagtgcaggaaaggggggtccaagaaccaaccagttggacccaacttgctaatggagattttttgttctttcccttgcccctctctgccagcccctcttgctgtccctgattccccagacaaccagagtcttgcaacctgcccctaacaggaccacctagtctcaggggcaggtctagtgtgcacactttttggaagatagtttttccaagcatcttcttccccacgggcagctctacctctcccatcaccatgtgtaataccaccacagcttacggcacctcaccaaggaagagaactgcacaataaa

SEQ ID NO: 1786 - DNA, 2460 bp, Rattus norvegicus; identical to SEQ ID NO: 1133
  ref <308>: DATABASE ACCESSION NUMBER: Refseq / NM_012998
  ref <309>: DATABASE ENTRY DATE: 2003-01-14

SEQ ID NO: 1787 - protein, 508 aa, Rattus norvegicus; identical to SEQ ID NO: 1134
  ref <308>: DATABASE ACCESSION NUMBER: Refseq / NP_037130
  ref <309>: DATABASE ENTRY DATE: 2003-01-14

SEQ ID NO: 1788 - DNA, 1619 bp, Rattus norvegicus
  ref <308>: DATABASE ACCESSION NUMBER: Refseq / NM_130433
  ref <309>: DATABASE ENTRY DATE: 2003-01-13
taaccttggccccggcggcgcgggggggggggggggcagggatggaaaagtaggggaaagggcaggggcgcggcctctcggggcgccgccacactattaaggctgggctagggctggtggccgagtgaagctgtgagagacccgtggaataactgagcttcgtcatggcgctgctacgaggtgtgtttatcgttgctgcgaagcgaacaccctttggagcttatgggggtcttctcaaggacttcactgccactgacttaactgaatttgctgccagggctgccctgtctgctggcaaagttccaccggaaaccatcgatagtgtcatcgtgggcaatgtcatgcagagctcttcagatgcggcgtacctggcaaggcatgtgggtttacgtgtgggagtcccgacggagactggggccctcaccctcaacagactctgtggctctggtttccagtccatcgtgagcggatgtcaggaaatctgctcgaaagacgctgaggtcgtcttatgtggaggaaccgagagcatgagccagtccccctactctgtcagaaatgtgcgcttcggaaccaaatttgggttagatctcaagctggaagatactttgtgggcaggattaacggatcaacacgtgaagctccccatggggatgactgcagagaacctggctgcaaaatacaacataagcagagaagactgcgacagatacgccctgcagtcccagcagaggtggaaagccgctaacgaggctggctactttaatgaggagatggcccccattgaggtgaagaccaagaagggcaaacagaccatgcaagtggatgagcacgcccggccccaaacgaccctggagcagctgcagaacctcccgccagtgttcaagaaagaggggacggtcacagcagggaacgcctcgggcatgtctgacggtgctggggtcgtcatcatagccagcgaagatgctgtcaaaaaacataacttcacaccactggccagagtcgtgggctactttgtgtctggatgtgaccctgctatcatggggatcggtccagtccctgccatcactggagcattgaagaaagctgggctgagccttaaggacatggatttgatagacgtgaatgaagcatttgctcctcagttcttggctgttcagaagagcttggatctcgaccccagtaaaaccaacgtgagtggaggtgccatagccctgggtcacccgctgggaggatctggatccagaatcaccgcacacctggttcacgagttaaggcgtcgaggtggaaaatacgcagtgggatcagcttgcattggaggtggccaaggcatctccctgatcatccagaacacagcctgaagggattgcaagcatcctacccaccctcacttggccaggctacggaacacaggcgacctttgagtcagccctgctgtgacagtaaatgcatttgaccaagccttgatgggttctgtctacttcatacctgcctagcgtgttagaataaaaagaccagccatcagaggcctttagagatacctactggtgtcattgtcagcagccaccactgtatgccttacatggtgaaattacaaactgaataaatgttgccttaactcc

SEQ ID NO: 1789 - protein, 397 aa, Rattus norvegicus
  ref <308>: DATABASE ACCESSION NUMBER: Refseq / NP_569117
  ref <309>: DATABASE ENTRY DATE: 2003-01-13
MALLRGVFIVAAKRTPFGAYGGLLKDFTATDLTEFAARAALSAGKVPPETIDSVIVGNVMQSSSDAAYLARHVGLRVGVPTETGALTLNRLCGSGFQSIVSGCQEICSKDAEVVLCGGTESMSQSPYSVRNVRFGTKFGLDLKLEDTLWAGLTDQHVKLPMGMTAENLAAKYNISREDCDRYALQSQQRWKAANEAGYFNEEMAPIEVKTKKGKQTMQVDEHARPQTTLEQLQNLPPVFKKEGTVTAGNASGMSDGAGVVIIASEDAVKKHNFTPLARVVGYFVSGCDPAIMGIGPVPAITGALKKAGLSLKDMDLIDVNEAFAPQFLAVQKSLDLDPSKTNVSGGAIALGHPLGGSGSRITAHLVHELRRRGGKYAVGSACIGGGQGISLIIQNTA

SEQ ID NO: 1790 - DNA, 910 bp, Rattus norvegicus
  ref <308>: DATABASE ACCESSION NUMBER: EMBL / X05566
  ref <309>: DATABASE ENTRY DATE: 1993-09-12
gcggcggcaaagcttcgcagagacgctcactcttggttctcgcggctgagcagggatttaaccgccaccatgtcgagcaaaagagcgaagaccaagaccaccaagaagcgccctcagcgcgcaacgtccaacgtgttcgccatgtttgaccagtcccagatccaggagttcaaagaggccttcaacatgatcgaccagaaccgggacggcttcatcgacaaggaggacctgcacgatatgctggcttcaatgggaaaaaatccaactgatgaatacctggacgccatgatgaatgaggccccgggccccatcaatttcaccatgttcctcaccatgtttggagaaaagctgaacggcaccgaccctgaggacgtcatcagaaatgccttcgcttgcttcgatgaggaagcaatcggcaccatccaggaggattacctgagggagctgctcaccaccatgggcgaccgcttcacagatgaggaagtggatgagctgtacagggaggcccccatcgacaaaaaggggaatttcaactacatcgagttcacgcgcatcctcaagcacggagcgaaagacaaagatgactgaagagctgtggcttccagccaaatgtccctgttgccattgggtatttctgagattttcctcctggagcggtcggctgcccttgcttttctgccttttgcttcccttgttttgtatttattctcagccactttgggccacgtgtaccttcatcatcagactggaaacgggactttctgtcattgttcgatgagaacgtaaggtaatttaacttacagacagtcttgtcccttgtaataactgcagccacagagtcagtatattttttcagagaaagttatccactcaattttttctgaatgataattaaactttctgataaaat

SEQ ID NO: 1791 - DNA, 696 bp, Rattus norvegicus
  ref <308>: DATABASE ACCESSION NUMBER: Refseq / NM_031706
  ref <309>: DATABASE ENTRY DATE: 2003-01-13
ctctttccagccagcgccgagcgatgggcatctctcgggacaactggcacaagcgccgcaagaccgggggtaagagaaaaccctaccacaagaagcggaagtatgagctgggacggccggccgccaacactaagattggccctcgccgcatacatacagtccgagttcgaggaggcaataagaagtatcgtgctctgagattggatgtggggaacttttcctggggctcagagtgttgtactcgcaaaacaaggatcattgatgttgtctacaatgcatccaataacgagcttgtccgcaccaagaccctggtgaagaactgcattgtgcttattgacagcacaccgtaccgacagtggtacgagtcccactatgcactgcccctgggccgcaagaagggggccaagctgactcctgaggaggaagagattttaaacaaaaaacgatcaaagaaaattcagaagaaatatgatgaaaggaaaaagaatgccaaaatcagcagtcttctggaggagcagttccagcagggcaagcttctcgcctgtattgcctcaagaccaggccagtgtggcagagcagatggctatgtgctcgaaggcaaggagctggagttctatctgcggaagatcaaagcccggaaaggcaaataaactgtcatagctcgtgtaataaaggtgtttgctgttctgtatatgt

SEQ ID NO: 1792 - protein, 208 aa, Rattus norvegicus [sequence omitted]

SEQ ID NO: 1793 - DNA, 207 bp, Homo sapiens
  ref <308>: DATABASE ACCESSION NUMBER: EMBL / BF436455
  ref <309>: DATABASE ENTRY DATE: 2000-12-02
agatcgttttttgtttaaaatctcttcttcctcaggagtcagcttggctcccttcttgcggccccggggcagcgcatagtgggactcgtaccactgtcggttcggtgtgctgtcgatgagcacgatgcaattcttcaccagggtcttggtgcgaaccagctcgttgttggctgccttgctgccttcctcgattatccttgtttttct

SEQ ID NO: 1794 - DNA, 1086 bp, Rattus norvegicus
  ref <308>: DATABASE ACCESSION NUMBER: EMBL / X06984
  ref <309>: DATABASE ENTRY DATE: 1991-03-19
ccccactcatacccagccctttctgctgagcagaagaaggagttgtcggatattgctctgaggattgtggcccctggcaagggcattctggctgcagatgagtccgtgggcagcatggccaaaaggctgagccaaattggggtagagaacactgaggagaatcgccgactgtaccgccaggtcctgttcagtgctgatgaccgtgtgaaaaagtgcattgggggggtcatcttcttccacgagacactctaccagaaagatgacaatggtgtcccctttgtccgcaccatccaggagaagggcattctcgtaggcatcaaggttgacaagggtgtagtgcctctagctgggactgatggagaaaccaccactcaagggctggatggactcttggaacgctgtgctcagtataagaaggacggtgctgattttgccaaatggcgctgtgtgctgaaaatcagtgatcgcacaccctcggcactggccatactggagaatgccaatgtgctggcccgctatgccagcatctgccagcagaatggtatcgtgcccatcgtggagcctgagatcctgcctgatggagaccatgacctcaaacgttgccagtttgttacagagaaggtcctggctgctgtgtacaaggccttgagtgatcatcacgtatacctggaagggactctcctcaagcccaacatggtgacccctggccatgcctgtcccatcaaatatagcccagaagagatcgccatggcaactgtcactgccctgcgtcgaactgtgcccccagctgtcccaggggtgactttcctgtctgggggtcagagtgaagaggaggcatcactcaacctcaatgccatcaaccgatgctcacttccccggccctgggccctcaccttctcctacggacgtgccctgcaggcatctgcactcagtgcctggagaggacaaagggataatgctggggctgctactgaggagtttatcaagcgggccgagatgaacggggcttgcagccagggcaaatatgaaggcagtggagatggtggagcagcagcacagtccctctacgtggccaaccatgcctac

SEQ ID NO: 1795 - DNA, 2088 bp, Rattus norvegicus; identical to SEQ ID NO: 533
  ref <308>: DATABASE ACCESSION NUMBER: EMBL / X07648
  ref <309>: DATABASE ENTRY DATE: 1993-09-12

SEQ ID NO: 1796 - DNA, 1539 bp, Rattus norvegicus; identical to SEQ ID NO: 530
  ref <308>: DATABASE ACCESSION NUMBER: Refseq / NM_030826
  ref <309>: DATABASE ENTRY DATE: 2002-11-05

SEQ ID NO: 1797 - protein, 201 aa, Rattus norvegicus; identical to SEQ ID NO: 531
  misc_feature (1)..(201): Xaa=Unknown amino acid
  ref <308>: DATABASE ACCESSION NUMBER: Refseq / NP_110453
  ref <309>: DATABASE ENTRY DATE: 2002-11-05

SEQ ID NO: 1798 - DNA, 661 bp, Homo sapiens; identical to SEQ ID NO: 532
  ref <308>: DATABASE ACCESSION NUMBER: EMBL / BG562874
  ref <309>: DATABASE ENTRY DATE: 2001-04-11

SEQ ID NO: 1799 - DNA, 801 bp, Rattus norvegicus
  ref <308>: DATABASE ACCESSION NUMBER: EMBL / X15013
  ref <309>: DATABASE ENTRY DATE: 1993-09-12
atgcccaaaggaaagaaggccaaggggaagaaggtggccccggcccccgccgtggtcaagaaacaagaggccaaaaaggtggtcaatcctttgtttgagaaaaggcctaagaacttcggcattgggcaggacatccagcccaaaagagatctcacgcgcttcgtcaaatggccccgctacatcaggctgcagcggcaaagagccatcctctataagcggctcaaagtacctcctgccatcaaccagttcacccaggccctggacaggcaaacagcgactcagctgcttaagcttgcccacaagtacaggccagagacaaagcaggagaagaagcagaggctgctggcccgcgctgagaagaaagctgctggcaaaggggacgtcccaactaagagaccacctgtcctccgagcaggggtcaatacagtcaccactttggtggagaacaagaaggctcagctggtggtgattgcccatgatgtagaccccattgagctggtggttttcctgcctgccctgtgtcgaaagatgggggtgccctactgcatcatcaagggaaaggccaggctggggcgcctggtccacaggaagacatgcaccactgttgccttcacacaggtgaactcggaagacaagggtgctctggctaagctggtggaagctattaggaccaattataatgacagatatgacgagatccgccgccactggggaggcaacgtcctgggtcctaagtctgtggctcgcattgccaagctggaaaaggcaaaggctaaagaactcgccactaagctgggttaa

SEQ ID NO: 1800 - DNA, 801 bp, Rattus norvegicus; identical to SEQ ID NO: 1799
  ref <308>: DATABASE ACCESSION NUMBER: EMBL / X15013
  ref <309>: DATABASE ENTRY DATE: 1993-09-12

SEQ ID NO: 1801 - DNA, 3755 bp, Rattus norvegicus
  ref <308>: DATABASE ACCESSION NUMBER: Refseq / NM_054006
  ref <309>: DATABASE ENTRY DATE: 2003-01-13
gaattccttttttttttaatactagcaactttcattctttggaacttgtgctgaaaaaaagaagagtcagcaaatactactgaaagtgcaatattcgattatcactgcgagatgagctttgatccaaaccttctccacaacaatggacacaacgggtaccccaatggtacttctgcagcactccgtgaaactggggttattgaaaaactgctgacctcttatggatttattcagtgttcagaacggcaagctaggcttttcttccactgttcacagtataatggcaacctccaggacttaaaagtaggagatgatgtggaatttgaagtatcatctgaccggaggactgggaaacctattgctattaaattggtgaagataaaaccagaaatacatcctgaagaacgaatgaatggacaagttgtgtgcgctgttcctcacaacttagagagtaaatctccagctgccccgggtcagagtccaacagggagtgtatgctacgaacgtaatggggaagtattttatctgacttacacctctgaagatgtggaagggaacgttcagctggaaactggagacaaaattaactttgtaattgataacaataaacacactggtgctgtaagtgctcgtaacattatgctgttgaaaaagaaacaagctcgctatcaaggagtagtttgtgccatgaaggaggcgtttggctttattgaaagaggtgatgttgtaaaagagatattctttcactatagtgaatttaaaggtgatctagaaaccctgcagcctggagatgacgtggaattcacaatcaaggacagaaatggtaaagaagttgcaacagatgtcagactattgcctcaaggaacagtcatttttgaagatatcagcattgaacattttgaaggaactgtaaccaaagttatcccaaaagtacccagtaaaaaccagaatgacccattgccaggacgaatcaaagttgactttgtgattcctaaagaacttccctttggagacaaagacacaaaatccaaagtgaccctgctggaaggtgaccatgttaggtttaatatttcaacagaccgacgtgacaaattagaacgagcaaccaacatagaggttctatcaaatacatttcagttcactaatgaagccagagagatgggtgtgattgctgccatgagagatggttttggcttcatcaagtgtgtggaccgtgatgctcgtatgttcttccacttcagtgagattctcgatgggaaccagctccacattgcagatgaagtggagtttactgtggtccctgatatgctctctgcccaaagaaatcatgctattaggattaaaaaacttcccaagggcacggtttcattccattcccattcagatcatcgttttctgggcaccgtagaaaaagaagccactttttctaatcctaaaactacaagcccaaataaaggcaaagacaaggaggcagaagatggcattattgcttatgatgactgtggggtgaaactgactattgcttttcaagccaaggatgtggaaggatctacttctcctcaaataggagataaggttgaatttagtattagtgacaaacagaggcctggacagcagattgcaacttgtgtgagacttttaggtcgtaattctaattccaaaaggctcttgggttatgtggcaactctgaaagataattttggatttattgaaacagctaatcatgataaggagatatttttccattatagtgagttctctggtgatgttgatagcctggaactgggagacatggttgaatacagcttgtccaaaggcaaaggcaataaagtcagtgctgagaaagtaaacaaaactcactcagtgaatggcatcactgaggaagcaaatcccaccatctactctggtaaagtcattcgtcctctgagaggcgttgatccaacacagattgaataccaaggaatgattgagattgtggaggagggggatatgaaaggtgaagtgtatccttttggcatagttgggatggccaacaaaggggattgcctacagaaaggggagagtgttaagttccagttgtgtgtacttggccaaaatgcacaaactatggcctacaacatcacaccccttcgtagggctactgtggagtgtgtgaaagatcagtttggctttattaactatgaagtaggagatagcaagaagctctttttccatgtgaaggaagttcaggatggcattgagctacaggcaggagatgaggtggaattctcagtgatccttaatcagcgcactgggaaatgtagcgcctgtaatgtttggcgagtctgtgaaggccccaaagctgttgcagctcctcgacctgatcggttggttaatcgcttaaagaacatcaccctggatgatgccagtgctccacgtctaatggttcttcgtcagccaaggggaccagataactcaatgggatttggtgcagaaagaaagatccgtcaagctggtgtcattgactaaccacgtccacaaagcacatcattaatccactatggtcaagttggggggattctggtgaagggttctgaatatcttcctcttcatccctcccaaaatctggaatacttattctattgagctattacaccagttttaacaccttcctcgtgttatgtttaaagaaaaaataaataaatttaagaaaccattttaaaattatgcacagttgcagcctggaaaacttaaggtggcgccttatagtgtcaatttaggagctttatttggtgcatttaacgcaactggtaattgcaaattccacttggcctgtgtaagtgaacaaaacagactgttactttgttggccctatgaaattctgcactctagtcagtatatatactctaccttcatgacttaatactcagctgcattcttttccttttttccctctgttcattatgctttaattctgaggaccatatgaaggtagaatatattacctttaaaaattgcaaaatttatatagcaaacgattttcttaagttgatggccaaatgttaaaatgttattttcatatcatttataatcttgtcacaatccacttaacgaagtttgattacatttcagtgaaaattatcttccataataggttttttttttccttcctgggatggggggcaaataactttactacaattagtatgtatggtgcagaatttcatgcaaatgaagtgtgccagcagtgtgataatttaaacatatttaaacaaaagacgaatgcacaaaattgctgctgcttagatcactgcagcttctaggacccagtttcttttactgatttaaaaacaaaatgaaaaaaaaataataaaaaagttgtgcctgaaatgaatcctgttttttttataagtagccccctggttccagtgccctgttgaatacaggcacttgatccttggtgcagcttctgttcaactttgtatcacgggaacggattggcctgatttcttggccttcctcttgaattggccccaaacagggtccctggcaagtggagtgaaggctttttgtctaaagatgacaagggtcagctcaggggttgtgggggagggcgttttcatcttccccgttgtcacttgaggttttgaactctgggtaaagaggccgtttatctttgtaaacacaaaacatttttgctttctccggtttcatgttaatggcgaaagaatggaagcgaataaagttttactgatttttgaaaaaaaaaggaattc

SEQ ID NO: 1802 - protein, 798 aa, Rattus norvegicus
  ref <308>: DATABASE ACCESSION NUMBER: Refseq / NP_446458
  ref <309>: DATABASE ENTRY DATE: 2003-01-13
MSFDPNLLHNNGHNGYPNGTSAALRETGVIEKLLTSYGFIQCSERQARLFFHCSQYNGNLQDLKVGDDVEFEVSSDRRTGKPIAIKLVKIKPEIHPEERMNGQVVCAVPHNLESKSPAAPGQSPTGSVCYERNGEVFYLTYTSEDVEGNVQLETGDKINFVIDNNKHTGAVSARNIMLLKKKQARYQGVVCAMKEAFGFIERGDVVKEIFFHYSEFKGDLETLQPGDDVEFTIKDRNGKEVATDVRLLPQGTVIFEDISIEHFEGTVTKVIPKVPSKNQNDPLPGRIKVDFVIPKELPFGDKDTKSKVTLLEGDHVRFNISTDRRDKLERATNIEVLSNTFQFTNEAREMGVIAAMRDGFGFIKCVDRDARMFFHFSEILDGNQLHIADEVEFTVVPDMLSAQRNHAIRIKKLPKGTVSFHSHSDHRFLGTVEKEATFSNPKTTSPNKGKDKEAEDGIIAYDDCGVKLTIAFQAKDVEGSTSPQIGDKVEFSISDKQRPGQQIATCVRLLGRNSNSKRLLGYVATLKDNFGFIETANHDKEIFFHYSEFSGDVDSLELGDMVEYSLSKGKGNKVSAEKVNKTHSVNGITEEANPTIYSGKVIRPLRGVDPTQIEYQGMIEIVEEGDMKGEVYPFGIVGMANKGDCLQKGESVKFQLCVLGQNAQTMAYNITPLRRATVECVKDQFGFINYEVGDSKKLFFHVKEVQDGIELQAGDEVEFSVILNQRTGKCSACNVWRVCEGPKAVAAPRPDRLVNRLKNITLDDASAPRLMVLRQPRGPDNSMGFGAERKIRQAGVID

SEQ ID NO: 1803 - DNA, 4076 bp, Homo sapiens
  ref <308>: DATABASE ACCESSION NUMBER: Refseq / NM_007158
  ref <309>: DATABASE ENTRY DATE: 2002-04-08
gcttatggcggcgctggagagggggcgctgagctgttgggtatgaagtgtaacagaacagactttaccacctgaaactgctgcttcaagttcagatcaggcaaggaacaaacctcgtaacaactaacaagaccaaagaagagtacacttaagttgaagacacaacacttgatctgaaacaagaagtttgtgcctactcaacagctttgaaagagcacttcccaacgctgctagtagtctttgttttcttcagtgctgtactgtgagattgcccggtacagcagcagttgtattctttattagcttggtagatcattttctctcgctcttttttttaatactagcaactttcatcctttgaaacgtgtgctgaaaaagaagaatcagcaaatactactgaaagtgcaatatttgagtatcactgcgagatgagctttgatccaaaccttctccacaacaatggacataatgggtaccctaatggtacttcagcagcactgcgtgaaactggggttattgaaaaactgttaacctcttacggatttattcagtgttcagaacgtcaagctagacttttcttccactgttcacagtataatggcaacctgcaagacttaaaagtaggagatgatgttgaatttgaagtatcatcggaccgacggactgggaaacccattgctgttaaactggtgaagataaaacaagaaatcctccctgaagaacgaatgaatggacaagttgtgtgcgctgttcctcacaacttagagagtaaatctccagctgccccgggtcagagtccaacagggagtgtatgctacgaacgtaatggggaagtgttttatctgacttacacccctgaagatgtcgaagggaacgttcagctggaaactggagataaaataaactttgtaattgataacaataaacatactggtgctgtaagtgctcgcaacattatgctgttgaaaaagaaacaagcccgctgtcagggagtagtttgtgccatgaaggaggcatttggctttattgaaagaggtgatgttgtaaaagagatattctttcactatagtgaatttaagggtgacttagaaaccttacagcctggcgatgatgtggaattcacaatcaaggacagaaatggtaaagaagttgcaacagatgtcagactattgcctcaaggaacagtcatttttgaagatatcagcattgaacattttgaaggaactgtaaccaaagttatcccaaaagtacccagtaaaaaccagaatgacccattgccaggacgcatcaaagttgactttgtgatccctaaagaacttccctttggagacaaagatacgaaatccaaggtgaccctgctggaaggtgaccatgttaggtttaatatttcaacagaccgacgtgacaaattagagcgagcaaccaatatagaagttctgtcaaatacatttcagttcactaatgaagcccgagaaatgggtgtgattgctgccatgagagatggttttggtttcatcaagtgtgtggatcgtgatgttcgtatgttcttccacttcagtgaaattctggatgggaaccagctccatattgcagatgaagtagagtttactgtggttcctgatatgctctctgctcaaagaaatcatgctattaggattaaaaaacttcccaagggcacggtttcatttcattcccattcagatcaccgttttctgggcacggtagaaaaagaagccactttttccaatcctaaaaccactagcccaaataaaggcaaagagaaggaggctgaggatggcattattgcttatgatgactgtggggtgaaactgactattgcttttcaagccaaggatgtggaaggatctacttctcctcaaataggagataaggttgaatttagtattagtgacaaacagaggcctggacagcaggttgcaacttgtgtgcgacttttaggtcgtaattctaactccaagaggctcttgggttatgtggcaactctgaaggataattttggatttattgaaacagccaatcatgataaggaaatctttttccattacagtgagttctctggtgatgttgatagcctggaactgggggacatggtcgagtatagcttgtccaaaggcaaaggcaacaaagtcagtgcagaaaaagtgaacaaaacacactcagtgaatggcattactgaggaagctgatcccaccatttactctggcaaagtaattcgccccctgaggagtgttgatccaacacagactgagtaccaaggaatgattgagattgtggaggagggcgatatgaaaggtgaggtctatccatttggcatcgttgggatggccaacaaaggggattgcctgcagaaaggggagagcgtcaagttccaattgtgtgtcctgggccaaaatgcacaaactatggcttacaacatcacacccctgcgcagggccacagtggaatgtgtgaaagatcagtttggcttcattaactatgaagtaggagatagcaagaagctctttttccatgtgaaagaagttcaggatggcattgagctacaggcaggagatgaggtggagttctcagtgattcttaatcagcgcactggcaagtgcagcgcctgtaatgtttggcgagtctgtgagggccccaaggctgttgcagctcctcgacctgatcggttggtcaatcgcttgaagaatatcactctggatgatgccagtgctcctcgcctaatggttcttcgtcagccaaggggaccagataactcaatggggtttggtgcagaaagaaagatccgtcaagctggtgtcattgactaaccacatccacaaagcacaccattaatccactatgatcaagttggggggaatctggtgaagggttctgaatatctccctcttcatccctcccgaaatctggaatacttattctattgagctattacaccagttttaacaccttcctcgtgttatgtttaaaaaaataaataaatttaagaaaaccattttaaataatgcacagttgcagcctggaaaaacttaaggtggcgccttatagtatcaattttaggagctttatttggtgcatttaacgcaactggtaattgcagaatccactttgcctgtgtaagtgaaaaatatagactgttatcttgttggccctatgaaattctgcacttttcattatatactctaccttcattaattacttctggcaagatgttctgccttagcactcagttgcattcttttcctttttcttcctgttcattatgctttaattctgaggaccatatgagggtagaatatattatcttttaaaaattacaaaaatttgtataggcaaaccatttcttaaagttgatggccaaattttaaaatgttatttttcatatcatttataatcttgtcacaatccacttaaagaagtttggttatatttcagtgaaaattttcttccagagtaggttttttttcgtgggttggggggtaactttactacaattagtaagtatggtgcagaatttcatgcaaatgaggagtgccagcagtgtgataatttaaacatatttaaacaaaaacaaaaaaaatgaatgcacaaacttgctgctgcttagatcactgcagcttctaggacccggtttcttttactgatttaaaaacaaaacaaaaaaaaataaaaaagttgtgcctgaaatgaatcttgtttttttttataagtagccgcctggttactgtgtcctgtaaaatacagacacttgacccttggtgtagcttctgttcaactttatatcacgggaatggatgggtctgatttcttggccctcttcttgaattggccatatacagggtccctggccagtggactgaaggctttgtctaagatgacaagggtcagctcaggggatgtgggggagggcggttttatcttcccccttgtcgtttgaggttttgatctctgggtaaagaggccgtttatctttgtaaacacgaaacatttttgctttctccagttttctgttaatggcgaaagaatggaagcgaataaagttttactgatttttgagacact

SEQ ID NO: 1804 - protein, 798 aa, Homo sapiens
  ref <308>: DATABASE ACCESSION NUMBER: Refseq / NP_009089
  ref <309>: DATABASE ENTRY DATE: 2002-04-08
MSFDPNLLHNNGHNGYPNGTSAALRETGVIEKLLTSYGFIQCSERQARLFFHCSQYNGNLQDLKVGDDVEFEVSSDRRTGKPIAVKLVKIKQEILPEERMNGQVVCAVPHNLESKSPAAPGQSPTGSVCYERNGEVFYLTYTPEDVEGNVQLETGDKINFVIDNNKHTGAVSARNIMLLKKKQARCQGVVCAMKEAFGFIERGDVVKEIFFHYSEFKGDLETLQPGDDVEFTIKDRNGKEVATDVRLLPQGTVIFEDISIEHFEGTVTKVIPKVPSKNQNDPLPGRIKVDFVIPKELPFGDKDTKSKVTLLEGDHVRFNISTDRRDKLERATNIEVLSNTFQFTNEAREMGVIAAMRDGFGFIKCVDRDVRMFFHFSEILDGNQLHIADEVEFTVVPDMLSAQRNHAIRIKKLPKGTVSFHSHSDHRFLGTVEKEATFSNPKTTSPNKGKEKEAEDGIIAYDDCGVKLTIAFQAKDVEGSTSPQIGDKVEFSISDKQRPGQQVATCVRLLGRNSNSKRLLGYVATLKDNFGFIETANHDKEIFFHYSEFSGDVDSLELGDMVEYSLSKGKGNKVSAEKVNKTHSVNGITEEADPTIYSGKVIRPLRSVDPTQTEYQGMIEIVEEGDMKGEVYPFGIVGMANKGDCLQKGESVKFQLCVLGQNAQTMAYNITPLRRATVECVKDQFGFINYEVGDSKKLFFHVKEVQDGIELQAGDEVEFSVILNQRTGKCSACNVWRVCEGPKAVAAPRPDRLVNRLKNITLDDASAPRLMVLRQPRGPDNSMGFGAERKIRQAGVID

SEQ ID NO: 1805 - DNA, 650 bp, Rattus norvegicus; identical to SEQ ID NO: 1709
  ref <308>: DATABASE ACCESSION NUMBER: Refseq / NM_031570
  ref <309>: DATABASE ENTRY DATE: 2003-01-13

SEQ ID NO: 1806 - protein, 195 aa, Rattus norvegicus; identical to SEQ ID NO: 1710
  ref <308>: DATABASE ACCESSION NUMBER: Refseq / NP_113758
  ref <309>: DATABASE ENTRY DATE: 2003-01-13

SEQ ID NO: 1807 - DNA, 2155 bp, Rattus norvegicus
  ref <308>: DATABASE ACCESSION NUMBER: Refseq / NM_017344
  ref <309>: DATABASE ENTRY DATE: 2003-01-14
gggcacgccggagcccgaacggcgcagcctggaagaggccggagcccaagggaggcggcggtagaggcagcggcgggggcagcccaggcagcccgagccccgcggcctgggcctgcgctcggcgccatgagcggcggcgggccttcgggaggtggccctgggggctcgggccgggcgcggaccagctcgttcgcggagccaggcggcggaggcggaggcggtggcggcggccccgggggctcggcctccggcccaggaggcactggcggcgggaaggcgtcagtcggggctatgggtgggggcgtgggagcctcgagctctgggggtggccccagcggcagcggcggaggaggcagcggtggccccggcgcgggcactagcttcccgccgcccggagtgaagctgggccgtgacagcgggaaggtgaccacagtggtagccactctaggccaaggcccagagcgttcccaagaggtggcttacaccgacatcaaagtgattggcaatggctcattcggagtagtgtaccaggcacggctggcagaaacgagggaactggtggccatcaagaaggttcttcaggacaaaaggttcaagaaccgagagctgcagattatgcgtaagctggaccactgcaatatcgtgaggctgcggtactttttctactccagtggggagaagaaagatgagctgtatttaaatctggtgctggaatatgtgcccgagaccgtgtaccgagtggcccgtcactttaccaaggccaagttgatcatccctatcatctatgtcaaggtgtacatgtaccagctcttccggagcttggcctacatccactcccaaggtgtgtgtcaccgtgacatcaagccccagaatttgcttgtggaccctgacactgctgtcctcaagctctgcgactttggcagtgcaaagcagttggttcggggggagcccaacgtgtcctacatctgttctcggtactaccgtgctccggagctcatctttggagccacagattacacctcgtccatcgatgtgtggtcagctggctgtgtactggctgagctgcttcttggccagcccatcttccctggggacagtggggtagaccagcttgtggagatcatcaaggtactagggacgccaaccagggagcaaatccgagagatgaaccctaactacacagaattcaagttcccccagatcaaagctcacccctggacaaaggtgttcaaatctcggacaccacctgaggccatcgcactctgctctagcctgctggagtacactccatcctcaaggctctccccactagaggcctgtgcccacagtttctttgatgaactgcggagtctcggaacccagctccccaacaaccgcccgcttccccccctcttcaacttcagtcctggtgaactttccatccaaccgtctctcaatgccattctcatccctcctcacttgaggtccccatcaggccctgctaccctcacctcgtcctcacaagctttaactgagactcagactggccaagactggcaggcacctgatgccacacctaccctcactaactcttcctgagggccctaccgactacccctcacgctcactcggaaggctcaagtgggctggaaagggccatagcccatccagctcctgcctgctggccctagactgagggcagaggtaaatgaactacccagcatctaggcctccctcaccagcctcaccttgtggtggcttttaaagaggatttaactgtttgtgggggagggaagggaagagaaggacggacggggtttggggtatgaggaccttctacccccgtggtcccctcccctcccccaggctaccactcctcccccccctcccatgtcccttgtaaatagaaccagcccagccgtatcctcttcctggcccttgggtgtaaatagattgttataatttttttcttaaagaaaacgtcgattcacaccatccaacctgccctccccctcagctgtacccccctcttgtcctctgctcccaaggcttcctccctctccccatcccaaggaggggagtagggagagcccctggtgtcttagtttccacagtaaggtttgcctgtgtacagacctccgttcaataaattattggcatgaaaaaaaaaaaaaaa

SEQ ID NO: 1808 - protein, 483 aa, Rattus norvegicus
  ref <308>: DATABASE ACCESSION NUMBER: Refseq / NP_059040
  ref <309>: DATABASE ENTRY DATE: 2003-01-14
MSGGGPSGGGPGGSGRARTSSFAEPGGGGGGGGGGPGGSASGPGGTGGGKASVGAMGGGVGASSSGGGPSGSGGGGSGGPGAGTSFPPPGVKLGRDSGKVTTVVATLGQGPERSQEVAYTDIKVIGNGSFGVVYQARLAETRELVAIKKVLQDKRFKNRELQIMRKLDHCNIVRLRYFFYSSGEKKDELYLNLVLEYVPETVYRVARHFTKAKLIIPIIYVKVYMYQLFRSLAYIHSQGVCHRDIKPQNLLVDPDTAVLKLCDFGSAKQLVRGEPNVSYICSRYYRAPELIFGATDYTSSIDVWSAGCVLAELLLGQPIFPGDSGVDQLVEIIKVLGTPTREQIREMNPNYTEFKFPQIKAHPWTKVFKSRTPPEAIALCSSLLEYTPSSRLSPLEACAHSFFDELRSLGTQLPNNRPLPPLFNFSPGELSIQPSLNAILIPPHLRSPSGPATLTSSSQALTETQTGQDWQAPDATPTLTNSS

SEQ ID NO: 1809 - DNA, 882 bp, Rattus norvegicus
  ref <308>: DATABASE ACCESSION NUMBER: EMBL / X57432
  ref <309>: DATABASE ENTRY DATE: 1991-11-04
atggcggatgacgccggtgcagcgggagggcccggaggacccgggggcccaggattaggaggccgcggcggcttccgcggaggattcggcagcggccttaggggccgcggtcgtggccgaggccgtggccgcggtcgaggccgcggggctcgtggaggtaaagctgaagacaaggagtggatccccgttaccaagctgggccgcctggttaaggacatgaagatcaagtccttggaggagatctacctgttctccctgcccattaaggagtctgagattattgactttttcctgggtgcatctctaaaggatgaagttctgaaaatcatgccagtgcagaagcagactcgggctggccagcggaccaggttcaaggcctttgtcgctattggggactacaatggccacgttggtcttggtgttaagtgctccaaggaggtagccactgccatccgaggggccatcatcctggccaagctttcgatcgtcccagtgcggagaggctactgggggaacaagattggcaagccccacactgtgccatgcaaggtgacaggccgctgtggctctgtgctggttcgtctcatccctgcccccagaggcactggcattgtctctgctcctgtgcccaagaagctactgatgatggccggtatagatgactgctacacttcagccaggggctgcactgccaccctgggcaactttgccaaggccacctttgatgccatctccaagacctacagctacctgacccctgacctctggaaagagactgtgttcaccaagtctccttatcaggaattcactgaccatcttgtgaaaacccacaccagagtctctgttcagaggacccaggctccagctgtggctaccacataa

SEQ ID NO: 1810 - DNA, 459 bp, Rattus norvegicus
  ref <308>: DATABASE ACCESSION NUMBER: EMBL / X57529
  ref <309>: DATABASE ENTRY DATE: 1993-11-30
atgtccctagtgatccccgagaagtttcagcacatcctgcgagtactcaacaccaacatcgatgggcggcggaaaatagccttcgctatcactgccattaagggtgtggggcggagatacgctcatgtggtgttgaggaaagcagacattgacctcaccaagagggctggggagctcacggaggacgaggtggagcgtgtgatcaccatcatgcagaacccacgacaatacaagatccctgactggttcttgaacagacagaaggacgtgaaggatgggaagtatagccaggttctggccaacggtctagacaacaagctgcgtgaggacctggagcggctgaagaaaatccgagcccatagaggactgcgccacttttggggccttcgtgtccggggtcagcacaccaagaccactggccgcaggggccgtactgtgggtgtgtccaagaagaaatga

SEQ ID NO: 1811 - DNA, 15231 bp, Rattus norvegicus
  ref <308>: DATABASE ACCESSION NUMBER: Refseq / NM_022401
  ref <309>: DATABASE ENTRY DATE: 2003-01-13
atggtggctggcatgctcatgccactggaccagcttcgggccatctatgaggtgctctttcgtgagggggtgatggttgccaagaaggaccggcgaccccgaagcctgcatccccatgtgcccggcgtcaccaatctacaggtcatgcgtgccatgacctcgctgaaagctcggggcctggtgcgggagacctttgcctggtgccacttctactggtacctgaccaacgagggcatcgaccacctacgccagtacctacacctgccaccggagatcgtacctgcctctctgcagcgtgtgcgccgccctgttgccatggtgatgcctgcacgtcgtcgctccccccatgtgcagaccatgcaaggtcccttaggctgtccaccaaagaggggccctctgccagctgaggaccctgcccgggaggagcggcaggtctatcgcaggaaggagcgtgaggaaggggcacctgaaacccctgtggtgtctgccaccatcgtggggaccctggccaggcccggcccagagcccaccccagccacagatgaacgagaccgtgtgcagaagaaaacttccaccaagtgggtcaataaacaccttatcaaggctcaaaggcacatcagtgacctgtatgaagacctccgtgatggccacaacctcatctccctgctggaagtcctctcaggagacagcctgccccgagagaaggggaggatgcgtttccacaagctgcaaaacgttcagattgccctggactatctccgacatcggcaggtgaagttggtgaacatcagaaatgatgacatcgccgatggcaaccccaagctgaccctgggcctgatctggacaatcatcctgcacttcaagatctcagacattcaggtgagcggccagtccgaggacatgacagccaaggagaagctgctgctgtggtctcagcgtatggtagagggctaccaaggcctgcgctgtgacaacttcaccaccagctggcgcgacggccggctcttcaatgctatcatccacaggcacaagcccatgctcatagacatgaataaagtgtaccgacagaccaacctggagaacctagaccaggccttctccgtggcagagcgggacctgggagttaccaggctcctggacccagaagatgtggatgtccctcagcctgatgagaagtccatcatcacctacgtttcatccctgtatgatgccatgccccgtgtgccgggcgcacaggatggagtgagggccaatgagctgcagcttcgttggcaagagtaccgggagcttgtgctgctgctgctacagtggatccggcaccacaccgctgcttttgaggagcgcaagttcccctccagctttgaggagattgagatcctatggtgccagtttctgaagttcaaggagacagaacttcctgccaaggaggcagacaagaaccggtccaaaggcatctaccagtctttggagggagcagtacaagcaggccagctcaagattccccctggctaccacccgctagacgtggaaaaggagtggggcaagctgcacgtggccatcctggagcgggagaagcaactccggagcgagtttgagaggctggagtgtcttcagcgcattgtgagcaagctacagatggaggctgggctatgtgaggagcagctgtaccaggcggattccctactgcagtcggatattcggctgctggcctcaggcaaggcggcacagcgggctggggaagtggagagagacctggacaaggctgatggtatgatccggctgttgttcaatgatgtgcagacccttaaagatgggcggcatccacagggtgaacagatgtaccggagggtgtatcgtctgcatgagcgcctggtagccatccgcactgaatacaacctccggctgaaggcaggggtgggtgcccctgtgacccaggtgaccctgcagagcacacagaggcgcccagagctagaggactccacactgcgttacctgcacgacctgctggcatgggtggaggagaaccagcgtcgaatagacggtgctgagtggggcgtggacttgcccagtgtagaggcacagctgggcagccaccgaggcatgcatcagtctattgaggaattccgggccaagatcgagcgggctcggaatgatgagagccagctctcccctgccacccgaggtgcctaccgagactgcctgggccgcctggacctgcagtatgcaaagctgctgaactcctccaaggcccgcctccggtccctggagagcttgcatgggtttgtggcggcagctaccaaggagctgatgtggctgaatgagaaggaagaggaagaagtgggctttgattggagtgaccgcaacaccaacatggctgccaagaaagaaagttactcggccctgatgcgtgagctggagatgaaggaaaagaaaattaaggagatccagaacacgggggacaggttgctgcgggaagaccatcctgcccggcccacagtggagtccttccaggctgccctgcagacacagtggagctggatgctgcagctgtgttgctgcattgaagcgcacttgaaagagaacacagcctacttccagttcttctcagatgttcgggaggctgaggaacagttgcagaaactacaggagacgttacgcaggaagtacagctgtgaccgctccatcactgtcacaaggcttgaggacctgctgcaggatgcccaggatgagaaggagcaactgaatgagtacaaagggcacctctcaggcctggccaagcgggccaaggctattgtgcagctgaagccacgcaaccctgcccaccctgtgcggggtcacgtgcccctgctagctgtgtgtgactacaagcaggtggaggtgactgtgcacaagggtgaccaatgccagctggtgggccctgcacagccgttccactggaaggtgctcagtagttccggcagtgaggctgccgtgccttctgtgtgctttcttgtgccgccacccaaccaggaggcccaggaagctgttgctaggctggaggcccagcatcaggccctggttactctgtggcaccagcttcacgtggacatgaagagtcttctggcatggcagagcctcaatcgtgacatacagctcatccggtcctggtccctagtcacgttccgcacgctgaagcccgaggagcagcggcaagctctgcgcaacctggagttgcactaccaggccttccttcgagacagccaggacgctggtggctttgggcccgaggaccggctggtggcagagcgcgaatatggatcttgtagtcgccactaccagcagctgctacaaagcctggagcagggtgagcaggaagagtctcgctgtcagcgatgcatctcggagctcaaggacattcggctgcaactggaggcctgtgagactcggactgtgcaccgtctgcggctgccactggataaagaccccgcacgggagtgtgcccagcgcatcgctgagcaacagaaagcacaggctgaggtggaggggctgggcaagggagttgcccggctgtctgctgaggctgagaaagttctggccttgccagagccgtcacctgctgcaccaactctgcgctcggagttggaattgaccctgggcaagctggaacaggtcagaagcctgtctgccatctacttggagaaactcaagaccatcagcttggtaattcgcagtacccagggggctgaggaggtgcttaaaacacacgaggagcacctgaaggaggcccaggccgtgcctgccacactccaagagctcgaagtcaccaaggcttcactaaagaagctgcgggcccaggcggaggcacagcagcctgtattcaacaccctacgagatgagctgaggggggcacaggaagttggtgaacggctacagcagcggcatggtgagcgggacgtggaagtagagcgctggcgagaacgtgtcactcagttgctggagcgctggcaggctgtgctagcccagactgatgtgcggcagcgggagcttgaacagctgggccgccaacttcgctactaccgtgaaagtgcggatccgctgagctcctggctgcaggatgccaagagccggcaagaacagatccaggctgtgccaatagccaacagtcaggctgcacgagaacagctgcgccaggagaaggccctgctggaggagattgagcgccatggtgagaaggttgaggagtgccagaagtttgctaagcagtacatcaatgcaatcaaggactatgagctccagctgatcacctacaaggctcagcttgaacctgtggcctcccccgccaagaagcccaaggttcagtctggatcggagagcgtcatccaggagtacgtggatctgcgtacacgctacagtgagctgaccacactcacgagtcagtacatcaagttcatcagtgagacactgcgccgcatggaagaggaagagcggctggctgagcaacagcgggcagaggagcgggagcgcctggccgaggtggaggccgcgctggagaagcagcggcagctggctgaggcccatgcccaggccaaggcacaggccgagctggaggcacgagaactgcagcggcgcatgcaggaggaggtgacgcggcgcgaggaggcggcggtggacgcacagcaacagaagcgcagcatccaagaggagctgcagcatctgcggcaaagctcagaggcagagatccaggccaaggcccagcaggtggaggctgcagagcgcagccgcatgcgcattgaggaagagatccgcgtagtccgtctgcagctagagacaactgagcgtcagcgtggaggggcggaggatgagctgcaggctctgcgtgcacgggctgaggaggcagaagcacagaagcggcaggctcaggaggaagccgagcgcttgcggaggcaggtgcaggatgagagccaacgcaaacggcaggcggaggccgagctggccctgcgtgtgaaggcagaagcggaggcagcgcgagagaagcagcgggccctgcaggctctggatgaactgaaactgcaggccgaggaggccgaacggtggctgtgccaagccgaggcagagagggctcgccaagtgcaggtagccctggagacagcgcagcgtagtgcagaagtggagctgcagagcaagcgtccgtcctttgcagagaagaccgcacagttggagcgcacgctgcaggaagagcacgtgacagtgacacagctgcgggaggaggcggaacggcgggcacagcagcaggctgaagccgagcgagcccgtgaggaagccgagcgggagctggagcgctggcagctgaaggccaatgaggcgctgcggctgcggctgcaggcagaggaggtggcacagcagaagagcctggcccaggccgatgcggagaagcagaaggaagaggcagaacgggaagcccggcggcggggcaaggcagaggagcaggccgtgcggcagcgagagctggctgagcaggagctggagaagcagcggcagctgacagagggcaccgcccagcagcgcctggctgccgagcaggagctgattcgcctgcgggcagagacggagcaaggtgagcatcagcggcagctgctggaggaagagctggcccggctacagcacgaagcgacagcagccacacagaagcgccaggagctggaggctgagctggcgaaggttcgggcagagatggaggtactgctggccagcaaggcacgagccgaagaggagtctcgctccaccagtgaaaagtccaagcagaggctggaagctgaggcagggcggtttcgagagctggctgaggaggctgcccgcctgcgtgctctggccgaggaggcaaggcggcaccgggagttggccgaggaggacgcggcacgccagcgggccgaggcggacggagtgcttacggagaagctggctgccatcagtgaggccacaaggctcaagacggaggcagagattgcactcaaagagaaggaggccgagaacgagcgcctgaggcgcctggctgaagatgaggccttccagcggcgccggctggaggagcaggcagcacagcacaaggcagacatagaggagcgcctggcccagctgcgcaaggcatccgagagcgagctggagcgacagaaggggttggtggaggataccctgcggcagcggcggcaggtggaggaggagatcatggctctgaaggcgagcttcgagaaggccgcggctggcaaggcagaactggagctggagcttggccgcatccgcagcaatgccgaggacaccatgcgcagcaaggagctggccgagcaggaggcagcgcggcagcggcagttggcagctgaggaggagcagaggcgccgggaagccgaggagcgggtgcagaggagcctggcagcggaggaggaagccgcacggcagcgcaaggtcgcactggaggaagtcgagcggctcaaggccaaggttgaggaagcgcggcgcctgcgagagcgagctgagcaggagtctgcgaggcagctgcagctggcccaggaggctgcccagaaacggctgcaggcggaggagaaggcgcacgcctttgtggtgcagcagcgagaagaggagctgcagcagactcttcagcaagagcagaacatgctggagcggctgcggagcgaggcagaggcagcgcggcgagctgctgaggaggcggaggaggcccgggagcaggcagaacgtgaggcagcgcagtctaggaagcaagtggaagaggccgagcggctgaagcagtcggcagaggagcaggctcaggcccaggcccaggcgcaggcggctgcagagaaactgcgcaaggaagcggagcaggaggcggcgcgtcgggcccaggcggagcaggctgcgttgaaacagaagcaggcagccgacgcggagatggagaagcacaagaagtttgcagagcagacgctacggcagaaggctcaggtagagcaggagctgaccacgctgaggctgcagctcgaggagaccgaccaccagaagagcatcctggatgaggagctgcagcggctaaaggctgaggtaacagaggcagcccggcagcgtagccaggtagaggaggagctcttctctgtccgcgtgcagatggaggagctgggcaaactcaaggctcgcattgaagctgaaaaccgggcactcatccttcgtgacaaggacaacacacagcgcttcctggaggaggaggccgagaagatgaaacaggtggcagaggaagctgcacggttgagcgtagctgcccaggaggcagcaaggctgcggcagctagccgaggaggacctggcccagcagcgggccctggcggagaagatgctgaaggagaagatgcaggcggtgcaggaagccacaaggctcaaggctgaggctgagctgctgcagcagcagaaggagctggcacaggagcaggcccggcggctgcaggcggacaaggagcaaatggctcagcagttggtagaggagacacagggtttccagcggaccctggaggctgagcggcagcggcagctagaaatgagcgcagaggctgaacgcctcaagttgcgcatggctgagatgagccgggctcaggcccgtgcagaggaggatgcccagcgcttccggaagcaggctgaagagatcggcgaaaagctgcaccgcactgaactcgctacacaggagaaggtgacattggtgcagactctcgagatccagcgacagcagagtgaccaagatgccgagcgtctgagggaggccattgctgagctggagcgtgagaaggagaagctcaagcaggaggcgaagttactgcagctcaagtctgaggagatgcagactgtgcagcaggagcagatactgcaggagacacaggccctgcagaagagctttctctctgagaaggacagcttgctgcaacgcgaacgcttcatcgagcaggagaaggccaagctggagcagcttttccaggacgaggtggcaaaagcaaaacagctgcaggaggagcagcagcggcagcagcagcagatggagcaggaaaagcaggagctggtggccagcatggaggaggcccggaggcggcagcgtgaggcagaggagggtgtgaggcgcaagcaagaggaactgcagcgtctggagcagcagcggcagcagcaggagaaactactggcagaggagaaccagaggctgcgggagcggctgcagcgcctggaggaagagcaccgagctgcgttggcgcactctgaggagatcgccacctcccaggctgctgccacaaaagcactgcccaatggccgcgacgcacttgatggcccctccatggaggccgagcccgagtacacctttgagggattacgtcagaaggtgccagctcagcagctacaggaagcaggcattctgagcatggaggaactgcagcgtttgacacagggtcacaccacggtggctgagctcacgcagcgggaagatgtgcgccactacctgaagggcggcagcagcatcgcaggattgctcctgaagcccaccaatgagaaactgagtgtctacacagccctacagcggcagctgctcagccctggaacagcccttatcttacttgaggcccaggcagcctcgggcttcctgctggaccctgtccggaaccggcggctgacggtcaatgaggctgtgaaggagggtgtggtgggtcccgagctgcaccacaagctgctgtcagctgagcgtgccgtcactggctacaaggacccttacacaggagaacagatctctctcttccaggccatgaagaaggacctcattgtcagggaccatggcatccgcctgctggaagcccagatcgccacaggtggcatcattgaccctgtacacagccaccgtgttcccgtggacgtggcctaccagcgtggctacttcgatgaggagatgaaccgtgtgctggctgacccaagcgatgacaccaagggcttctttgaccccaacactcacgagaacctcacgtacctgcagctgctggagcgctgtgtggaggaccccgagacaggcctgcgcctcctgccactcacagacaaggctgccaagggtggtgagctggtgtacactgacacggaggcccgtgacgtcttcgaaaaggccacagtgtctgcaccattcggcaagttccagggcaagaccgtgaccatctgggagatcatcaactcagagtacttcacagcggagcagcgacgggacctgctccggcagttccgcacgggccgcatcacggtggagaagatcatcaagattgtcatcacggtggtagaggaacacgagcggaagggccagctctgctttgagggcctccgtgcccttgtgcctgctgcagagctgctggacagtggagtcatcagtcatgaagtctaccagcagctgcagcggggtgagcgctctgtgcgggaagtggccgaggcagacgaggtgaggcaggccctgcggggtaccagtgtcattgccggtgtgtggctggaagaagcagggcagaagctgagcatctatgaggccctgaggagagatttgctgcagccagaggtggctgtggccttgctggaggcccaggctggcactgggcacatcattgaccctgccacgagtgccaggctgactgtggatgaggcagtgcgtgctggcctggtgggtcctgagatgcacgagaagctcttgtcagctgagaaggctgtaacaggctatagggatccctactcgggacagagcgtctcgctcttccaggctctgaagaagggtctcatcccccgagaacagggcctgcgcctgctggatgcccagttatccactggtggcattgtagaccccagcaaaagccaccgtgtgcccctggatgttgcctatgcccggggctacctggacaaagagactaacagggccctgacgtcacccagagacgatgccagagtctaccttgaccccagcacccgggagccagtcacctacagccagctccaacagcggtgccggtctgaccagctgactgggttgagcctactgcccctctcagagaaggccgtccgggcccggcaggaagaggtctactctgagctccaggcccgtgagacattggagaaggccaaggtggaggttcctgtgggcggctttaagggcagggcgctgacagtgtgggagctcataagctcggaatacttcactgaggagcagcggcaggagctgctacggcagttccgcacaggcaaggtcactgtagagaaggtcatcaagattcttatcaccattgtggaggaggtggagactcaacggcaggagagactgtccttcagtggcctccgtgcccctgtgccggccagtgagctcctggcctccaagatcctcagcagaactcagtttgagcagctcaaggatggcaagacatcagtcaaagatctgtcagaggtgggctctgtgcggacactgctgcaaggcagcggctgcctggctggcatctatctggaggactcgaaggagaaagtaaccatctatgaggccatgcgccggggcctcctcagagccagcacagccacactcctgctggaggcccaggcggccactggttttctagtggaccctgtgcggaaccaacgtctgtacgtccatgaagctgtcaaggctggagtggtgggcccggagctccatgagaagctgctgtcggctgagaaggcggtcactggttacaaagatccctactctggcagcaccatctcgctgttccaggccatgaagaagggcttggtcctcagggaccatgccatccgcctgctggaggcccagattgccacaggtggcatcattgaccctgtgcacagtcaccgccttcccgtagatgttgcctaccagcgtggctacttcgatgaggagatgaaccgtgtgctggctgacccaagtgatgacaccaagggcttcttcgaccccaacacccacgagaacctcacgtacctgcagctgctggagcgctgcgtggaggaccccgagacaggcctgcgcctcctgccactcagaggggcagagaagacagaggtggtagaaaccacacaggtgtatactgaggaggagactcggagggcgttcgaggagacgcagattgacatcccaggtggtggcagccacggtggctcctccatgtctctatgggaggtgatgcagtcagacatgatcccagaggaccagcgtgcccggctcatggccgactttcaggctggcagagtgaccaaggagcgcatgatcattatcatcatcgaaatcattgagaagacggagatcatccgccagcagaacctcgcctcctatgactacgtacgccgccgcctcaccgccgaagacctgtatgaggcccggatcatctcccttgagacctacaacctcttccgggaaggcaccaagagcctccgtgaggttctggagatggaatctgcctggcgctacctttacggcacaggatcggtggccggtgtctacctgcctggctctaggcagacgctaaccatctaccaggcccttaagaaggggctgctgagtgccgaggtggcccgcttgctgctggaagcacaggcagccacaggctttctgctggacccagtgaaaggcgagaggctgactgtggacgaggccgtgcggaagggtctggtaggccccgagctgcacgatcggctcctctctgccgagcgagctgtaactggctaccgagacccctacaccgaacagcccatctcactcttccaggccatgaagaaggagctgatccctgccgaggaggcactgaggctgctggatgctcagctagccacaggaggcattgtggacccccgcctgggtttccacctccccctggaggtggcttaccaacgaggctacctcaataaggacacgcatgaccagttgtcagagcccagtgaggtgcgcagctatgtggacccctccacggatgagcgtctcagctacacacagctgctcaagcgttgccgccgtgacgacaacagcggccagatgctgctgccgctctctgatgcccgcaagctgaccttccgcggcctgcgcaagcagatcaccgtggaggagctggtacgctctcaggtcatggatgaggccacagcactgcagctgcaagaaggcctgacctccattgaggaggtcactaagaacctgcagaagttccttgagggtaccagctgcattgctggagtctttgttgatgctaccaaggaacggctgtcggtgtaccaggccatgaagaagggcatcatccgtcccgggacagccttcgagctcctggaagcgcaggcagccaccggctacgtcattgaccctatcaaggggctcaagctgactgtggaagaggccgtgcgcatgggtatcgtgggccccgagttcaaggacaagctgctgtctgctgagcgtgccgtcactggctacaaggacccttactctgggaaactcatctctctcttccaggccatgaagaagggcctgatcctgaaggaccatggcatccgcctgctagaggctcagatcgccaccggtggcatcattgaccctgaggagagccaccgcctgcctgtggaagtggcctataagcgtggtctctttgatgaggagatgaacgagatcctgactgacccctcagatgacaccaagggcttcttcgacccaaacaccgaggagaacctcacatacctgcagctgatggagcgctgtatcactgacccccagactggcctgtgtctcctgccgctgaaggaaaagaagcgggagcggaagacgtcctccaagtcctcagtgcgcaagcgccgcgtggtgattgtggaccctgagacgggcaaggagatgtcagtgtatgaggcctaccgcaagggcctcatagaccaccagacatacctggagttgtcagagcaggagtgcgagtgggaagaaatcaccatctcttcctcggacggcgtcgtcaaatctatgatcatcgaccgccgctctggccgccagtatgacattggtgacgccatcaccaagaacctcattgaccgctcagcactggaccagtaccgcgctggcacactttctatcaccgagtttgccgacatgctctcaggcaacgctggtggcttccgctcccgctcctcctctgtgggctcatcttcctcctaccccatcagttctgctgtccctaggacccagctagcctcctggtctgatcctactgaggagactggcccagtggccggcatcctagacacagagactctggagaaggtgtccatcacagaggccatgcaccgcaacctggtagacaacatcactggccagcggttgctggaggcacaggcctgcaccgggggcatcattgaccccagcactggtgagcgcttcccggtcactgaggctgtcaacaagggcctggtggacaagatcatggtagaccgtatcaatctggcccagaaggccttctgtgggtttgaggacccacgcaccaagaccaagatgtcagctgcccaggccctgaagaagggctggctttactacgaggcaggccagcgtttcctcgaggtgcagtacctgacgggtggtctgattgagcctgacacacctggccgtgtgtctcttgatgaagccttgcaacgtggcactgtggatgcccgcacagcccagaagctgcgtgatgtcagtgcctactccaagtacctcacgtgccccaagaccaagctcaagatctcttacaaggacgctctggatcggagcatggtggaggagggcacagggctgaggctgctggaagccgcggcacagtccagcaagggctactacagcccgtacagtgtcagtggctctggctctactgctggttcacgcactggttcacgcaccggctccagggccggctcccgtcgtggcagctttgatgccactggctctggcttctccatgaccttttcttcttcctcctactcttcctcaggctatggccgccgctatgcctcagggccttcagcctctcttgggggccctgagtctgcagtggcctgatcccccagcctgtatcctgccttcccgctctgcatgtcgccaggctccccgtggaggcgctggggtcttttctttcttcttctttttttttttttttttaacatttaaaggtgtcttcctcccaagcggtgcctaaaatctaaccaaaaagaccagaataacacattaatatatatatatatatgcgatgtccagacagcctgtgtcttgggaaacagggctggcccaggcccagtgaccactccactctccttgggcctccctaatcctttctacctgccactcaccacagctaggtgccttggagaatccagagctgggcactcagcccactactcctgtctctcctgggaggattgccatctgggaaaggcccccagacctctaagccaaccccactggatgtctacctgctggtcctagctgctgaggggaactggggacggtcctgtgagcagacagctgttgagtctcttgaggcctctgccctgagccagctgcttctccccagtgtatacctgaatattcagtgggttttgctggcaaaggaaagatcccaggccaaccatctcttccagcctgcccagagaagccccttccccatgggaagataaggcctggtcctggccccagcctcccgcctggctcctgcagctgccattggagctgtgctttgtagctcactaccccatacttattcccttgagacctgagcctctgcttcagccttccagcctcaactccccttgtaagtgccttctgtgtccttgtacccaggccctaaagacccagacccagggcaagagatggacattctggctgggcggggctggagggttctgcagatctgagaattccttctccagaggcccagggtcttcaagcctgtggaacccctctgggtgctgctgcccaccccactcccagggagccctggccagcccagctgtgctaacataagtacttggccagtgacactctcccttccctggccttggtggctcctacccctgcctccaccctctgagtgagctttgcatgttccactaaccttgagctggtgacaggtggagatgccaggcagaacactaacctgaccatgggcgggggccctgcggtgtccgcccctcaataaaagcaattccaaccttaaaaaaaaaaaaaaaa

SEQ ID NO: 1812 - protein, 4687 aa, Rattus norvegicus
  ref <308>: DATABASE ACCESSION NUMBER: Refseq / NP_071796
  ref <309>: DATABASE ENTRY DATE: 2003-01-13
MVAGMLMPLDQLRAIYEVLFREGVMVAKKDRRPRSLHPHVPGVTNLQVMRAMTSLKARGLVRETFAWCHFYWYLTNEGIDHLRQYLHLPPEIVPASLQRVRRPVAMVMPARRRSPHVQTMQGPLGCPPKRGPLPAEDPAREERQVYRRKEREEGAPETPVVSATIVGTLARPGPEPTPATDERDRVQKKTSTKWVNKHLIKAQRHISDLYEDLRDGHNLISLLEVLSGDSLPREKGRMRFHKLQNVQIALDYLRHRQVKLVNIRNDDIADGNPKLTLGLIWTIILHFKISDIQVSGQSEDMTAKEKLLLWSQRMVEGYQGLRCDNFTTSWRDGRLFNAIIHRHKPMLIDMNKVYRQTNLENLDQAFSVAERDLGVTRLLDPEDVDVPQPDEKSIITYVSSLYDAMPRVPGAQDGVRANELQLRWQEYRELVLLLLQWIRHHTAAFEERKFPSSFEEIEILWCQFLKFKETELPAKEADKNRSKGIYQSLEGAVQAGQLKIPPGYHPLDVEKEWGKLHVAILEREKQLRSEFERLECLQRIVSKLQMEAGLCEEQLYQADSLLQSDIRLLASGKAAQRAGEVERDLDKADGMIRLLFNDVQTLKDGRHPQGEQMYRRVYRLHERLVAIRTEYNLRLKAGVGAPVTQVTLQSTQRRPELEDSTLRYLHDLLAWVEENQRRIDGAEWGVDLPSVEAQLGSHRGMHQSIEEFRAKIERARNDESQLSPATRGAYRDCLGRLDLQYAKLLNSSKARLRSLESLHGFVAAATKELMWLNEKEEEEVGFDWSDRNTNMAAKKESYSALMRELEMKEKKIKEIQNTGDRLLREDHPARPTVESFQAALQTQWSWMLQLCCCIEAHLKENTAYFQFFSDVREAEEQLQKLQETLRRKYSCDRSITVTRLEDLLQDAQDEKEQLNEYKGHLSGLAKRAKAIVQLKPRNPAHPVRGHVPLLAVCDYKQVEVTVHKGDQCQLVGPAQPFHWKVLSSSGSEAAVPSVCFLVPPPNQEAQEAVARLEAQHQALVTLWHQLHVDMKSLLAWQSLNRDIQLIRSWSLVTFRTLKPEEQRQALRNLELHYQAFLRDSQDAGGFGPEDRLVAEREYGSCSRHYQQLLQSLEQGEQEESRCQRCISELKDIRLQLEACETRTVHRLRLPLDKDPARECAQRIAEQQKAQAEVEGLGKGVARLSAEAEKVLALPEPSPAAPTLRSELELTLGKLEQVRSLSAIYLEKLKTISLVIRSTQGAEEVLKTHEEHLKEAQAVPATLQELEVTKASLKKLRAQAEAQQPVFNTLRDELRGAQEVGERLQQRHGERDVEVERWRERVTQLLERWQAVLAQTDVRQRELEQLGRQLRYYRESADPLSSWLQDAKSRQEQIQAVPIANSQAAREQLRQEKALLEEIERHGEKVEECQKFAKQYINAIKDYELQLITYKAQLEPVASPAKKPKVQSGSESVIQEYVDLRTRYSELTTLTSQYIKFISETLRRMEEEERLAEQQRAEERERLAEVEAALEKQRQLAEAHAQAKAQAELEARELQRRMQEEVTRREEAAVDAQQQKRSIQEELQHLRQSSEAEIQAKAQQVEAAERSRMRIEEEIRVVRLQLETTERQRGGAEDELQALRARAEEAEAQKRQAQEEAERLRRQVQDESQRKRQAEAELALRVKAEAEAAREKQRALQALDELKLQAEEAERWLCQAEAERARQVQVALETAQRSAEVELQSKRPSFAEKTAQLERTLQEEHVTVTQLREEAERRAQQQAEAERAREEAERELERWQLKANEALRLRLQAEEVAQQKSLAQADAEKQKEEAEREARRRGKAEEQAVRQRELAEQELEKQRQLTEGTAQQRLAAEQELIRLRAETEQGEHQRQLLEEELARLQHEATAATQKRQELEAELAKVRAEMEVLLASKARAEEESRSTSEKSKQRLEAEAGRFRELAEEAARLRALAEEARRHRELAEEDAARQRAEADGVLTEKLAAISEATRLKTEAEIALKEKEAENERLRRLAEDEAFQRRRLEEQAAQHKADIEERLAQLRKASESELERQKGLVEDTLRQRRQVEEEIMALKASFEKAAAGKAELELELGRIRSNAEDTMRSKELAEQEAARQRQLAAEEEQRRREAEERVQRSLAAEEEAARQRKVALEEVERLKAKVEEARRLRERAEQESARQLQLAQEAAQKRLQAEEKAHAFVVQQREEELQQTLQQEQNMLERLRSEAEAARRAAEEAEEAREQAEREAAQSRKQVEEAERLKQSAEEQAQAQAQAQAAAEKLRKEAEQEAARRAQAEQAALKQKQAADAEMEKHKKFAEQTLRQKAQVEQELTTLRLQLEETDHQKSILDEELQRLKAEVTEAARQRSQVEEELFSVRVQMEELGKLKARIEAENRALILRDKDNTQRFLEEEAEKMKQVAEEAARLSVAAQEAARLRQLAEEDLAQQRALAEKMLKEKMQAVQEATRLKAEAELLQQQKELAQEQARRLQADKEQMAQQLVEETQGFQRTLEAERQRQLEMSAEAERLKLRMAEMSRAQARAEEDAQRFRKQAEEIGEKLHRTELATQEKVTLVQTLEIQRQQSDQDAERLREAIAELEREKEKLKQEAKLLQLKSEEMQTVQQEQILQETQALQKSFLSEKDSLLQRERFIEQEKAKLEQLFQDEVAKAKQLQEEQQRQQQQMEQEKQELVASMEEARRRQREAEEGVRRKQEELQRLEQQRQQQEKLLAEENQRLRERLQRLEEEHRAALAHSEEIATSQAAATKALPNGRDALDGPSMEAEPEYTFEGLRQKVPAQQLQEAGILSMEELQRLTQGHTTVAELTQREDVRHYLKGGSSIAGLLLKPTNEKLSVYTALQRQLLSPGTALILLEAQAASGFLLDPVRNRRLTVNEAVKEGVVGPELHHKLLSAERAVTGYKDPYTGEQISLFQAMKKDLIVRDHGIRLLEAQIATGGIIDPVHSHRVPVDVAYQRGYFDEEMNRVLADPSDDTKGFFDPNTHENLTYLQLLERCVEDPETGLRLLPLTDKAAKGGELVYTDTEARDVFEKATVSAPFGKFQGKTVTIWEIINSEYFTAEQRRDLLRQFRTGRITVEKIIKIVITVVEEHERKGQLCFEGLRALVPAAELLDSGVISHEVYQQLQRGERSVREVAEADEVRQALRGTSVIAGVWLEEAGQKLSIYEALRRDLLQPEVAVALLEAQAGTGHIIDPATSARLTVDEAVRAGLVGPEMHEKLLSAEKAVTGYRDPYSGQSVSLFQALKKGLIPREQGLRLLDAQLSTGGIVDPSKSHRVPLDVAYARGYLDKETNRALTSPRDDARVYLDPSTREPVTYSQLQQRCRSDQLTGLSLLPLSEKAVRARQEEVYSELQARETLEKAKVEVPVGGFKGRALTVWELISSEYFTEEQRQELLRQFRTGKVTVEKVIKILITIVEEVETQRQERLSFSGLRAPVPASELLASKILSRTQFEQLKDGKTSVKDLSEVGSVRTLLQGSGCLAGIYLEDSKEKVTIYEAMRRGLLRASTATLLLEAQAATGFLVDPVRNQRLYVHEAVKAGVVGPELHEKLLSAEKAVTGYKDPYSGSTISLFQAMKKGLVLRDHAIRLLEAQIATGGIIDPVHSHRLPVDVAYQRGYFDEEMNRVLADPSDDTKGFFDPNTHENLTYLQLLERCVEDPETGLRLLPLRGAEKTEVVETTQVYTEEETRRAFEETQIDIPGGGSHGGSSMSLWEVMQSDMIPEDQRARLMADFQAGRVTKERMIIIIIEIIEKTEIIRQQNLASYDYVRRRLTAEDLYEARIISLETYNLFREGTKSLREVLEMESAWRYLYGTGSVAGVYLPGSRQTLTIYQALKKGLLSAEVARLLLEAQAATGFLLDPVKGERLTVDEAVRKGLVGPELHDRLLSAERAVTGYRDPYTEQPISLFQAMKKELIPAEEALRLLDAQLATGGIVDPRLGFHLPLEVAYQRGYLNKDTHDQLSEPSEVRSYVDPSTDERLSYTQLLKRCRRDDNSGQMLLPLSDARKLTFRGLRKQITVEELVRSQVMDEATALQLQEGLTSIEEVTKNLQKFLEGTSCIAGVFVDATKERLSVYQAMKKGIIRPGTAFELLEAQAATGYVIDPIKGLKLTVEEAVRMGIVGPEFKDKLLSAERAVTGYKDPYSGKLISLFQAMKKGLILKDHGIRLLEAQIATGGIIDPEESHRLPVEVAYKRGLFDEEMNEILTDPSDDTKGFFDPNTEENLTYLQLMERCITDPQTGLCLLPLKEKKRERKTSSKSSVRKRRVVIVDPETGKEMSVYEAYRKGLIDHQTYLELSEQECEWEEITISSSDGVVKSMIIDRRSGRQYDIGDAITKNLIDRSALDQYRAGTLSITEFADMLSGNAGGFRSRSSSVGSSSSYPISSAVPRTQLASWSDPTEETGPVAGILDTETLEKVSITEAMHRNLVDNITGQRLLEAQACTGGIIDPSTGERFPVTEAVNKGLVDKIMVDRINLAQKAFCGFEDPRTKTKMSAAQALKKGWLYYEAGQRFLEVQYLTGGLIEPDTPGRVSLDEALQRGTVDARTAQKLRDVSAYSKYLTCPKTKLKISYKDALDRSMVEEGTGLRLLEAAAQSSKGYYSPYSVSGSGSTAGSRTGSRTGSRAGSRRGSFDATGSGFSMTFSSSSYSSSGYGRRYASGPSASLGGPESAVA

SEQ ID NO: 1813 - DNA, 1501 bp, Homo sapiens
  ref <308>: DATABASE ACCESSION NUMBER: Refseq / NM_001336
  ref <309>: DATABASE ENTRY DATE: 2003-01-17
ggggtcggccgggtgctaggccggggccgaggccgaggccggggcgggatccagagcgggagccggcgcgggatctgggactcggagcgggatccggagcgggacccaggagccggcgcggggccatggcgaggcgcgggccagggtggcggccgcttctgctgctcgtgctgctggcgggcgcggcgcagggcggcctctacttccgccggggacagacctgctaccggcctctgcggggggacgggctggctccgctggggcgcagcacatacccccggcctcatgagtacctgtccccagcggatctgcccaagagctgggactggcgcaatgtggatggtgtcaactatgccagcatcacccggaaccagcacatcccccaatactgcggctcctgctgggcccacgccagcaccagcgctatggcggatcggatcaacatcaagaggaagggagcgtggccctccaccctcctgtccgtgcagaacgtcatcgactgcggtaacgctggctcctgtgaagggggtaatgacctgtccgtgtgggactacgcccaccagcacggcatccctgacgagacctgcaacaactaccaggccaaggaccaggagtgtgacaagtttaaccaatgtgggacatgcaatgaattcaaagagtgccacgccatccggaactacaccctctggagggtgggagactacggctccctctctgggagggagaagatgatggcagaaatctacgcaaatggtcccatcagctgtggaataatggcaacagaaagactggctaactacaccggaggcatctatgccgaataccaggacaccacatatataaaccatgtcgtttccgtggctgggtggggcatcagtgatgggactgagtactggattgtccggaattcatggggtgaaccatggggcgagagaggctggctgaggatcgtgaccagcacctataaggatgggaagggcgccagatacaaccttgccatcgaggagcactgtacatttggggaccccatcgtttaaggccatgtcactagaagcgcagtttaagaaaaggcatggtgacccatgaccagaggggatcctatggttatgtgtgccaggctggctggcaggaactggggtggctatcaatattggatggcgaggacagcgtggtactggctgcgagtgttcctgagagttgaaagtgggatgacttatgacacttgcacagcatggctctgcctcacaatgatgcagtcagccacctggtgaagaagtgacctgcaacacaggaaacgatgggacctcagtcttcttcagcagaggacttgatattttgtatttggcaactgtgggcaataatatggcatttaagaggtgaaagagttcagacttatcaccattcttatgtcactttagaatcaagggtgggggagggagggagggagttggcagtttcaaatcgcccaagtgatgaataaagtatctggctctgcacgaga

SEQ ID NO: 1814 - protein, 303 aa, Homo sapiens
  ref <308>: DATABASE ACCESSION NUMBER: Refseq / NP_001327
  ref <309>: DATABASE ENTRY DATE: 2003-01-17
MARRGPGWRPLLLLVLLAGAAQGGLYFRRGQTCYRPLRGDGLAPLGRSTYPRPHEYLSPADLPKSWDWRNVDGVNYASITRNQHIPQYCGSCWAHASTSAMADRINIKRKGAWPSTLLSVQNVIDCGNAGSCEGGNDLSVWDYAHQHGIPDETCNNYQAKDQECDKFNQCGTCNEFKECHAIRNYTLWRVGDYGSLSGREKMMAEIYANGPISCGIMATERLANYTGGIYAEYQDTTYINHVVSVAGWGISDGTEYWIVRNSWGEPWGERGWLRIVTSTYKDGKGARYNLAIEEHCTFGDPIV

SEQ ID NO: 1815 - DNA, 528 bp, Rattus norvegicus
  ref <308>: DATABASE ACCESSION NUMBER: EMBL / X60351
  ref <309>: DATABASE ENTRY DATE: 1992-01-31
atggacatagccatccaccacccctggatccggcgtcccttctttcctttccactccccaagccgcctctttgaccagttcttcggagagcacctgttggagtctgacctcttttctacagccacttccctgagccccttctaccttcggccaccctccttcctgcgggcacctagctggattgacactgggctctcagagatgcgtatggagaaggacaggttctctgtgaacctggacgtgaagcacttctctccagaggaactcaaagtcaaggttctgggagacgtgattgaggtgcacggcaagcacgaagagcgccaggacgaacatggcttcatctccagggagttccacaggaagtaccggatcccagccgacgtggatcctctcaccattacttcttccctgtcatcggatggagtcctcactgtgaatggaccaaggaaacaggcctctggccctgagcgcaccattcccatcacccgtgaagagaagcctgctgtcactgcagcccctaagaagtag

SEQ ID NO: 1816 - DNA, 774 bp, Rattus norvegicus
  ref <308>: DATABASE ACCESSION NUMBER: EMBL / X62145
  ref <309>: DATABASE ENTRY DATE: 1991-10-16
atgggccgtgtgatccgaggccagaggaaaggtgccggttctgtgtttcgtgcgcacgtgaagcaccgtaagggagccgcgcgtctgcgtgctgtggacttcgcggagcgacacggctacattaaaggcatcgtaaaggacatcattcatgaccctggccgcggcgctcccctcgcgaaagtagtctttcgtgatccctatcgattcaagaagcggacagagctgttcattgccgcagagggaatccacactggacagtttgtgtactgcggcaagaaggcccagctgaatattggcaatgttttgcccgtgggcaccatgcctgagggtactatcgtgtgttgtctggaggagaagcctggggacaggggcaagctggcacgagcctccgggaactatgctacagtcatctcccacaacccagagaccaagaagacccgagtgaagctgccttcagggtccaagaaggtcatttcctctgctaaccgagctgttgttggtgtcgtggctggcgggggcagaattgacaagcctatcttaaaggctggccgtgcctaccataagtacaaggcaaagaggaactgctggccacgtgtgcggggtgttgccatgaatcctgtggagcatccctttggcggtggtaaccaccagcacattggcaagccttccactatccgaagagatgccccagctgggcgcaaagtgggtctcattgctgctcgccggactggacggctacgtggaaccaaaactgtacaggagaaggagaactag

SEQ ID NO: 1817 - DNA, 678 bp, Rattus norvegicus; identical to SEQ ID NO: 958
  ref <308>: DATABASE ACCESSION NUMBER: EMBL / X76489
  ref <309>: DATABASE ENTRY DATE: 1995-05-15

SEQ ID NO: 1818 - DNA, 691 bp, Rattus norvegicus
  ref <308>: DATABASE ACCESSION NUMBER: Refseq / NM_139114
  ref <309>: DATABASE ENTRY DATE: 2003-01-13
catcaggtgagccaagatgggtgcatacaaatacatccaggagctgtggaggaagaagcagtccgacgtgatgcgcttccttctaagggtccgctgctggcagtaccgccagctctctgcgctgcacagggctccccgccccacccggcctgataaggctcgaaggctgggatacaaggctaagcaaggttatgtcatttacaggatccgtgtccgccgcggtggtcgcaagcgcccagttcctaagggtgcaacctacggcaagcctgtccaccacggtgttaaccagctgaagtttgcccgaagccttcagtctgttgctgaggagagagctggccgccattgtggagctttgagagtcctgaattcctactgggttggtgaagattccacatataaattttttgaggttatcctcattgatccattccataaagctatcagaagaaatcccgacacccaatggattaccaaaccagtccacaagcacagggagatgcgtgggctgacatctgctggccgcaagagccgtggccttggaaagggccacaagttccaccacaccattggtgggtctcgccgtgcagcctggagaaggcgcaacactcttcagctccaccgttaccgctaattgacgtaatatttgtaaaattcatatccaataaacaacttaggacagtcaaaaaaaaaa

SEQ ID NO: 1819 - protein, 204 aa, Rattus norvegicus [sequence omitted]

SEQ ID NO: 1820 - DNA, 372 bp, Homo sapiens
  ref <308>: DATABASE ACCESSION NUMBER: EMBL / AI039838
  ref <309>: DATABASE ENTRY DATE: 2000-03-03
tttttttgactgcccgggaggggttattaagtatgaattttacaaactttacttatattagcggtaacggtggagctggagagtattgcgccttctccaagctgcccggcgagagccaccaatagtgtggtggaacttgtggccctttccaaggccacggctctttcggcctgcagatgtcagcccacgcatctccctgtgcttgtggactggtttggtgatccactgggtgtcaggatttcttctgatagctttatggaatggatcaatgaggataacctcaaaaaatttgtatgtggaatcttcaccaacccagtaagaattcaggactctcatagccccacagtggcgttcagctcgctcctctgcaac

SEQ ID NO: 1821 - DNA, 722 bp, Rattus norvegicus
  ref <308>: DATABASE ACCESSION NUMBER: Refseq / NM_031101
  ref <309>: DATABASE ENTRY DATE: 2003-01-13
tcctttccgctcggccgttctcctgtacaggaggcagccatggcgcccagccggaatggcatgatcctgaagccccacttccacaaggactggcagcagcgagtggacacgtggttcaaccagccggcccgcaagatccgcagacgcaaggcccggcaggcgaaagcgcgccgcatcgcccctcgccccgcgtccggtcccatcagccccatcgtgaggtgccctacagttagataccacaccaaggtccgggctggcaggggcttcagcctggaggagctcagggtggctggtatccacaagaaaatggcacgcaccatcggcatctccgtggacccaaggaggcgaaacaaatccacggagtcactgcaggccaacgtgcagcgcctgaaggagtaccgctccaagctcatacttttccccaggaagccttctgctccgaagaagggagacagttctgctgaagaacttaaattggccacgcagctaacaggacctgtgatgcccatccggaatgtgtacaaaaaggagaaggccagagccatcacggaagaggagaagaactttaaggctttcgccagccttcgcatggcccgagccaatgcccggctcttcggcatccgagcaaagagggcgaaagaagccgcagagcaagacgttgagaagaagaaataatgcgcggctggagagttgtaataaattttccataaagcaaaaaaaaa

SEQ ID NO: 1822 - protein, 211 aa, Rattus norvegicus
  ref <308>: DATABASE ACCESSION NUMBER: Refseq / NP_112363
  ref <309>: DATABASE ENTRY DATE: 2003-01-13
MAPSRNGMILKPHFHKDWQQRVDTWFNQPARKIRRRKARQAKARRIAPRPASGPISPIVRCPTVRYHTKVRAGRGFSLEELRVAGIHKKMARTIGISVDPRRRNKSTESLQANVQRLKEYRSKLILFPRKPSAPKKGDSSAEELKLATQLTGPVMPIRNVYKKEKARAITEEEKNFKAFASLRMARANARLFGIRAKRAKEAAEQDVEKKK

SEQ ID NO: 1823 - DNA, 1296 bp, Homo sapiens
  ref <308>: DATABASE ACCESSION NUMBER: Refseq / NM_033251
  ref <309>: DATABASE ENTRY DATE: 2001-09-04
ctgggtcctggcctttgggcatcatccagcgccatcggcctggcgcttcagccaacgcgggagtggatgggccccttcttcttcgcagacagcgttcggccgctgcccgggctctaggcgcggccggacggcccagtctggagggttcggggcggaggcccgggggggtgcgcgcgcccggggtccggcctctcactcgctcccctctcgtccgcagccgcagggccgtaggcagccatggcgcccagccggaatggcatggtcttgaagccccacttccacaaggactggcagcggcgcgtggccacgtggttcaaccagccggcccgtaagatccgcagacgtaaggcccggcaagccaaggcgcgccgcatcgccccgcgccccgcgtcgggtcccatccggcccatcgtgcgctgccccacggttcggtaccacacgaaggtgcgcgccggccgcggcttcagcctggaggagctcagggtggccggcattcacaagaaggtggcccggaccatcggcatttctgtggatccgaggaggcggaacaagtccacggagtccctgcaggccaacgtgcagcggctgaaggagtaccgctccaaactcatcctcttccccaggaagccctcggcccccaagaagggagacagttctgctgaagaactgaaactggccacccagctgaccggaccggtcatgcccgtccggaacgtctataagaaggagaaagctcgagtcatcactgaggaagagaagaatttcaaagccttcgctagtctccgtatggcccgtgccaacgcccggctcttcggcatacgggcaaaaagagccaaggaagccgcagaacaggatgttgaaaagaaaaaataaagccctcctggggacttggaatcagtcggcagtcatgctgggtctccacgtggtgtgtttcgtgggaacaactgggcctgggatggggcttcactgctgtgacttcctcctgccaggggatttggggctttcttgaaagacagtccaagccctggataatgctttactttctgtgttgaagcactgttggttgtttggttagtgactgatgtaaaacggttttcttgtggggaggttacagaggctgacttcagagtggacttgtgttttttctttttaaagaggcaaggttgggctggtgctcacagctgtaatcccagcactttgaggttggctgggagttcaagaccagcctggccaacatgtcagaactactaaaaataaagaaatcagccatgaaaaaaaaaaaaaaaaaaaaaaaaa

SEQ ID NO: 1824 - protein, 211 aa, Homo sapiens [sequence omitted]

SEQ ID NO: 1825 - DNA, 1178 bp, Rattus norvegicus
  ref <308>: DATABASE ACCESSION NUMBER: Refseq / NM_031509
  ref <309>: DATABASE ENTRY DATE: 2002-11-14
acattaaccaactgtttagcaactcaggcatgactttgcatttttcttctaatctttcatagaaatttctggccactggacactgtgggagcagcttttaccttattggactatctccccttaagtgggaagggcttagtcaaatgcagtaaagagctataaaacaccgagaactcttgatgtgttgtgaaacttagagggagcagctttttaacaagagaactcaagcaattgctgccatgccggggaagccagtccttcactacttcgatggcagggggagaatggagcccatccggtggctcctggctgcagctggagtagagtttgaagaacaatttctgaaaactcgggatgacctggccaggctaaggaatgatgggagtttgatgttccagcaagtgcccatggtggagattgatgggatgaagctggtgcagaccagagccattctcaactacattgccaccaaatacaacctctatgggaaggacatgaaggagagagccctcatcgacatgtatgcagaaggagtggcggatctggatgaaatagttctccattacccttacattccccctggggagaaagaggcaagtcttgccaaaatcaaggacaaagcaaggaaccgttactttcctgcctttgaaaaggtgttgaagagccatggacaagattatctcgttggcaataggctgagcagggctgatgtttacctagttcaagttctctaccatgtggaagagctggaccccagcgctttggccaacttccctctgctgaaggccctgagaaccagagtcagcaacctccccacagtgaagaagtttcttcagcctggcagccagaggaagccattagaggatgagaaatgtgtagaatctgcagttaagatcttcagttaattcaggcatctatggatacactgtacccacaaagccagccttcgaaagctttgcaacaatcgcatattttgactaaatgttgaccctacttattgggaggccaacacgttttctaatgcttctgtgttaattcatatagacatgactgatgaggaattgctgggatgctatttggttgtagttaaaatttgaaatcatgatcacttcctcagatattactttgaatctcaataaaaacttcgcaagctttttaaaaaaaaaaaaaaaaaaaaa

SEQ ID NO: 1826 - protein, 221 aa, Rattus norvegicus
  ref <308>: DATABASE ACCESSION NUMBER: Refseq / NP_113697
  ref <309>: DATABASE ENTRY DATE: 2002-11-14
MPGKPVLHYFDGRGRMEPIRWLLAAAGVEFEEQFLKTRDDLARLRNDGSLMFQQVPMVEIDGMKLVQTRAILNYIATKYNLYGKDMKERALIDMYAEGVADLDEIVLHYPYIPPGEKEASLAKIKDKARNRYFPAFEKVLKSHGQDYLVGNRLSRADVYLVQVLYHVEELDPSALANFPLLKALRTRVSNLPTVKKFLQPGSQRKPLEDEKCVESAVKIFS

SEQ ID NO: 1827 - DNA, 937 bp, Homo sapiens
  ref <308>: DATABASE ACCESSION NUMBER: Refseq / NM_000847
  ref <309>: DATABASE ENTRY DATE: 2003-01-15
atacacatcaggaggtggccttgagaagctgagcggagaccggctagactttactcaaagaaaccaagagactgttaccatggcagggaagcccaagcttcactacttcaatggacggggcagaatggagcccatccggtggctcttggctgcagctggagtggagtttgaagagaaatttataggatctgcagaagatttgggaaagttaagaaatgatgggagtttgatgttccagcaagtaccaatggttgagattgatgggatgaagttggtacagaccagagccattctcaactacattgccagcaaatacaacctctacgggaaagacataaaggagagagccctaattgatatgtatacagaaggtatggcagatttgaatgaaatgatccttcttctgcccttatgtcgacctgaggaaaaagatgccaagattgccttgatcaaagagaaaacaaaaagtcgctatttccctgccttcgaaaaagtgttacagagccatggacaagactaccttgttggcaacaagctgagccgggctgacattagcctggtggaacttctctactatgtggaagagcttgactccagccttatctccaacttccctctgctgaaggccctgaaaaccagaatcagcaacctgcccacggtgaagaagtttctacagcctggcagcccaaggaagcctcccgcagatgcaaaagctttagaagaagccagaaagattttcaggttttaataaagcagccatggaggctaagaacatgcaagaccaatattctaaagttttgcaacaatgaagtgctttacttaagtgttgattgtgcctgttgtaaagctaatgaaccctttccaattatatgctaattaaataataaaaactcctatttgctaacttaaaaaaaaaaaaaaaaaaaaaaaaaaaaaa

SEQ ID NO: 1828 - protein, 222 aa, Homo sapiens
  ref <308>: DATABASE ACCESSION NUMBER: Refseq / NP_000838
  ref <309>: DATABASE ENTRY DATE: 2003-01-15
MAGKPKLHYFNGRGRMEPIRWLLAAAGVEFEEKFIGSAEDLGKLRNDGSLMFQQVPMVEIDGMKLVQTRAILNYIASKYNLYGKDIKERALIDMYTEGMADLNEMILLLPLCRPEEKDAKIALIKEKTKSRYFPAFEKVLQSHGQDYLVGNKLSRADISLVELLYYVEELDSSLISNFPLLKALKTRISNLPTVKKFLQPGSPRKPPADAKALEEARKIFRF

SEQ ID NO: 1829 - DNA, 1601 bp, Rattus norvegicus
  ref <308>: DATABASE ACCESSION NUMBER: Refseq / NM_053973
  ref <309>: DATABASE ENTRY DATE: 2003-01-13
cgcatcactagtctgctctccctagctccgagctgctgtggccattgcctccagcgctgttttctgaggcctcgcctccgccgtctttcctgcccgagctccggtgcaaggcctccgctgccagacggtgcctggtgtcccgccgttcccatcctcggttggtccgccgttaggccgtgcctcaggcccaatccgcggcgacgccggcaggtgatgccaaatacagccatgaagaaaaaggtgctgttgatgggaaagagcgggtcggggaagaccagcatgaggtcgatcatctttgcaaattatattgcgcgcgacaccaggcgcctgggtgccaccatcgacgtggagcactcccacgtccgattcttggggaacctggtgctgaacctgtgggactgtggcggccaggacacctttatggaaaattacttcaccagccagcgggacaacatcttccgtaatgtggaggttctgatctacgtgtttgacgtagagagccgcgaactggaaaaagatatgcattattatcagtcgtgtctggaagccatcctccagaattcacctgatgccaaaatcttctgcctggtgcacaaaatggatctggttcaggaagatcaacgtgacctgatttttaaagagcgagaagaagacctgaggcgtttgtctcgcccgctggagtgcgcttgttttcgaacgtccatctgggatgagacgctctacaaagcctggtccagcatcgtctatcagctgatccccaacgttcagcagctggagatgaacctaaggaattttgcccagattattgaggctgatgaagttctgctgttcgagagagctacgttcttggtgatttcccactaccagtgcaaagagcagcgagatgtacaccgctttgagaagatcagcaacatcatcaagcagtttaagctaagctgtagtaaattggccgcttctttccagagcatggaagtgaggaattctaacttcgctgccttcatcgacatctttacatcaaacacgtatgtgatggtggtcatgtcagatccatccatcccttctgcagctactctgatcaacattcgtaatgccaggaaacactttgagaagctagagagagtagatggccccaagcatagcctcctcatgcgctgacataatgccaaatgctctttagtaaatgctgaattatggtgggtttttttttttgcatcatttgtttttaatattcataatgtcatgtgcttaaaagtgggctttgaaacgtgtgcttactatctcatctcttccctagtcttagtattggacgctatttactcagctatccagtagagatcctcaagacggcctttatgaaaagttagtgtggtgttaacactaaagtaggtggtgtgtatgggtgtgtgtgtgtgtgggtgtgttatggttacctggttataatagagtattaaagcagttatcttctgtattatcagatcacaaaggtggaatgttactattttatcagcaagatattaaaatgtatttctaaatcctccttggtttcaatcatgaataaacatttattattagcaatttaaaaaaaaaaaaaaaaaaaaaaa

SEQ ID NO: 1830 - protein, 313 aa, Rattus norvegicus
  ref <308>: DATABASE ACCESSION NUMBER: Refseq / NP_446425
  ref <309>: DATABASE ENTRY DATE: 2003-01-13
MPNTAMKKKVLLMGKSGSGKTSMRSIIFANYIARDTRRLGATIDVEHSHVRFLGNLVLNLWDCGGQDTFMENYFTSQRDNIFRNVEVLIYVFDVESRELEKDMHYYQSCLEAILQNSPDAKIFCLVHKMDLVQEDQRDLIFKEREEDLRRLSRPLECACFRTSIWDETLYKAWSSIVYQLIPNVQQLEMNLRNFAQIIEADEVLLFERATFLVISHYQCKEQRDVHRFEKISNIIKQFKLSCSKLAASFQSMEVRNSNFAAFIDIFTSNTYVMVVMSDPSIPSAATLINIRNARKHFEKLERVDGPKHSLLMR

SEQ ID NO: 1831 - DNA, 1607 bp, Homo sapiens
  ref <308>: DATABASE ACCESSION NUMBER: Refseq / NM_006570
  ref <309>: DATABASE ENTRY DATE: 2002-12-23
ggcacgaggcggctccctcccggaaagcgagcgtatctcccgagccgttgccactgacagccgcgggcgctcccatctgagtaagagccagcccgtccgcggcctctccagccccgggttcgcgctctcgactctcctgcctgcccagctgcgcggcggagcggagcgaggcgcggcctgcgagtccccggcagcccccgacccctccctcggcgctgcgtgtaggccgcgccctcaggcccagtccgcggtgccccggcgggtgatgccaaatacagccatgaagaaaaaggtgctgctgatggggaagagcgggtcggggaagaccagcatgaggtcgataatcttcgccaattacattgctcgcgacacccggcgcctgggggccaccattgacgtggaacactcccacgtccgattcctagggaacctggtgctgaacctgtgggactgtggcggtcaggacaccttcatggaaaattacttcaccagccagcgagacaatatcttccgtaacgtggaagttttgatttacgtgtttgacgtggagagccgcgaactggaaaaggacatgcattattaccagtcgtgtctggaggccatcctccagaactctcctgacgccaaaatcttctgcctggtgcacaaaatggatctggttcaggaggatcagcgtgacctgatttttaaagagcgagaggaagacctgaggcgtctgtctcgcccgctggagtgtgcttgttttcgaacgtccatctgggatgagacgctctacaaagcctggtccagcatcgtctaccagctgattcccaacgttcagcagctggagatgaacctcaggaattttgcccaaatcattgaggccgatgaagttctgctgttcgaaagagctacattcttggttatttcccactaccagtgcaaagagcagcgcgacgtccaccggtttgagaagatcagcaacatcatcaaacagttcaagctgagctgcagtaaattggccgcttccttccagagcatggaagttaggaattccaacttcgctgctttcatcgacatcttcacctcaaatacgtacgtgatggtggtcatgtcagatccgtcgatcccttctgcggccactctgatcaacattcgcaatgcccggaaacactttgagaagctggagagagtggatggccccaagcacagtctccttatgcgttgaatattgccaaatgctctttctgaaaatgctgaattgccttttttgtttgcatcctttatttttaatattcataatgtcgtgtgcttaaaagtgggctttgaagtgtgtgctgcttactcctttcatctttctccccgcttccccagtctttaaacattggacgctatttactcagctacccagtagagcttgaagctgacctttctgagaagttggtatggtgtaacactaaagtaggtggttcgtgtgtgttctcattacctggttatgatagatatgcacatcaaagcctttaccagtatcttcctgtattccgtatcagattgcaaagacggaatgttactattttatcagcaaggtattaaaatgcatttataaattcaaaaaaaaaaaaaaaaaa

SEQ ID NO: 1832 - protein, 313 aa, Homo sapiens; identical to SEQ ID NO: 1830
  ref <308>: DATABASE ACCESSION NUMBER: Refseq / NP_006561
  ref <309>: DATABASE ENTRY DATE: 2002-12-23

SEQ ID NO: 1833 - DNA, 1803 bp, Rattus norvegicus
  ref <308>: DATABASE ACCESSION NUMBER: Refseq / NM_031620
  ref <309>: DATABASE ENTRY DATE: 2002-11-05
agtcagcgtaaattgtgcgtgttaaagctcaccaggtacaggccttcagtttcctgtactaagtgcttctgcccaccagagcaaccgattctaaggcctggctctagcaatggccttcgcaaatctgcgcaaaatactcatcagtgatagcctcgacccctgctgccggaagatcctgcaagatggagggctgcaggtggtggagaagcagaacttgagcaaggaggagctgatagccgaactccaggactgtgaaggccttatcgtccggtcagctactaaggtcactgctgatgtcatcaatgcagcagagaagctccaggtggtgggcagggctggtacaggcgtggacaatgtggatctggaggctgccacaaggaagggcgtcctcgtcatgaacacccccaatggaaatagcctcagtgctgcggaactcacctgtgggatgctcatgtgcctggccaggcagatcccccaggcgacggcttcgatgaaagatggcaaatgggaccggaagaagttcatggggacagagctgaacgggaagacactgggaattcttggcctgggcagaattggaagagaggtggccgcccgaatgcaggcctttggaatgaagactgtaggctatgaccccatcatttctccagaagtcgctgcctcctttggtgttcagcagctgccgctagaggagatctggcctctctgtgatttcatcactgtccataccccgctcctgccctccactacaggcttgctcaatgacagcacctttgcccagtgcaagaaaggcgtgcgggtggtgaactgtgctcgaggaggcattgtggatgaaggtgccctgctccgtgccctgcagtctggtcagtgtgctggtgctgcactggatgtgtttacagaagagccaccacgggaccgggccttagtggaccacgagaacgtcatcagctgtccccacctgggcgccagcaccaaggaggcccagagccgctgtggggaggaaatcgcagtccagtttgtggacatggtgaaggggaaatctctaacaggggttgtaaacgcccaggctcttaccagtgccttctctccacacaccaagccttggattggtctggcagaagcattgggcacactgatgcacgcctgggctggctcccctaaagggaccatccaggtggtgacacaaggaacatctctgaagaatgctgggacctgcctgagccctgcggtcattgtcggccttctgagagaagcatcaaaacaggcagatgtgaacttggtgaacgctaagctactggtgaaagaggctggcctcaatgtcaccacctcccacagtcctggtgtcccaggagagcagggcatcggggaatgcctcctgactgtggccttggcaggtgctccctaccaagctgtgggcttggtccagggcaccacaccaatgttgcagatgctcaacggagctgtcttcaggccagaggtgcctctacgcaggggccagcccctgctcctgttccgggctcagccctccgaccctgtcatgctgcccactatgatcggcctactggcagaggcgggggtacagctgctgtcctaccagacctccaaggtgtctgacggagacacttggcacgtcatgggcctctcctccctactgcccagcctggacgcatggaagcagcatgtttctgaggctttccagttctgcttctgacccaggggctcagcggtcccagcccctcaggctcttctgaggaaacccgctcactgtgacctgaactaatatctagtaaagaatctaactcc

SEQ ID NO: 1834 - protein, 533 aa, Rattus norvegicus
  ref <308>: DATABASE ACCESSION NUMBER: Refseq / NP_113808
  ref <309>: DATABASE ENTRY DATE: 2002-11-05
MAFANLRKILISDSLDPCCRKILQDGGLQVVEKQNLSKEELIAELQDCEGLIVRSATKVTADVINAAEKLQVVGRAGTGVDNVDLEAATRKGVLVMNTPNGNSLSAAELTCGMLMCLARQIPQATASMKDGKWDRKKFMGTELNGKTLGILGLGRIGREVAARMQAFGMKTVGYDPIISPEVAASFGVQQLPLEEIWPLCDFITVHTPLLPSTTGLLNDSTFAQCKKGVRVVNCARGGIVDEGALLRALQSGQCAGAALDVFTEEPPRDRALVDHENVISCPHLGASTKEAQSRCGEEIAVQFVDMVKGKSLTGVVNAQALTSAFSPHTKPWIGLAEALGTLMHAWAGSPKGTIQVVTQGTSLKNAGTCLSPAVIVGLLREASKQADVNLVNAKLLVKEAGLNVTTSHSPGVPGEQGIGECLLTVALAGAPYQAVGLVQGTTPMLQMLNGAVFRPEVPLRRGQPLLLFRAQPSDPVMLPTMIGLLAEAGVQLLSYQTSKVSDGDTWHVMGLSSLLPSLDAWKQHVSEAFQFCF

SEQ ID NO: 1835 - DNA, 1803 bp, Rattus norvegicus; identical to SEQ ID NO: 1833
  ref <308>: DATABASE ACCESSION NUMBER: Refseq / NM_031620
  ref <309>: DATABASE ENTRY DATE: 2002-11-05

SEQ ID NO: 1836 - protein, 533 aa, Rattus norvegicus; identical to SEQ ID NO: 1834
  ref <308>: DATABASE ACCESSION NUMBER: Refseq / NP_113808
  ref <309>: DATABASE ENTRY DATE: 2002-11-05

SEQ ID NO: 1837 - DNA, 1320 bp, Rattus norvegicus
  ref <308>: DATABASE ACCESSION NUMBER: EMBL / Y08355
  ref <309>: DATABASE ENTRY DATE: 1997-06-30
atggcttcgctcacggtgaaggcctatctactgggcaaggaggaggcggcccgcgagatccgccgcttcagcttctgcttcagcccggagccggaggcggaagccgcggctggcccggggccctgcgagaggctgctgagccgggtggctgtgctgttccccgcgctgcggcctggaggctttcaggcgcactaccgcgatgaggatggggacttggtcgccttctccagtgatgaggaactgacaatggccatgtcctatgtgaaagatgacatcttccgcatctacattaaagagaagaaggagtgccggcgggaacatcgccccccatgtgctcaggaggcacgaagcatggtgcaccccaacgtgatttgtgatggttgcaatgggcctgtggtgggaactcgctataagtgcagtgtgtgccccgactacgacctgtgcagcgtctgcgaggggaagggcctgcacagggagcacagcaagctcatctttcccaacccctttggccacctctctgatagcttctctcatagccgctggcttcggaagctgaaacatgggcactttggctggcctggctgggagatgggcccaccagggaactggagcccacgtcctcctcgcgcaggggatggtcgcccttgccccacagctgagtcggcttctgctccatcagaggatcccaatgtcaatttcctgaagaatgtgggggagagcgtggcagctgccctcagccctctaggcatcgaggttgacattgatgtggaacatggagggaagagaagccgcctgacacccacctctgcagaaagttccagcacaggcacagaagataagagtggtactcagccaagcagctgctcttcggaagtcagcaaacctgacggggccggggagggccctgctcagtctctgacagagcagatgaagaagatagccttggagtcggtgggacagccagaggaactgatggagtcggataactgctcaggaggggatgacgactggacgcatttgtcttctaaagaagtggacccatccacaggtgaactccagtctctacagatgccagaatcggaagggccaagctctctagacccctcacaggaaggccccacagggctgaaggaagctgccctgtacccacatctcccaccagaggctgatccccggctgattgagtcactctctcagatgctgtccatgggtttctcggatgaaggcggctggctcaccaggctcctacagaccaagaattatgacatcggggctgctctggacacgatccagtattcaaagcaccctccaccattgtga

SEQ ID NO: 1838 - DNA, 1523 bp, Rattus norvegicus
  ref <308>: DATABASE ACCESSION NUMBER: Refseq / NM_013214
  ref <309>: DATABASE ENTRY DATE: 2003-01-14
acttctacatcaagatccgtcctggggagtatgagcagttcgagagcaccatcggcttcaagctccctaaccttcaccttcattgcgccacggcggctttcggacgagcctctgactcgcgcacgcgttagactccttggtccgtgttacaagacgggtcgggtgggtagccgacatcgccgccgaccccgtgccgtcgcagccaagatgtccggtcccaccaccgacacgccggccgccatccagatctgccggatcatgcgtccggatgatgccaacgtggccggcaatgttcacggagggaccattctaaagatgatcgaggaggctggggtcatcatcagcacccggcactgtaacagccagaatggggagcgctgtgtggctgccctggcccgggtggagcgcactgacttcctgtcgcccatgtgcatcggtgaggtggctcacgtcagcgcagagatcacctatacttccaagcactctgtggaggtccaggtccacgtgttgtcggagaacatcctcacaggtaccaaaaagctgaccaataaggccaccttgtggtatgtgcccctgtcattgaagaatgtggacaaggtccttgaggtgcctcctattgtgtatttacggcaggaacaggaggaggagggtcggaaacgctatgaagcccagaagctagaacgcatggagaccaagtggaggaacggagacattgtccagcccatcctgaacccagagccgaacacagtgagctacagccagtccagcctgatccacctggtggggccctcagactgcactcttcatggcttcgtgcacggaggtgtcaccatgaagctcatggatgaggtggccgggattgtggctgcgcgccactgcaagaccaatatagtgactgcctctgtggatgctattaatttccatgacaagatccggaaaggctgtgtcatcaccatctctggacgcatgaccttcacaagcaataagtctatggaaattgaggtcctggtggacgctgaccctgtggtggacaactcacagaagcgctaccgggctgccagtgccttcttcacctacgtgtccctgaatcaggagggcaagccgctgcctgtgcctcagcttgtgccggagacggaggacgagaagaagcgttttgaagaaggcaaaggccgctatctgcagatgaaggcgaagcgacagggccatacagagcctcagccctagatgtcttcctccctcccatcctgtcccgtcctgggtcagcacagttgtggcagtagtcctgtgtgcagtcacttagaagtcgcccccttggccaaaccccgatttcctttgagagctggtgttgtgaagtaccgtgtgacagtgttacctgtggcctgttcccaaaacctgtgcaccaaagctttatttatatccctccagtccctgtcccatgttgtcccaaaggccatcgtggacaccagagcacactgactggcctggagaagccagcaccactaataaagctgctgtctggctgg

SEQ ID NO: 1839 - protein, 338 aa, Rattus norvegicus
  ref <308>: DATABASE ACCESSION NUMBER: Refseq / NP_037346
  ref <309>: DATABASE ENTRY DATE: 2003-01-14
MSGPTTDTPAAIQICRIMRPDDANVAGNVHGGTILKMIEEAGVIISTRHCNSQNGERCVAALARVERTDFLSPMCIGEVAHVSAEITYTSKHSVEVQVHVLSENILTGTKKLTNKATLWYVPLSLKNVDKVLEVPPIVYLRQEQEEEGRKRYEAQKLERMETKWRNGDIVQPILNPEPNTVSYSQSSLIHLVGPSDCTLHGFVHGGVTMKLMDEVAGIVAARHCKTNIVTASVDAINFHDKIRKGCVITISGRMTFTSNKSMEIEVLVDADPVVDNSQKRYRAASAFFTYVSLNQEGKPLPVPQLVPETEDEKKRFEEGKGRYLQMKAKRQGHTEPQP

SEQ ID NO: 1840 - DNA, 1492 bp, Homo sapiens
  ref <308>: DATABASE ACCESSION NUMBER: Refseq / NM_007274
  ref <309>: DATABASE ENTRY DATE: 2000-11-02
tttttttttccagccaagcagcagctttattagtggtgctgggttcttcccataccctacagcgtgctcggaagcattccgcgccgggcctgccagacacctgcgcccttctgcagccgcccgccgcatccgccgccgcagcccccagcatgtcgggcccagacgtcgagacgccgtccgccatccagatctgccggatcatgcggccagatgatgccaacgtggccggcaatgtccacggggggaccatcctgaagatgatcgaggaggcaggcgccatcatcagcacccggcattgcaacagccagaacggggagcgctgtgtggcagccctggctcgtgtcgagcgcaccgacttcctgtctcccatgtgcatcggtgaggtggcgcatgtcagcgcggagatcacctacacctccaagcactctgtggaggtgcaggtcaacgtgatgtccgaaaacatcctcacaggtgccaaaaagctgaccaataaggccaccctgtggtatgtgcccctgtcgctgaagaatgtggacaaggtcctcgaggtgcctcctgttgtgtattcccggcaggagcaggaggaggagggccggaagcggtatgaagcccagaagctggagcgcatggagaccaagtggaggaacggggacatcgtccagccagtcctcaacccagagccgaacactgtcagctacagccagtccagcttgatccacctggtggggccttcagactgcaccctgcacggctttgtgcacggaggtgtgaccatgaagctcatggatgaggtcgccgggatcgtggctgcacgccactgcaagaccaacatcgtcacagcttccgtggacgccattaattttcatgacaagatcagaaaaggctgcgtcatcaccatctcgggacgcatgaccttcacgagcaataagtccatggagatcgaggtgttggtggacgccgaccctgttgtggacagctctcagaagcgctaccgggccgccagtgccttcttcacctacgtgtcgctgagccaggaaggcaggtcgctgcctgtgccccagctggtgcccgagaccgaggacgagaagaagcgctttgaggaaggcaaagggcggtacctgcagatgaaggcgacgatcagggccacgcggacgctcagccctagactccctcctcctgccactggtgcctcgagtagccatggcaacgggcccagtgtccagtcacttagaagttccccccttggccaaaaacccaattcacattgagagctggtgttgtctgaagttttcgtatcacagtgttaacctgtactctctcctgcaaacctacacaccaaagctttatttatatcattccagtatcaatgctacacagtgttgtcccgagcgccgggaggcgttgggcagaaaccctcgggaatgcttccgagcacgctgtagggtatgggaagaacccagcaccactaataaagctgctgcttggctggaaa

SEQ ID NO: 1841 - protein, 372 aa, Homo sapiens [sequence omitted]

SEQ ID NO: 1842 - DNA, 2025 bp, Rattus norvegicus
  ref <308>: DATABASE ACCESSION NUMBER: Refseq / NM_012656
  ref <309>: DATABASE ENTRY DATE: 2003-01-14
tctgctgcctgcccaactgcctgcctgcctgtgccgagagttcccagcaccatgagggcctggatcttctttctcctttgcctggccgggagggccctggcagcgcctcagacggaagctgcagaagagatggtggcggaggaaaccgtggtggaggagacagggttacctgtgggtgccaacccagtccaggtggaaatgggagagtttgaagaaggtgcagaggaaactgtcgaggaggtggtggctgaaaacccctgccagaaccatcattgcaaacatggcaaggtgtgtgagctggacgagagcaacacccccatgtgtgtgtgccaggaccccaccagctgcccagctcccattggcgagtttgaaaaggtgtgcagcaatgacaacaagaccttcgactcttcctgccacttctttgcgaccaagtgcaccctggagggcaccaagaagggccacaagctccacctggactacatcggaccatgcaaatacattgccccctgcctggattctgagctgaccgaattccctctgcgcatgcgtgactggctcaaaaacgtcctggtcaccttgtacgagagagatgagggcaacaacctcctcactgagaagcagaaactgcgtgtgaagaagatccacgagaacgagaagcgcctggaggctggagaccaccctgtggagctgctggcccgagactttgagaagaactacaacatgtacatcttccctgtccactggcagtttggccagctggatcagcacccgattgatgggtacctgtcccacacggagctggccccactgcgcgctcccctcattcccatggaacattgcaccactcgcttctttgagacctgtgacctagacaatgacaagtacattgccctggaggaatgggccggctgcttcggcatcaaggagcaggacatcaacaaggatctggtgatctaagttcaagcctcctgcagcagtcctggactctctccccctgatgtccccacccacttccactacccccttgtttaaaatgtttggatggttggctgttctgcctggggataaggtgctaacatagatttaactgaatacattaacggtgctaaaaaaaaacaaaaaacaaaaaaaacagaaagaaagaaaccagatcccaagtcacagcattttcccacgttactcgactctgaggccatagcctatccacagcctcctcgtcccctgcaccgcccagtgtctcactggctgtgttggaaacgggaattgcataagcttgccttcctcaagcaagaaatatctctagctttcatttccattttgactcttaacactcacccagactctgtgcttatttcatttgggggggggtgtgggcttcctggggtcttcccctggtagtttggaggtaggcagagggaagttacagacacagatacaaaacttgggcaaggacgctgtgaggccagtcagaaccagatggcaagtcttggtagcctaggtcaacgactgacagaataatccagagctctgatgcacaaaacagactcccagcagcccgggaccttgctgtctcctccactcttcaggcagtttctttccatgtttggctgttggttttaattttggtgagccaaggggaggcatgggcagaccaatacctcactagggattctcttactcaactgctatagggctttcaggctcttgctgggagctctaggcactgggctacaggaaagtgagactcaagaggaagacagagaaggttgtaacgtagagagagtgagtcataaagtttcaagcatgccccccccacctctccccaccctttgccagttgaaacttactaatcaagagaaacttccaagccaacggaaggaatggtcggatcccacaggctgagaatttgttcccctccaagcatttcatgaaaaagctgcttctcattaaccatgcgaactctcacagtgatgtgaagagcttgacagatctttcaaaataaaaagtaatgacttagaaatggcc

SEQ ID NO: 1843 - protein, 301 aa, Rattus norvegicus
  ref <308>: DATABASE ACCESSION NUMBER: Refseq / NP_036788
  ref <309>: DATABASE ENTRY DATE: 2003-01-14
MRAWIFFLLCLAGRALAAPQTEAAEEMVAEETVVEETGLPVGANPVQVEMGEFEEGAEETVEEVVAENPCQNHHCKHGKVCELDESNTPMCVCQDPTSCPAPIGEFEKVCSNDNKTFDSSCHFFATKCTLEGTKKGHKLHLDYIGPCKYIAPCLDSELTEFPLRMRDWLKNVLVTLYERDEGNNLLTEKQKLRVKKIHENEKRLEAGDHPVELLARDFEKNYNMYIFPVHWQFGQLDQHPIDGYLSHTELAPLRAPLIPMEHCTTRFFETCDLDNDKYIALEEWAGCFGIKEQDINKDLVI

SEQ ID NO: 1844 - DNA, 2133 bp, Homo sapiens
  ref <308>: DATABASE ACCESSION NUMBER: Refseq / NM_003118
  ref <309>: DATABASE ENTRY DATE: 2002-11-05
cgggagagcgcgctctgcctgccgcctgcctgcctgccactgagggttcccagcaccatgagggcctggatcttctttctcctttgcctggccgggagggccttggcagcccctcagcaagaagccctgcctgatgagacagaggtggtggaagaaactgtggcagaggtgactgaggtatctgtgggagctaatcctgtccaggtggaagtaggagaatttgatgatggtgcagaggaaaccgaagaggaggtggtggcggaaaatccctgccagaaccaccactgcaaacacggcaaggtgtgcgagctggatgagaacaacacccccatgtgcgtgtgccaggaccccaccagctgcccagcccccattggcgagtttgagaaggtgtgcagcaatgacaacaagaccttcgactcttcctgccacttctttgccacaaagtgcaccctggagggcaccaagaagggccacaagctccacctggactacatcgggccttgcaaatacatccccccttgcctggactctgagctgaccgaattccccctgcgcatgcgggactggctcaagaacgtcctggtcaccctgtatgagagggatgaggacaacaaccttctgactgagaagcagaagctgcgggtgaagaagatccatgagaatgagaagcgcctggaggcaggagaccaccccgtggagctgctggcccgggacttcgagaagaactataacatgtacatcttccctgtacactggcagttcggccagctggaccagcaccccattgacgggtacctctcccacaccgagctggctccactgcgtgctcccctcatccccatggagcattgcaccacccgctttttcgagacctgtgacctggacaatgacaagtacatcgccctggatgagtgggccggctgcttcggcatcaagcagaaggatatcgacaaggatcttgtgatctaaatccactccttccacagtaccggattctctctttaaccctccccttcgtgtttcccccaatgtttaaaatgtttggatggtttgttgttctgcctggagacaaggtgctaacatagatttaagtgaatacattaacggtgctaaaaatgaaaattctaacccaagacatgacattcttagctgtaacttaactattaaggccttttccacacgcattaatagtcccatttttctcttgccatttgtagctttgcccattgtcttattggcacatgggtggacacggatctgctgggctctgccttaaacacacattgcagcttcaacttttctctttagtgttctgtttgaaactaatacttaccgagtcagactttgtgttcatttcatttcagggtcttggctgcctgtgggcttccccaggtggcctggaggtgggcaaagggaagtaacagacacacgatgttgtcaaggatggttttgggactagaggctcagtggtgggagagatccctgcagaatccaccaaccagaacgtggtttgcctgaggctgtaactgagagaaagattctggggctgtcttatgaaaatatagacattctcacataagcccagttcatcaccatttcctcctttacctttcagtgcagtttcttttcacattaggctgttggttcaaacttttgggagcacggactgtcagttctctgggaagtggtcagcgcatcctgcagggcttctcctcctctgtcttttggagaaccagggctcttctcaggggctctagggactgccaggctgtttcagccaggaaggccaaaatcaagagtgagatgtagaaagttgtaaaatagaaaaagtggagttggtgaatcggttgttctttcctcacatttggatgattgtcataaggtttttagcatgttcctccttttcttcaccctcccctttgttcttctattaatcaagagaaacttcaaagttaatgggatggtcggatctcacaggctgagaactcgttcacctccaagcatttcatgaaaaagctgcttcttattaatcatacaaactctcaccatgatgtgaagagtttcacaaatctttcaaaataaaaagtaatgacttagaaactgaaaaaaaaaaaaaaaaaaaaaaaaaaaaaa

SEQ ID NO: 1845 - protein, 303 aa, Homo sapiens
  ref <308>: DATABASE ACCESSION NUMBER: Refseq / NP_003109
  ref <309>: DATABASE ENTRY DATE: 2002-11-05
MRAWIFFLLCLAGRALAAPQQEALPDETEVVEETVAEVTEVSVGANPVQVEVGEFDDGAEETEEEVVAENPCQNHHCKHGKVCELDENNTPMCVCQDPTSCPAPIGEFEKVCSNDNKTFDSSCHFFATKCTLEGTKKGHKLHLDYIGPCKYIPPCLDSELTEFPLRMRDWLKNVLVTLYERDEDNNLLTEKQKLRVKKIHENEKRLEAGDHPVELLARDFEKNYNMYIFPVHWQFGQLDQHPIDGYLSHTELAPLRAPLIPMEHCTTRFFETCDLDNDKYIALDEWAGCFGIKQKDIDKDLVI

SEQ ID NO: 1846 - DNA, 1475 bp, Rattus norvegicus
  ref <308>: DATABASE ACCESSION NUMBER: Refseq / NM_022533
  ref <309>: DATABASE ENTRY DATE: 2003-01-13
tgcccaaacaccagcacactaggggttcttcacgatctctatccagagcaaacaggcgaaccgagggttaaggggcggggcctcttcgaggggcggggcctcgggcggagcggggtcgggcttcgcgcacctgtaggttctgtctagggatccgctgtcgcagccccggagcagcgccgggagcgcgtcccgagcgtcgtaggctcgcgatcgctatggcggagttcccgtcgaaagtgagcaccaggaccagcagccccgcgcagggcgtgggagcatctgtgtctgcgatgcgaccggacctgggctttgtgcgctccgcccttggggtgctcgcgcttctgcagctggtgctggggctgctggtgtgggccttgattgctgacaccccataccacctgtatcctgcctacggctgggttatgtttgtagctgtcttcctctggctggtaacaattgtcttcttcatcatctacctgtttcaactgcacatgaagttgtatatggtgccctggccgttggtgttactggtcttctttgttgctgccaccgtcctctatatcaccgcctttgtcgcctgtgcggcggcggtcgatctgacatccctgaggggctcccgaccgtacaaccagcgctcggctgcctctttctttgcttgtctggtgatgattgcctacggactgagtgctttcttcagcttccaggcctggcgaggagtgggcagcaacgcggccacgagtcagatggctgggggctactcttaagccagctatgctgtgacctaagccacggctgggtcttagcacagggccacccccaaccttaccaggcttaagctctccaagcactcctgaggaacaggcccaagctggcacagatggacagccaagagccaggagcggggacatcctcctcacctcccttattcagcagaagatgatggggttggggggctcttgtggctttgccttgtcatcagagaacttcagtgtcccaggctgggccaccctgctcaccagcactaaatgcactaacagaccttcagcctctgatctgcctagtgtaaacctaacaagacaacacatgatctacgttccagaagctaagcccacccccaggctcttctggacccacctccccctcccctaccgcacgccaacccattgtcacctgtagagagacttttatagaagagttgggatttcgaggactggactatttcagttggtttcaatagtttccaagacagcaagcctcaccatgtcccctccctcacgtggaactctttctctcctttgggagagagcatccgtgcagggtgctccccccaggctgctgattagacacaggggacttccaaggagggagagagggaagcagggccttgcctggtgagttgtcaggaggttaatggcgactcttatttggaattattattttttacaatttaaataaaaatggatgtgtctgtttgg

SEQ ID NO: 1847 - protein, 182 aa, Rattus norvegicus
  ref <308>: DATABASE ACCESSION NUMBER: Refseq / NP_071978
  ref <309>: DATABASE ENTRY DATE: 2003-01-13
MAEFPSKVSTRTSSPAQGVGASVSAMRPDLGFVRSALGVLALLQLVLGLLVWALIADTPYHLYPAYGWVMFVAVFLWLVTIVFFIIYLFQLHMKLYMVPWPLVLLVFFVAATVLYITAFVACAAAVDLTSLRGSRPYNQRSAASFFACLVMIAYGLSAFFSFQAWRGVGSNAATSQMAGGYS

SEQ ID NO: 1848 - DNA, 438 bp, Rattus norvegicus
  misc_feature (1)..(438): n=a, c, g or t
  ref <308>: DATABASE ACCESSION NUMBER: EMBL / AA848546
  ref <309>: DATABASE ENTRY DATE: 2000-03-03
gaattgatccgggagttgaagagggctccaaaggtgggaagtgaagtccgtgcctcagttactggttgctgttcttttttgtgccccattctttatcgtatacacatacagaaggggagaaattgggcagtgaatgacgcttcctctgcattctagcgttgcttttcctgctctcgctggcctgtgactgaggatgacaatggaagagatgaagactgaagctgaggccgcgtccatggtttccatgcctctctacgcagtcatgtaccctgtgtttaacgagctacaacgagtaaatttgtctgcagctcagactctgagagccgctttcattaacgctgaaaaggaaaatccaggcctcacacaagacatcattatgaaaatcttagagaaaaaaagtgtagaagttaacttcactgagtcncttcttcgtatggc

SEQ ID NO: 1849 - DNA, 1212 bp, Homo sapiens
  ref <308>: DATABASE ACCESSION NUMBER: Refseq / NM_145860
  ref <309>: DATABASE ENTRY DATE: 2003-01-15
tgcaaggtgggaagtgaagtcagtgcctcagttgctgatcagtgtgttttttgtgtccaattcttttatcaccaaaaaagagaagaaatattgcagtgaatgaagattcctctgcattttagcactgctttttcaactgtagttggcttttgaatgaggatgacaatggaagagatgaagaatgaagctgagaccacatccatggtttctatgcccctctatgcagtcatgtatcctgtgtttaatgagctagaacgagtaaatctgtctgcagcccagacactgagagccgctttcatcaaggctgaaaaagaaaatccaggtctcacacaagacatcattatgaaaattttagagaaaaaaagcgtggaagttaacttcacggagtcccttcttcgtatggcagctgatgatgtagaagagtatatgattgaacgaccagagccagaattccaagacctaaacgaaaaggcacgagcacttaaacaaattctcagtaagatcccagatgagatcaatgacagagtgaggtttctgcagacaatcaaggatatagctagtgcaataaaagaacttcttgatacagtgaataatgtcttcaagaaatatcaataccagaaccgcagggcacttgaacaccaaaagaaagaatttgtaaagtactccaaaagtttcagtgatactctgaaaacgtattttaaagatggcaaggcaataaatgtgttcgtaagtgccaaccgactaattcatcaaaccaacttaatacttcagaccttcaaaactgtggcctgaaagttgtatatgttaagagatgtacttctcagtggcagtattgaactgcctttatctgtaaattttaaagtttgactgtataaattatcagtccctcctgaagggatctaatccaggatgttgaatgggattattgccatcttacaccatatttttgtaaaatgtagcttaatcataatctcacactgaagattttgcatcacttttgctattatcattcttttaagaattataagccaaaagaatttacgccttaatgtgtcattatataacattccttaaaagaattgtaaatattggtgtttgtttctgacattttaacttgaaagcgatatgctgcaagataatgtatttaacaatatttggtggcaaatattcaataaatagtttacatctgttaaaaaaaaaaaaaaaaaaaaa

SEQ ID NO: 1850 - protein, 212 aa, Homo sapiens
  ref <308>: DATABASE ACCESSION NUMBER: Refseq / NP_665859
  ref <309>: DATABASE ENTRY DATE: 2003-01-15
MRMTMEEMKNEAETTSMVSMPLYAVMYPVFNELERVNLSAAQTLRAAFIKAEKENPGLTQDIIMKILEKKSVEVNFTESLLRMAADDVEEYMIERPEPEFQDLNEKARALKQILSKIPDEINDRVRFLQTIKDIASAIKELLDTVNNVFKKYQYQNRRALEHQKKEFVKYSKSFSDTLKTYFKDGKAINVFVSANRLIHQTNLILQTFKTVA

SEQ ID NO: 1851 - DNA, 1817 bp, Rattus norvegicus
  ref <308>: DATABASE ACCESSION NUMBER: Refseq / NM_053737
  ref <309>: DATABASE ENTRY DATE: 2001-11-07
agagcagtcggtgacaggacagagcagtcggtgacgggacacagtggttggtgacgggacagagcggtcggtgacagcctcaagggcttcagcaccgcgcccatggcagagccagaccgactcagattcagactctgagggaggagccgctggtggagaagcagacatggacttcctgcggaacttattctcccagacgctcagcctgggcagccagaaggagcgtctgctggacgagctgaccttggaaggggtggcccggtacatgcagagcgaacgctgtcgcagagtcatctgtttggtgggagctggaatctccacatccgcaggcatccccgactttcgctctccatccaccggcctctatgacaacctagagaagtaccatcttccctacccagaggccatctttgagatcagctatttcaagaaacatccggaacccttcttcgccctcgccaaggaactctatcctgggcagttcaagccaaccatctgtcactacttcatgcgcctgctgaaggacaaggggctactcctgcgctgctacacgcagaacatagataccctggagcgaatagccgggctggaacaggaggacttggtggaggcgcacggcaccttctacacatcacactgcgtcagcgccagctgccggcacgaatacccgctaagctggatgaaagagaagatcttctctgaggtgacgcccaagtgtgaagactgtcagagcctggtgaagcctgatatcgtcttttttggtgagagcctcccagcgcgtttcttctcctgtatgcagtcagacttcctgaaggtggacctcctcctggtcatgggtacctccttgcaggtgcagccctttgcctccctcatcagcaaggcacccctctccacccctcgcctgctcatcaacaaggagaaagctggccagtcggaccctttcctggggatgattatgggcctcggaggaggcatggactttgactccaagaaggcctacagggacgtggcctggctgggtgaatgcgaccagggctgcctggcccttgctgagctccttggatggaagaaggagctggaggaccttgtccggagggagcacgccagcatagatgcccagtcgggggcgggggtccccaaccccagcacttcagcttcccccaagaagtccccgccacctgccaaggacgaggccaggacaacagagagggagaaaccccagtgacagctgcatctcccaggcgggatgccgagctcctcagggacagctgagccccaaccgggcctggccccctcttaaccagcagttcttgtctggggagctcagaacatcccccaatctcttacagctccctccccaaaactggggtcccagcaaccctggcccccaaccccagcaaatctctaacacctcctagaggccaaggcttaaacaggcatctctaccagccccactgtctctaaccactcctgggctaaggagtaacctccctcatctctaactgccccacggggccagggctaccccagaacttttaactcttccaggacagggagcttcgggcccccactctgtctcctgcccccgggggcctgtggctaagtaaaccatacctaacctaccccagtgtgggtgtgggcctctgaatataacccacacccagcgtagggggagtctgagccgggagggctcccgagtctctgccttcagctcccaaagtgggtggtgggcccccttcacgtgggacccacttcccatgctggatgggcagaagacattgcttattggagacaaattaaaaacaaaaacaactaac

SEQ ID NO: 1852 - protein, 352 aa, Rattus norvegicus
  ref <308>: DATABASE ACCESSION NUMBER: Refseq / NP_446189
  ref <309>: DATABASE ENTRY DATE: 2001-11-07
MDFLRNLFSQTLSLGSQKERLLDELTLEGVARYMQSERCRRVICLVGAGISTSAGIPDFRSPSTGLYDNLEKYHLPYPEAIFEISYFKKHPEPFFALAKELYPGQFKPTICHYFMRLLKDKGLLLRCYTQNIDTLERIAGLEQEDLVEAHGTFYTSHCVSASCRHEYPLSWMKEKIFSEVTPKCEDCQSLVKPDIVFFGESLPARFFSCMQSDFLKVDLLLVMGTSLQVQPFASLISKAPLSTPRLLINKEKAGQSDPFLGMIMGLGGGMDFDSKKAYRDVAWLGECDQGCLALAELLGWKKELEDLVRREHASIDAQSGAGVPNPSTSASPKKSPPPAKDEARTTEREKPQ

SEQ ID NO: 1853 - DNA, 4454 bp, Rattus norvegicus
  ref <308>: DATABASE ACCESSION NUMBER: Refseq / NM_031030
  ref <309>: DATABASE ENTRY DATE: 2001-04-11
gcgtcacggcgcgggcggaagatggccgggttggttgcccgcagctgctaacccggcagtgcggagctggagcctggctcccgctgccgcgaagcggccgtcgccatgtcgctgctgcagtctgcactggacttcctggcgggccctggttctcttggcggagctgccggccgtgaccagagtgacttcgtggggcagactgtggagctgggcgagctgcgtctgcgggtgcggcgggtcctggccgagggagggtttgcatttgtttatgaagctcaagatctgggaagtggcagagagtatgcattaaagagattactatccaatgaagaggaaaagaacagagccatcattcaggaagtatgtttcttgaaaaaactttctggccaccccaatattgtccagttctgctctgcagcatccataggaaaagaggaatcggacactgggcaggctgagttcctcctgcttacggagctctgtaaaggacagctggtggagtttctcaggagagttgaatgtaaaggccctctatcctgcgacagcattctgaagatcttctaccagacatgcagagcagtgcagcacatgcacaggcagaaaccacccatcatccacagggatctcaaggttgaaaacttactgcttagtaaccaggggaccattaagctgtgtgactttggcagtgccacaaccatctcccattatcctgactacagctggagcgcccagaagcgagcaatggtggaggaagagatcacgaggaacaccacacccatgtacagaacgccagaaattgtagacctgtattctaacttccctattggcgaaaagcaggatatctgggcactgggctgtatcttatacctgctgtgtttccggcagcatccttttgaagatggagcaaaacttcggatagtcaatgggaagtattccattcctgtgaatgacactcgttacacagtcttccatgaccttattcgtggcatgctaaaggtcaatccagaagagaggctatccattgctgaagttgtccgacaactgcaggaaattgcagcagcccggaatgtgaaccccaaagcccccatcacagaacttctggagcagaatggtggctatgggaactcagggccttcccgagcacaaccaccttctgggggccctgtgaacagcagtggagttttggctctggcagagtatgaccagccctatggtgggtttctcgatatcctacggggtgggacagaacggctcttcaccaacctcaaggatacttcctccaaggtcatccagtctgtggctaactatgcaaagggcgatcttgacatatcttacatcacatccaggattgcagtgatgtcgttcccagcagaaggtgtggagtcagcaatcaaaaacaatatagaggatgtacgattgtttctggatgccaagcatccaggacattatgctgtctacaacctttctccaagaatataccgggcttccaagttccacaatcgggtcactgagtgtggctgggcagtcaggcgggcaccacatctccacagtttgtatactctatgcaggagcatgcatgcctggctccgggaagaccacaggaacgtctgtgttgtacattgcatggatgggagagctgcgtctgctgtggcagtctgtgcattcctgtgcttctgccgtctcttcagcactgcagaggctgctgtgtacatgttcagcatgaagcgctgcccaccaggcatttggccatcccacaaaaggtacattgaatacgtgtgtgacatggtggcagaggaacccatcacgccccacagcaagccaatgctggtgaaatctgttgtcatgacccctgtgccactgttcagcaagcagaggaatggctgccgaccattctgtgaggtctatgttggggaggagcgtgtaaccaccacatcccaggagtatgacaggatgaaggaatttaaaattgaggatggcaaggctgtcatccccctgggcataacagttcaaggcgatgtcctcaccatcatttaccatgccagatccactttaggagggagactgcaggccaagatggcgtccatgaaaatgttccagattcagttccacactgggttcgtgcctcgaaacgcaaccactgtgaaatttgcaaagtatgacctggatgcttgtgacattcaagagaagtacccagatctgttccaggtgaacctggaagtggaggtggagcctagagacaggcccagccgagacgttccaccttgggagaataccagcctaagggggttaaaccccaagatcctcttttccaacagggaagagcaacaggacattctgtctaagtttgggaaaccagagctaccccggcagccgggctccacagctcagtatgatgctgaggcagggtctccagaggctgagatcacagagtcggactcaccacagagcagcagcacggacaccaaccactttcttcacacactggattggcaggaggaaaaagacccagagactggtgtagacaatacctctcctaaggagagtcagtctaacctgattgcagatggagatggaagtgaagtatcagatgaagaagaggcttcatgccctagtgaagagagaaagcctggggctggagaagatacaccaaggctggcagctgggaccagacagcaagacttaatatttgatgtgggcatgctggctgccccacaggagcctgtacagcctgaagaaggtgtcgatctcctggggctgcactctgaaggggacttaaggcctgctgctcccttgcaggctagcggggtccagtctagcaacactgacctgttgagctcccttcttgaaccatctgatgcttctcaagtgggacctcctggtgacctgcttggtggtgagactcctctgctgttagcaagcccagtttctcttcttggggtgcagagcaacctgcaaggaaaagtccctgacactgtggacccatttgaccagttcctgctgccatccagctcggacacccagccctgctccaagcctgatctctttggagagtttctcaactctgactctgtagcttcctcaactgccttcccatcgacccacagcgccccacccccatcctgcagcactgccttcctgcacctgggagatctgccagcagagcccaacaaggtgattgcttcatccagccacccagatctgctaggaggatgggatacgtgggctgagactgctctacctgggccggcctccatgccagtaccagaaggtactctcttctcttctgcaggtcacccagcccctccaggccccaaccccagccaaaccaagtctcagaacccagacccatttgctgacctcagtgatctcagctctagcctccaaggcttgcctgctggacttcctgcagggagcttcgttggcacatcagccaccactcacaaaagcaacagctcctggcagacaactcgtcccacagcccctggaacctcatggcccccgcaggccaagccagcccccagagcctctgaacaactaaggtctcactttagtgtgattggggcccgagaagagagaggtgtccgtgcgcccagctttgcccaaaagccaaaggtctcagaaaatgattttgaagatctgctgcctaatcaaggcttctctaagtctgacaagaaggggccaaagaccatggcagagatgcggaaacaggaacttgccagagatacagacccattcaaattgaagcttttggactggattgaaggcaaagagaggaatattcgtgcactgctgtccactctgcacacagtattgtgggatggggagagccgctggacacctgtgagtatggctgacctggtgactccagagcaggtgaagaagcagtaccgccgtgcagtgctggtagtgcatcctgataaggccacagggcagccatatgaacagtctgccaagatgatcttcatggagctgaatgatgcatggtctgagtttgaaaaccagggctcaaggcccctcttctgaggcctgtgatgactatggctgcaggagctgctcatgaatcctgaatgctgctggcctgactgaggcacaaatgggaccataacaggtgtggcaggtgatatcgccccaggggcctggaccatctactcccaatcatccctgcattcatcatggacaaataccattccatggctgggagagaaagcattcctcagatctgatatttgttgttttgtttttctttttcttgtcccagaggaaaagtgttgatttatattccttccacagctgtcacaatttgtgatttacttggtgtctggtggctgtcacctcttgaatggcacatgtcgctggcacttctctcctgtaatttcttcaaatatggggtgcatccacaccccactctgataagtttgccaatcatctgtacataattaaactattttccgatg

SEQ ID NO: 1854 - protein, 1305 aa, Rattus norvegicus
  ref <308>: DATABASE ACCESSION NUMBER: Refseq / NP_112292
  ref <309>: DATABASE ENTRY DATE: 2001-04-11
MSLLQSALDFLAGPGSLGGAAGRDQSDFVGQTVELGELRLRVRRVLAEGGFAFVYEAQDLGSGREYALKRLLSNEEEKNRAIIQEVCFLKKLSGHPNIVQFCSAASIGKEESDTGQAEFLLLTELCKGQLVEFLRRVECKGPLSCDSILKIFYQTCRAVQHMHRQKPPIIHRDLKVENLLLSNQGTIKLCDFGSATTISHYPDYSWSAQKRAMVEEEITRNTTPMYRTPEIVDLYSNFPIGEKQDIWALGCILYLLCFRQHPFEDGAKLRIVNGKYSIPVNDTRYTVFHDLIRGMLKVNPEERLSIAEVVRQLQEIAAARNVNPKAPITELLEQNGGYGNSGPSRAQPPSGGPVNSSGVLALAEYDQPYGGFLDILRGGTERLFTNLKDTSSKVIQSVANYAKGDLDISYITSRIAVMSFPAEGVESAIKNNIEDVRLFLDAKHPGHYAVYNLSPRIYRASKFHNRVTECGWAVRRAPHLHSLYTLCRSMHAWLREDHRNVCVVHCMDGRAASAVAVCAFLCFCRLFSTAEAAVYMFSMKRCPPGIWPSHKRYIEYVCDMVAEEPITPHSKPMLVKSVVMTPVPLFSKQRNGCRPFCEVYVGEERVTTTSQEYDRMKEFKIEDGKAVIPLGITVQGDVLTIIYHARSTLGGRLQAKMASMKMFQIQFHTGFVPRNATTVKFAKYDLDACDIQEKYPDLFQVNLEVEVEPRDRPSRDVPPWENTSLRGLNPKILFSNREEQQDILSKFGKPELPRQPGSTAQYDAEAGSPEAEITESDSPQSSSTDTNHFLHTLDWQEEKDPETGVDNTSPKESQSNLIADGDGSEVSDEEEASCPSEERKPGAGEDTPRLAAGTRQQDLIFDVGMLAAPQEPVQPEEGVDLLGLHSEGDLRPAAPLQASGVQSSNTDLLSSLLEPSDASQVGPPGDLLGGETPLLLASPVSLLGVQSNLQGKVPDTVDPFDQFLLPSSSDTQPCSKPDLFGEFLNSDSVASSTAFPSTHSAPPPSCSTAFLHLGDLPAEPNKVIASSSHPDLLGGWDTWAETALPGPASMPVPEGTLFSSAGHPAPPGPNPSQTKSQNPDPFADLSDLSSSLQGLPAGLPAGSFVGTSATTHKSNSSWQTTRPTAPGTSWPPQAKPAPRASEQLRSHFSVIGAREERGVRAPSFAQKPKVSENDFEDLLPNQGFSKSDKKGPKTMAEMRKQELARDTDPFKLKLLDWIEGKERNIRALLSTLHTVLWDGESRWTPVSMADLVTPEQVKKQYRRAVLVVHPDKATGQPYEQSAKMIFMELNDAWSEFENQGSRPLF

SEQ ID NO: 1855 - DNA, 388 bp, Homo sapiens
  ref <308>: DATABASE ACCESSION NUMBER: EMBL / BI015039
  ref <309>: DATABASE ENTRY DATE: 2001-06-16
cagcatttctgccgtgctgtagaatcagcacatgctgggatggcaccacagggaggccaaggagggagtgtcaggaagcagtcagggctgaaggccttttcatacacggggaggtgaccacttgggggcccgacagtcagggctggcagcccgggaggactgttagacactggggtggacactgctgcaagcacaggggctttcgggtggccggaaagctttttcatgaagcaaacttcttgaatgatggctctgttcttttcctcctcattggataatagcctctttaatgcatactctctgccactccccacatcttgagcttcatacacaaatgcaaaccctccttcggccaggaccctgctgtacccgtaaccgtatcacccgt

SEQ ID NO: 1856 - DNA, 570 bp, Rattus norvegicus
  ref <308>: DATABASE ACCESSION NUMBER: Refseq / NM_013015
  ref <309>: DATABASE ENTRY DATE: 2003-01-14
atggctgctcttccaatgctgtggaccgggctggtcctcttgggtctcttgggatttccacagaccccagcccagggccatgacacagtgcagcccaactttcaacaagacaagttcctggggcgctggtacagcgcgggcctcgcctccaattcaagctggttccgggagaagaaagagctactgtttatgtgccagacagtggtagctccctccacagaaggcggcctcaacctcacctctaccttcctaaggaaaaaccagtgtgagaccaaggtgatggtactgcagccggcaggggttcccggacagtacacctacaacagcccccactggggcagcttccactccctctcagtggtagaaaccgactacgatgagtacgcgttcctgttcagcaagggcaccaagggcccaggccaggacttccgcatggccaccctctacagcagagcccagcttctgaaggaggaactgaaggagaaattcatcacctttagcaaggaccagggcctcacagaggaggacattgttttcctgccccaaccggataagtgcattcaagagtaa

SEQ ID NO: 1857 - protein, 189 aa, Rattus norvegicus
  ref <308>: DATABASE ACCESSION NUMBER: Refseq / NP_037147
  ref <309>: DATABASE ENTRY DATE: 2003-01-14
MAALPMLWTGLVLLGLLGFPQTPAQGHDTVQPNFQQDKFLGRWYSAGLASNSSWFREKKELLFMCQTVVAPSTEGGLNLTSTFLRKNQCETKVMVLQPAGVPGQYTYNSPHWGSFHSLSVVETDYDEYAFLFSKGTKGPGQDFRMATLYSRAQLLKEELKEKFITFSKDQGLTEEDIVFLPQPDKCIQE

SEQ ID NO: 1858 - DNA, 6469 bp, Rattus norvegicus
  ref <308>: DATABASE ACCESSION NUMBER: Refseq / NM_019140
  ref <309>: DATABASE ENTRY DATE: 2003-01-14
cggcccgccaggcagctccggccgtgcgcgcacgccgagccgccggagcccgggccgacccgtgccggagcagcatgcggagcccgcagccgctgctcctctggacacctcagcctgaggcctctccgtgagttacggggacaccatcccccaccagggcggaggctggaggccactgccaagcatggcgcccacctggagacccagcgtggtgtctgtggtgggtcctgtggggctcttccttgtactgctggccagagggtgcttggctgaagagccacccagatttatcagagagcccaaggatcagattggtgtgtcaggaggcgtggcctccttcgtgtgccaggccacaggtgaccctaagccacgggtgacctggaacaagaagggcaagaaagtgaactcacagcgctttgagaccattgactttgacgagagctcgggggccgtgctgaggatccagccacttcggacaccccgggatgagaacgtgtacgagtgtgtggcccagaactcggtgggggagatcacagttcatgcgaagctcaccgtcctgcgagaggaccagctgcctcctggcttccccaacattgacatgggcccccagttgaaggttgtagagcgcacacgcacagccaccatgctctgtgctgccagcggaaaccctgaccctgagatcacctggttcaaggacttcctgcctgtggaccccagtgccagcaatgggcggatcaagcagcttcggtcaggtgccctgcagattgagagcagcgaggagacagaccagggcaagtacgagtgtgtggccaccaacagcgctggggtgcgctactcatcacctgccaacctctacgtgcgagtccgccgtgtggccccccgcttctccatcctgcccatgagccacgagatcatgcccggtgggaatgtgaatatcacttgtgtggctgtgggctcacccatgccctacgtgaagtggatgcagggggcagaggacctgacgcctgaggatgacatgcccgtgggtcggaatgtcctcgaactcacggatgtcaaagactcagccaactatacttgtgtggccatgtccagcctgggagtgatcgaggccgttgctcagatcactgtaaaatctctccccaaagcccctgggactcccgtggtgacggagaacactgctaccagtatcactgtcacatgggactcaggcaatcctgaccctgtgtcctactacgtaattgagtataaatccaaaagccaggatgggccgtatcagatcaaagaagacatcaccaccacgcgctacagcatcggcggcctgagccccaactctgagtatgagatctgggtgtcagctgtcaactccatcggccagggcccccccagtgagtcggtggtgacccgcacaggcgagcaggcaccagccagtgctcccaggaatgttcaggcgcgcatgctcagtgccaccaccatgattgtgcagtgggaggagcccgtggagcccaatggcctgatccgtggctaccgcgtctactacaccatggagcccgagcatccggtgggcaactggcagaagcacaatgtggacgacagtcttctgaccactgtgggcagcctgctagaggatgagacctacactgtgagagtgctcgccttcacatcggtgggcgatgggccactgtcagaccccatccaggtcaagacccagcagggagtgcccggccagcccatgaacttgcgggctgaggccaagtcagagaccagcattgggctctcgtggagtgcaccacggcaggagagtgtcattaagtatgaactgctcttccgggagggcgaccgaggccgagaggtggggcgaaccttcgacccaaccacagcctttgtggtggaggacctcaagcccaatacggagtacgcgttccggctggcggctcgctcgccgcagggcctgggcgccttcaccgcggttgtgtgccagcgcacactgcaggccaaaccgtcagccccccctcaagacgttaagtgcaccagcttgcgctccacggccatattgatccttctggaagctttggagaaatggacggagtaccgtgtcaccgccgtggcttacacagaggtgggaccagggcccgagagctcgcccgtggtcgtccgcaccgatgaggacgtgcccagcgcgcccccgcggaaggtggaggcggaggcgctcaacgccacggctatccgagtgctgtggcgctcgcccacgcccggcaggcagcacgggcagatccgcggctaccaggtccactatgtgcgcatggagggcaccgaggcccgcgggccaccgcgcatcaaggacatcatgctggcggatgcccaggaaatggtgatcacaaacctccagcctgagactgcttactctatcacagtagccgcgtataccatgaaaggcgatggcgctcgcagcaaaccgaaggtggtggtgaccaagggagcagtgctgggccgccccaccctgtcggtgcagcagacccccgagggcagcctgctggcgcgctgggagccccccgcggacgcggctgaggacccagtgcttggctaccgcctgcagtttgggcgcgaagacgcggccccggccacgttggaactggcggcgtgggagcggcggttcgcggcgcctgcacacaagggcgccacctatgtgtttcggctggcggcgcggggccgcgcggggctgggcgaggaggcctcggcggcgctgagcatccctgaggacgctccgcgtggcttcccgcagatcctgggccccgcgggcaacgtgtccgcgggctccgtaatactgcgctggctgccacccgtgcccgccgagggcaacggcgccatcatcaagtacacggtgtccgtgcgggaggccggcaccccagggcccgcgacagagaccgaactggcggcggcggcccagccgggggccgagacagcgctcacactacaggggctgcggccggagacggcctacgagctgcgcgtgcgcgcgcacacgcgtcggggccccggccccttctcacccccgctgcgatacaggcttgcgcgggacccagtctcccccaagaacttcaaggtgaagatgatcatgaaaacttcagtgctgctaagctgggagttccctgacaactataactcacccacgccctacaagatccagtacaatggactcacactggacgtggatggccgcactaccaagaagctgatcacgcacctcaagccacacaccttctataacttcgtgctcaccaaccgtggcagcagcctgggaggcctgcagcagacggtcaccgccaggaccgccttcaacatgctcagtggcaagcctagtgtcgccccaaagcctgacaacgatggttccattgtggtctacctgcctgatggccagagtcccgtgacagtgcagaactacttcattgtgatggtcccacttcggaagtctcgtggtggccagttccctatcctactaggtagtccagaggacatggatctggaggagctcatccaggacctctcccggctgcagaggcgcagcctgcgccactcaagacagctggaggtgcctcggccttacatcgccgctcggttctccatcctgccagctgtcttccatcctgggaaccagaagcaatatggtggctttgacaacaggggcttggagccaggccaccgttatgtcctctttgtacttgctgtgctgcagaagaatgagcctacatttgcagccagtcccttctcagaccccttccaactggacaacccagacccgcagcccattgtggatggcgaggagggcctcatctgggtgatcgggcccgtgctggccgtggtcttcatcatctgcatcgtaattgccatcctgctgtacaagaacaagcctgacagcaaacgcaaggactcagagccccgcaccaaatgcttattgaacaatgcagacctcgccccccatcaccccaaggaccctgtggaaatgcgacgtatcaacttccagacgccaggtatgctcagccacccgcccattcccatcacagacatggctgaacacatggagagactcaaagccaacgacagcctcaagctctcccaggagtatgagtccatcgaccctggccagcagttcacttgggaacattcgaacctggaggccaacaagccaaagaaccgatacgccaatgtcatcgcctatgaccattcacgagtcatcctgcagcctttagaaggcatcatgggtagtgattacatcaatgccaactatgtggacggctatcggcggcagaacgcatacatcgccacgcaggggcccctgcctgagacctttggggacttctggcggatggtgtgggagcagcggtcagccactgtggtcatgatgacacggctggaggagaaatcacgggtcaaatgtgaccagtactggcctaaccgaggcaccgagacatacggcttcatccaggtcaccctactagatactatggagctggccaccttctgtgtcaggaccttttctctacacaagaatggctctagtgagaagcgtgaggtacgacattttcagttcacagcatggcctgaccacggggtacccgagtaccccacacccttcctggcgtttctgcgcagagtcaagacctgcaacccgcctgacgctggcccagttgtggtccactgcagcgcgggtgtggggcgtactggctgcttcattgtaattgatgccatgttggagcgcatcagaacagagaagacggtggatgtgtacggacacgtgacactcatgcggtcacagcgcaactacatggtgcagacagaggatcagtatagcttcatccacgaggcactgctggaggctgtgggctgtggcaataccgaggtccccgcgcgcagcctctacacctatatccagaagctggcccaggtggagcctggcgagcatgtcacaggaatggagcttgagttcaagaggcttgccagctccaaggcacacacttcgagattcatcactgccagcctgccttgcaacaagtttaagaaccgcctggtgaacatcctgccgtacgagagctcgcgtgtctgcctgcagcccattcgtggtgtcgagggctctgactacatcaatgccagcttcatcgacggctacagacagcagaaagcctacattgcaacgcagggtccactggcagagaccacagaggacttctggcgtgccctgtgggagaacaactccactattgtggtaatgctcaccaagctccgcgagatgggccgggagaagtgccaccagtactggccagctgaacgctctgcccgctaccagtactttgtggttgacccgatggcagagtataacatgccacagtacattctgcgtgagtttaaggtcacagatgcccgggatggccagtcccggaccgtccgacagttccagttcacggactggccagagcagggtgcacccaagtcaggggaaggcttcattgacttcatcggccaagtgcataagaccaaggagcagtttggccaggatggccccatctcggtgcactgtagtgctggagtgggcaggaccggagtattcatcactctgagcatcgtgctggagcgaatgcgctacgagggggtggtggacattttccagacagtgaaggtgcttcggacccagcggcctgccatggtgcagacagaggatgagtaccagttctgcttccaggcggcgttggaatacctgggcagctttgatcattatgcaacataagccatggccccgcccaacacctcgacccagctccaagtgccctgaatgtgagcccagccctcggtgctgggtgggaggcggcccagggaggaaacctcctctccctggagacaggcactgccttctgaagggcacattcctcattcccttctgactccaaaacgaggttccagggtggggggtagggtggagagtagaggagccactgctcccatagctggggtcacaagggacagaactctgctcccacacttccctgcctgcggaattccgaaaacaattctatttccaaagctacagaagagcacacagtctgacttgtaggtgggtgactgatgagaatgctgttatggtatcagacgtgtagtgtattgctaggaataagcctgtgaggatttgtactatgaggcatactcctagtagagaaccgaagtttcatcatgatgagatgtttgatgtggggtggggtgttgagggggttttttttgttcaagccaaaggtaactttattgattcatgaatctggaaagttcaagtacaggttttattccagaaaagaactgattctgagcacagtgtagtcagtgctccatcactctgggttgcccaaaaaaaagacttgcacaatgattccagttgacatgcaacatggacagaaacatttcacaaagccacacccatatatgaaggagg

SEQ ID NO: 1859 - protein, 1863 aa, Rattus norvegicus
  ref <308>: DATABASE ACCESSION NUMBER: Refseq / NP_062013
  ref <309>: DATABASE ENTRY DATE: 2003-01-14
MAPTWRPSVVSVVGPVGLFLVLLARGCLAEEPPRFIREPKDQIGVSGGVASFVCQATGDPKPRVTWNKKGKKVNSQRFETIDFDESSGAVLRIQPLRTPRDENVYECVAQNSVGEITVHAKLTVLREDQLPPGFPNIDMGPQLKVVERTRTATMLCAASGNPDPEITWFKDFLPVDPSASNGRIKQLRSGALQIESSEETDQGKYECVATNSAGVRYSSPANLYVRVRRVAPRFSILPMSHEIMPGGNVNITCVAVGSPMPYVKWMQGAEDLTPEDDMPVGRNVLELTDVKDSANYTCVAMSSLGVIEAVAQITVKSLPKAPGTPVVTENTATSITVTWDSGNPDPVSYYVIEYKSKSQDGPYQIKEDITTTRYSIGGLSPNSEYEIWVSAVNSIGQGPPSESVVTRTGEQAPASAPRNVQARMLSATTMIVQWEEPVEPNGLIRGYRVYYTMEPEHPVGNWQKHNVDDSLLTTVGSLLEDETYTVRVLAFTSVGDGPLSDPIQVKTQQGVPGQPMNLRAEAKSETSIGLSWSAPRQESVIKYELLFREGDRGREVGRTFDPTTAFVVEDLKPNTEYAFRLAARSPQGLGAFTAVVCQRTLQAKPSAPPQDVKCTSLRSTAILILLEALEKWTEYRVTAVAYTEVGPGPESSPVVVRTDEDVPSAPPRKVEAEALNATAIRVLWRSPTPGRQHGQIRGYQVHYVRMEGTEARGPPRIKDIMLADAQEMVITNLQPETAYSITVAAYTMKGDGARSKPKVVVTKGAVLGRPTLSVQQTPEGSLLARWEPPADAAEDPVLGYRLQFGREDAAPATLELAAWERRFAAPAHKGATYVFRLAARGRAGLGEEASAALSIPEDAPRGFPQILGPAGNVSAGSVILRWLPPVPAEGNGAIIKYTVSVREAGTPGPATETELAAAAQPGAETALTLQGLRPETAYELRVRAHTRRGPGPFSPPLRYRLARDPVSPKNFKVKMIMKTSVLLSWEFPDNYNSPTPYKIQYNGLTLDVDGRTTKKLITHLKPHTFYNFVLTNRGSSLGGLQQTVTARTAFNMLSGKPSVAPKPDNDGSIVVYLPDGQSPVTVQNYFIVMVPLRKSRGGQFPILLGSPEDMDLEELIQDLSRLQRRSLRHSRQLEVPRPYIAARFSILPAVFHPGNQKQYGGFDNRGLEPGHRYVLFVLAVLQKNEPTFAASPFSDPFQLDNPDPQPIVDGEEGLIWVIGPVLAVVFIICIVIAILLYKNKPDSKRKDSEPRTKCLLNNADLAPHHPKDPVEMRRINFQTPGMLSHPPIPITDMAEHMERLKANDSLKLSQEYESIDPGQQFTWEHSNLEANKPKNRYANVIAYDHSRVILQPLEGIMGSDYINANYVDGYRRQNAYIATQGPLPETFGDFWRMVWEQRSATVVMMTRLEEKSRVKCDQYWPNRGTETYGFIQVTLLDTMELATFCVRTFSLHKNGSSEKREVRHFQFTAWPDHGVPEYPTPFLAFLRRVKTCNPPDAGPVVVHCSAGVGRTGCFIVIDAMLERIRTEKTVDVYGHVTLMRSQRNYMVQTEDQYSFIHEALLEAVGCGNTEVPARSLYTYIQKLAQVEPGEHVTGMELEFKRLASSKAHTSRFITASLPCNKFKNRLVNILPYESSRVCLQPIRGVEGSDYINASFIDGYRQQKAYIATQGPLAETTEDFWRALWENNSTIVVMLTKLREMGREKCHQYWPAERSARYQYFVVDPMAEYNMPQYILREFKVTDARDGQSRTVRQFQFTDWPEQGAPKSGEGFIDFIGQVHKTKEQFGQDGPISVHCSAGVGRTGVFITLSIVLERMRYEGVVDIFQTVKVLRTQRPAMVQTEDEYQFCFQAALEYLGSFDHYAT

SEQ ID NO: 1860 - DNA, 811 bp, Rattus norvegicus
  ref <308>: DATABASE ACCESSION NUMBER: Refseq / NM_022674
  ref <309>: DATABASE ENTRY DATE: 2003-01-13
gccttttctctgccttgcttgcttgagctccagcacagtccgagatggctggcggtaaggctggaaaggactccggaaaggccaagacaaaggcggtttcccgctcccagcgagcgggcttgcagttccctgtgggccgtattcatcgacacctgaaatctaggacaacaagccacggacgtgtgggcgcgaccgcagctgtgtacagcgcagccatcctggagtacctcaccgcagaggtacttgagttggcaggaaatgcatcaaaagacttgaaggtaaagcgtattacccctcgtcacttgcaacttgctatccgcggagatgaagagttggactctctgatcaaggctacgattgctggtggtggtgtcatcccacacatccacaaatcactgattgggaagaaaggacaacagaagactgtctaaggatgcctggattccttgttatctcaggactctaaatactcttaacagctgtccagtgttggtgattccagtggactgtatctctgtgaaaaacacaattttgcctttttgtaattctatttgagcaagttggaagtttaattagctttccaaccaaccaaatttctgcattcgagtcttaaccatatttaagtgttactgtggcttcaaagaagctattgaatctgaagtggtgggttttgattgagttgactgtttttaaaaaactgtttggattttaattgtgatgcagaagttatagtaacaaacatttggttttgtacagacattatttccactctggtggataagctcaataaaggtcagatcccaaactaaaa

SEQ ID NO: 1861 - protein, 128 aa, Rattus norvegicus
  ref <308>: DATABASE ACCESSION NUMBER: Refseq / NP_073165
  ref <309>: DATABASE ENTRY DATE: 2003-01-13
MAGGKAGKDSGKAKTKAVSRSQRAGLQFPVGRIHRHLKSRTTSHGRVGATAAVYSAAILEYLTAEVLELAGNASKDLKVKRITPRHLQLAIRGDEELDSLIKATIAGGGVIPHIHKSLIGKKGQQKTV

SEQ ID NO: 1862 - DNA, 873 bp, Homo sapiens
  ref <308>: DATABASE ACCESSION NUMBER: Refseq / NM_002106
  ref <309>: DATABASE ENTRY DATE: 2002-04-29
cgcagtttgaatcgcggtgcgacgaaggagtaggtggtgggatctcaccgtgggtccgattagccttttctctgccttgcttgcttgagcttcagcggaattcgaaatggctggcggtaaggctggaaaggactccggaaaggccaagacaaaggcggtttcccgctcgcagagagccggcttgcagttcccagtgggccgtattcatcgacacctaaaatctaggacgaccagtcatggacgtgtgggcgcgactgccgctgtgtacagcgcagccatcctggagtacctcaccgcagaggtacttgaactggcaggaaatgcatcaaaagacttaaaggtaaagcgtattacccctcgtcacttgcaacttgctattcgtggagatgaagaattggattctctcatcaaggctacaattgctggtggtggtgtcattccacacatccacaaatctctgattgggaagaaaggacaacagaagactgtctaaaggatgcctggattccttgttatctcaggactctaaatactctaacagctgtccagtgttggtgattccagtggactgtatctctgtgaaaaacacaattttgcctttttgtaattctatttgagcaagttggaagtttaattagctttccaaccaaccaaatttctgcattcgagtcttaaccatatttaagtgttactgtggcttcaaagaagctattgattctgaagtagtgggttttgattgagttgactgtttttaaaaaactgtttggattttaattgtgatgcagaagttatagtaacaaacatttggttttgtacagacattatttccactctggtggataagttcaataaaggtcatatcccaaactaaaa

SEQ ID NO: 1863 - protein, 128 aa, Homo sapiens; identical to SEQ ID NO: 1861
  ref <308>: DATABASE ACCESSION NUMBER: Refseq / NP_002097
  ref <309>: DATABASE ENTRY DATE: 2002-04-29

SEQ ID NO: 1864 - DNA, 3876 bp, Rattus norvegicus; identical to SEQ ID NO: 487
  ref <308>: DATABASE ACCESSION NUMBER: Refseq / NM_031604
  ref <309>: DATABASE ENTRY DATE: 2003-01-13

SEQ ID NO: 1865 - protein, 838 aa, Rattus norvegicus; identical to SEQ ID NO: 488
  ref <308>: DATABASE ACCESSION NUMBER: Refseq / NP_113792
  ref <309>: DATABASE ENTRY DATE: 2003-01-13

SEQ ID NO: 1866 - DNA, 4139 bp, Homo sapiens; identical to SEQ ID NO: 489
  ref <308>: DATABASE ACCESSION NUMBER: Refseq / NM_005177
  ref <309>: DATABASE ENTRY DATE: 2002-05-28

SEQ ID NO: 1867 - protein, 831 aa, Homo sapiens; identical to SEQ ID NO: 490
  ref <308>: DATABASE ACCESSION NUMBER: Refseq / NP_005168
  ref <309>: DATABASE ENTRY DATE: 2002-05-28

SEQ ID NO: 1868 - DNA, 2063 bp, Rattus norvegicus
  ref <308>: DATABASE ACCESSION NUMBER: Refseq / NM_017173
  ref <309>: DATABASE ENTRY DATE: 2003-01-14
agcggacgctgtctgaggagtagagcctgcctgagagcgagtgtcccgtcggtcccggagcagcccagcccggcccagccctcacaggtcctctgtggtgcacacagcccacctcccagccatgcgctctctccttctgggcaccttatgcctcctggctgtggccctggcagccgaggtgaagaaacctgtagaggccgcagcccctggtactgcggagaagctgagttccaaggcgaccacactggcagagcgcagcacaggcctggccttcagcctgtatcaggcaatggccaaagatcaggcggtggagaatatcctcctgtcacccttggtggtggcctcatccctgggccttgtgtcactgggtggtaaagccaccacagcttcgcaggcgaaggcagtgttgagcgctgagaagctgcgggatgaggaggtgcacacggggctgggcgagctcgtgcgctccctcagtaactccactgcgcgcaatgtgacctggaaactgggcagccgcctgtacgggcccagctccgtgagcttcgccgatgacttcgtgcgcagcagtaagcaacactacaactgtgaacactccaagatcaacttccgagacaagcgcagcgcgctgcagtccatcaacgagtgggcctcgcagaccaccgacggcaagctgccagaggtcaccaaggatgtggagcgcacggatggggcactgctcgttaatgccatgttctttaagccgcactgggatgagaagttccaccataagatggtagacaaccgtggcttcatggtgacccgctcctacactgtgggtgttacgatgatgcaccggacaggcctctacaactactatgacgacgagaaggagaagctgcagctggtggagatgcccttggcccataagctctccagcctcatcatcctcatgccccaccacgtagaaccgctcgagcgcctggagaagttgctgaccaaggagcaactaaagacctggatggggaagatgcagaagaaggctgttgccatctccctgcccaagggagtggtggaggtgacccatgacctgcagaaacatctggccggactgggcctgactgaggccatcgacaagaacaaggcagacttatcgcgcatgtctggcaagaaggatctgtacctggccagtgtgttccacgccactgccttcgagtgggacacagagggcaacccctttgaccaggacatctacgggcgtgaggagctgcgcagccccaagctgttctatgccgaccaccccttcatcttcctggtgcgagataatcagagcggctccttgctgttcattggccgcctggtccggcccaagggagacaagatgcgagacgagttgtagagtccaagagtggtcgtggcgtggcatggcgggaagtagccagaggttcctgagacacatgggtgctattgtggggggagggggaggcaccaaccctggatagtccacgggtgggggggggttggcagtgcagatcggaattcccataggtctgagtaggtatttttagacaagagtccactccgttagacatggagcccagacactatgagaccaaattcaggggtgtcacagccattctagccctgccccacaagttttatatccaatctagcctcaacagtcaatcagtgttcatattcgtggccaagcattctgtctgtgagacaatcgagttgggtgggggtagggcggcctagcctctctgtcaccatgccctgagccctcggttttcctgttcacctctgattccctttaaccacaaaactaggagcctgtggtcccagaactgcccacccttaaaatcgattctttgccgcagcagtgggagttggggagaccatgcataggagggctccttggcatatccggccctagagccattacattacattgacaactcaactttgcttctgttttctccctttttgagtttttcaaggaatgggggtttggggaaggggaagcctttattgctttcaaaacaagaacagtttgtcaattttttttgaataaaccttttccaatg

SEQ ID NO: 1869 - protein, 417 aa, Rattus norvegicus
  ref <308>: DATABASE ACCESSION NUMBER: Refseq / NP_058869
  ref <309>: DATABASE ENTRY DATE: 2003-01-14
MRSLLLGTLCLLAVALAAEVKKPVEAAAPGTAEKLSSKATTLAERSTGLAFSLYQAMAKDQAVENILLSPLVVASSLGLVSLGGKATTASQAKAVLSAEKLRDEEVHTGLGELVRSLSNSTARNVTWKLGSRLYGPSSVSFADDFVRSSKQHYNCEHSKINFRDKRSALQSINEWASQTTDGKLPEVTKDVERTDGALLVNAMFFKPHWDEKFHHKMVDNRGFMVTRSYTVGVTMMHRTGLYNYYDDEKEKLQLVEMPLAHKLSSLIILMPHHVEPLERLEKLLTKEQLKTWMGKMQKKAVAISLPKGVVEVTHDLQKHLAGLGLTEAIDKNKADLSRMSGKKDLYLASVFHATAFEWDTEGNPFDQDIYGREELRSPKLFYADHPFIFLVRDNQSGSLLFIGRLVRPKGDKMRDEL

SEQ ID NO: 1870 - DNA, 551 bp, Rattus norvegicus
  ref <308>: DATABASE ACCESSION NUMBER: EMBL / AA859920
  ref <309>: DATABASE ENTRY DATE: 2000-03-03
gcactctgacagggtttaattgaattggacttggaggaagttcctgctgttaataaaatttacattgaagaaactttttttggaggtgatagttctttttgtgagattttaatattaagctcttagaatgtgaatacattctatagccaatcttcctgaaatttttaactactggaaatccttaaccaactatattttcttcattttgaaaaagatttggttgctttttcttagatggtttgtgctattttctgtaatcatagttcatctaaacacagcctattttcttgaacattaaagtttataacttacagatctcctcttcagtaaccttacagactagcgcagtcttcccttccttctgtaggaggtagctgttgccaaagtgcagaggtagctggctcttgtctaatgggaaaatgctgtgtggagcttcaggggtcagtctttcttgtgacatctgtcagtccccaagtggttctattctcctctagaagtctgaaatatgtaatctgaaatccttaataaaattggatctaattttataaaat

SEQ ID NO: 1871 - DNA, 498 bp, Rattus norvegicus
  ref <308>: DATABASE ACCESSION NUMBER: EMBL / AA891935
  ref <309>: DATABASE ENTRY DATE: 2000-03-03
tcaaacggggccccaatggcagggatgcccactcataagaggctatttctttccacccatgacccttcaattccttttatctattgccatgcactagagggcaggtctgtgggtgacatggaggtttgcaagaccttgtgttcctcttctcatgctgtgctgctgtgatttgatttttatgatccctaggcataagacttaagttttggccatgaagttaggatgaacaaagggctgccatctgccccaatttagaacaataccaccatcaaggtgtctctgtgccccttgctgggatttgtaatctttctaatatggggcctaaaattaaatgtgaaaattggtatactatatactacattggatcaaatctacattttagcaaaagttaagcattccaaaataatgtctaatttatcattgaataaaagtttgaagtgaagatgatctattcttatgatttacctgtgaccagctccatactgaagggcaattagt

SEQ ID NO: 1872 - DNA, 2646 bp, Homo sapiens
  ref <308>: DATABASE ACCESSION NUMBER: Refseq / NM_001415
  ref <309>: DATABASE ENTRY DATE: 2002-11-05
tttccttcctcttttggcaacatggcgggcggagaagctggagtgactctagggcagccgcatctttcgcgtcaggatctcaccaccttggatgttaccaagttgacgccactttcacacgaagttatcagcagacaagccacaattaacataggtacaattggtcatgtagctcatgggaaatccacagtcgtcaaagctatttctggagttcatactgtcaggttcaaaaatgaactagaaagaaatattacaatcaagcttggatatgctaatgctaagatttataagcttgatgacccaagttgccctcggccagaatgttatagatcttgtgggagcagtacacctgacgagtttcctacggacattccagggaccaaagggaacttcaaattagtcagacatgtttcctttgttgactgtcctggccacgatattttgatggctactatgctgaacggtgcagcagtgatggatgcagctcttctgttgatagctggtaatgaatcttgccctcagcctcagacatcggaacacctggctgctatagagatcatgaaactgaagcatattttgattctacaaaataaaattgatttggtaaaagaaagtcaggctaaagaacaatacgagcagatccttgcatttgtccaaggtacagtagcagagggagctcccattattccaatttcagctcagctgaaatacaatattgaagttgtttgtgagtacatagtaaagaaaattccagtacccccaagagactttacttcagagccccggcttattgttattagatcttttgatgtcaacaaacctggctgtgaagttgatgaccttaagggaggtgtagctggtggtagtatcctaaaaggagtattaaaggtgggccaggagatagaagtaagacctggtattgtttccaaagatagtgaaggaaaactcatgtgtaaaccaatcttttccaaaattgtatcactttttgcggagcataatgatctgcaatatgctgctccaggcggtcttattggagttggaacaaaaattgaccccactttgtgccgggctgacagaatggtggggcaagtacttggtgcagtcggagctttacctgagatattcacagaattggaaatttcctatttcctgcttagacggcttctaggtgtacgcactgaaggagacaagaaagcagcaaaggttcaaaagctgtctaagaatgaagtgctcatggtgaacataggatccctgtcaacaggagggagagttagtgctgtcaaggccgatttgggtaaaattgttttgaccaatccagtgtgcacagaggtaggagaaaaaattgcccttagccgaagagttgaaaaacactggcgtttaattggttggggtcagataagaagaggagtgacaatcaagccaacagtagatgatgactgaagaataccagttaaataatacattcggatggatttggaagttggaattcctcttaacaaccaaggggtttattttcaaagcaatattggggaattgatttcacagttcgttaccttagtaggtaacggtaaggttattctctttttttttttttttggttatgaaaacttagggactaaaattaatataaaaattggcataatgttggattgaatctacattttggcagaagttaaacattcccacataatgtcaaaattatacatcatgcagttctgtttttttgtttgtttaattttgttttgtttttgagtctggctctgtcacccaggctggagtgcagtggcgtgatctgcaacctctgccccccgggttcaagcgattctcctgcctcagcctcccgagtagctgagattacaggtgcgcgccaccacacttggctaatttttgtattattagtagagacggggtttcagcatgttggctaggccggtctctcctgacctcagggtgatcagcccacctcggcctcacaaagtgctgggattacaggcgtgagccaccttgcccagcccacatcatacagtttgaaatgaaactttgccacaaccagcctttgctgtagcacacacatatatcactgaacctgtttgaaataaagttttttttctttttcatgattcgtctttgagtacctccaggctgaaagactgttgtaccagtaaaaacttaaaggcacaaattctccttgaagaccttctcccttttatgtggccccatattttatgttgctttatctttgaaattttgcatgaaaaggaaatgaatggattcgaatgaaattgtcctttagagcatgattacttgttcccatggacaaatatttttctccccttgctcttcctggcctgaaacacgggaaaccagagtcaaaagttatctccctctccctgtgatgccttgagatttttttctgcgttgtttaatgcctgaaatccaagtcttcctccatgggaaaatactgttataccaaataattctagatgagtaacaaagatctttttaggccttcattttatgttttttcttaactgttatattatgattgtgacatagattatactactactaatttttggatgtttcaaaaggtcaagaagtaaaagatgttagaaagcaaaaaaaaaaaaaaaaaaaaaaaaaaaa

SEQ ID NO: 1873 - protein, 472 aa, Homo sapiens
  ref <308>: DATABASE ACCESSION NUMBER: Refseq / NP_001406
  ref <309>: DATABASE ENTRY DATE: 2002-11-05
MAGGEAGVTLGQPHLSRQDLTTLDVTKLTPLSHEVISRQATINIGTIGHVAHGKSTVVKAISGVHTVRFKNELERNITIKLGYANAKIYKLDDPSCPRPECYRSCGSSTPDEFPTDIPGTKGNFKLVRHVSFVDCPGHDILMATMLNGAAVMDAALLLIAGNESCPQPQTSEHLAAIEIMKLKHILILQNKIDLVKESQAKEQYEQILAFVQGTVAEGAPIIPISAQLKYNIEVVCEYIVKKIPVPPRDFTSEPRLIVIRSFDVNKPGCEVDDLKGGVAGGSILKGVLKVGQEIEVRPGIVSKDSEGKLMCKPIFSKIVSLFAEHNDLQYAAPGGLIGVGTKIDPTLCRADRMVGQVLGAVGALPEIFTELEISYFLLRRLLGVRTEGDKKAAKVQKLSKNEVLMVNIGSLSTGGRVSAVKADLGKIVLTNPVCTEVGEKIALSRRVEKHWRLIGWGQIRRGVTIKPTVDDD

SEQ ID NO: 1874 - DNA, 460 bp, Rattus norvegicus
  ref <308>: DATABASE ACCESSION NUMBER: EMBL / AA892422
  ref <309>: DATABASE ENTRY DATE: 2000-03-03
tgaaggcagctgctgggattgagaagggggcccggcaaacagggaaagaggtggcaggtctgttgagtttgaagcacgtatacgagattgcccgtgtcaaagctaaggatgaggcttttgccatgcaagatgtacccctgtcttctattgtccgttccatcattggctctgcccgctccctgggcattcgtgtggtgaaggacctcagtgtagacgaactggcagcttttcagaaggaacgggccgtggttttggctgctcagaaagaggcggatttggcagctcaggcagaagctgccaaaaagtgaccccaaccttctacactctgaagtgagagactgagaagggggcccaccgaggaagctgagccaaaggactccatggcaacccgatttatagtttcctgacttctgtacatatgctgtgccacaggatcgagcctgaataaacgtcctttgtc

SEQ ID NO: 1875 - DNA, 3513 bp, Rattus norvegicus
  ref <308>: DATABASE ACCESSION NUMBER: Refseq / NM_031969
  ref <309>: DATABASE ENTRY DATE: 2002-11-05
gtgcagccaccctcgcctgcctcgctcttccttccttcgctcgcaccatggctgatcagctgactgaagaacagattgctgaattcaaggaagctttctccctatttgataaagatggggacggcaccatcacaacaaaggagctggggactgtcatgcggtcactgggtcagaacccaacagaggctgaactgcaggatatgatcaacgaggtggatgccgacgggaatggcaccattgacttcccagagttcttgactatgatggctagaaaaatgaaagacacagatagcgaagaagaaatccgtgaggcattccgagtctttgacaaggatggcaatggctacatcagtgcggcagaactgcgccacgtcatgacaaacctcggggaaaagctaacagatgaagaagtagacgaaatgatcagagaagcagatattgatggagacggacaggtcaactatgaagaattcgtacagatgatgactgcaaaatgaagacctactttcaactactttccccctctagaagaatcaaattgaaatcttttacttacctcttacaaaaaaaaaaaagaaaaaagaaaaaagttcatttcttcattctgtttgtatctagcaaaactgaatgtcaaaagtaccttctgtccacacacaaaatctgcatgtattggttggtggtcctgccccctaaagatcaagccccctacatgagttttacagtataaatactcgtactaccttataaggaagcacttagtggactccttcaagttccatttgctaatgattaacacactgtctgggctggccagtttctcatgcatgcagcttggtgattgagcacagtcaggcctttgtattaaaactgaaaaatggaaaaaacaaattcaaactctcagatggcttctagttcaatctgttcagataaatgtcagcagccagtttaccgcaaacaaacatttaaaattggtttacctcaggatgatgtgcaggaaacgggtgaaggctaaactttgagacacagccctagatgtaggacagtcctcttcaagtgccccaatcccatggtgacagtgacaccctggtggcgagcccgagtgtgatggttcaccgctgtgcacattgcattggagtgaagtgaacaaggctgtcaccaaatcacacacgttttaataagaaatgtttactaagggagcatctttggactctctgttttaaaaccttgtgaaccatgactcggagccagcagagtaggctgtgtctgtggacttgagcacaccatcaacattgctgttcaggaaattataatttacgtccattccaagttgtaaatgctagtcttttattttttttttccaataaaaagaccattaacttaaaagtggtgttaaatggtttgtaaagctgagcttggaagggggacaaggccgttggaggggaggtcagcggacatagaaacacccaacgtccagtacaagctggatttcccgcccaggttctctagcatcaacccctgaaaccagacagattctttgtcatctacgaccatgtaagtctagttattcaaatctgcgcgcatgcgcaaatcatggtgaattgatacttggagtagagccctagtgaaggaaggcctcaagcattcagtaaggatgtcttggctgtgctgctgctgacctgttgaagtacatgaggccatctgtgcaggagacatgatttagtgtgtgtgtaatcctatactcactgtgtatggtgaagcaggccagtcaaagacactacctttgattcagtttaatttatggttatacttaactttagccttttttattatttaagttcactgctttttctccccctaagtagagttaatgcttaacactgtcttgaaagcaaaacaatatcccagaatgaattttgtgtcttaattacgaacctgtaaccaaaacgtacatgtgctggtactggtcccttagcccaaggcactgggctatttaaaaagtcccccttaagaagtgtgttgcatttaaaacaagggccttgtacatttttcagggtgttaactggctgtatctgattaataaggagtgttggcttccaaattcgggggtggcagggagctggcaggcttgtagcaaggcaatgagaagcccttggcaaccacacgggtgcactcggggtaacctacagacccctggttgctccttctcctgctccctgtctttctggcgttttgtagctccttagaattttttttctttctgccaggaggataggtcagagcagtagagaggaagacattgcctgagcgcttctgctcatctttggactgggtggttggcagacaggtcgatgggtggtaaattgacttcagtatcggactcagtaggtattcccttttggtagagaggactgagggctccaggtgtgaagtgaatggccgtggatatgttgtgtaagaggattaagtcgcccagtcgatgacccagtctcaggcttgtggtctgttacctcttggtagtttcaaagggggtcggaggtggctttttaaaaacaatttaccccctatctttaaccatttaccaagtctgtagaagctgggtagacaatattttagcagctccgtagcctgtcctaaaaggttaccttctaaacaggattcttgtgtggccagggatcctgcatgggaactggaaacccctaacccccggggggtgggaagcaggagtttggaactgtaggaggcagagtccccccacctcctcagccttctggcatccaggggcacaagcagcccagggcttggtgttggcagtctgagttcgtgaggtagaaagagtggggtgtcaaggcagtacccctgaagttggatagtactttcctgtaaactgtccctcacttataactactctataaatatatgcatatatttatataaatatatatatataagtgactggttagctggcatcctgctttagcctgagacttgccctaagaaactgctgagcccttggtaaacgtctacacagtaagtttttctgtctgttggggggagctgttgaacaaggcagacatcttgatagttcagatgggctttaatgtactgttgccagggaaggctttttctggttttttgacaaatttttagcacacttcaattggtgtctcgagcaactttaacacattgaagatgaggtattgtacatatttttatattctctttataagtgcatgtctccaacttgtaaccaatattgtacggaatggctgtccagtaggcctagtgtttctgtcacacgagagggatagcatgtaccattcacccctcagcatcctgggagcttcttcttgaatgaagactgtaaatttggtcaagtcaactcttagttcggtttccttaccatttgaatgattgactgtgtgtcctgcgtgtatttctcttttggcagcgaccagagttacactgatgtgtctcaaccgacccactcggctggcaaccacctatttattttct

SEQ ID NO: 1876 - protein, 149 aa, Rattus norvegicus [sequence omitted]

SEQ ID NO: 1877 - DNA, 110 bp, Homo sapiens
  ref <308>: DATABASE ACCESSION NUMBER: EMBL / AI802286
  ref <309>: DATABASE ENTRY DATE: 2000-03-04
agagatgaaaggctgcagaaatgtttattgaatacagtgccaggtttataaataaaacgtatttacaatttccatagagttggtcccccatcagagaggtggttaaatct

SEQ ID NO: 1878 - DNA, 547 bp, Rattus norvegicus
  ref <308>: DATABASE ACCESSION NUMBER: EMBL / AA892520
  ref <309>: DATABASE ENTRY DATE: 2000-03-03
tgccaaaaatctgtgtatgtgccaggggtcgggggtagggagtagctctaacctctggggatcaattgtttttactgtggtctggggcctggcctatctctgtcagtggtggagaatgaagaggcagtatactggatcagcccgagttctgggagacactgctgggtctcattctgggaccgaagtgaaactccaagcacattccctttgctatctaggaggctcctgccttcccagagctctgttgttcagccccaaactctgtttacactggtgggggagaaggagctcgggtaggggaattactgggctggttaaaaggacaggggcttctggagccaaagtggggacctttgaggctaggtgggggtcacctgctgcttctgagcttggattagagagagctgttactccagccactgtcagaaggagtgtgaggggagggacccagcctctctcttgtctaattgaggcctccatgtaggaagtgtgatttttgcttttgtgtcccccaccccattaccacagctgcctttgtgtctgtgtc

SEQ ID NO: 1879 - DNA, 647 bp, Rattus norvegicus
  ref <308>: DATABASE ACCESSION NUMBER: EMBL / AA892557
  ref <309>: DATABASE ENTRY DATE: 2000-03-03
tccccacctttaaaggtgtctgcctgcaatagtgccatcctgagacctagcttctaactcgcaggtgcttagggacattgtactctgtggtaggcgcctctctgcccgtgtgtggcttgttcgtgattgacagtcactctggcctgctgtgttagtgtcccacagcgggggactctgccgggccacttcaggctttccttttaggaagataatttggtcacttgtgtctgtggccactcttagaactttctcttttgggggaacctgtggctggttgacttctggattcgatggagagagatgatattaaagactgtggcaacaaacaccctgcagaagcactggaaccagagactgtcagcacagtagggacaatgtcttttctagtagctgtggcagatttgagttcctgtaatttatacaaattgtttagaatggtttttaagacttagaagggaaatatacttacagcacaagacttttataattatactttaaattatgctttatgtgggacaggaaaaatgtatttttacattgcttatatcagatcacttttgtatttgttgatttaaagcctgtgggtctttttttatcactcttaatatcaacttttataatcttttaaaataaatcctcttaattcc

SEQ ID NO: 1880 - DNA, 1904 bp, Homo sapiens
  ref <308>: DATABASE ACCESSION NUMBER: Refseq / NM_017801
  ref <309>: DATABASE ENTRY DATE: 2002-10-18
gagaaggcccaggaagtgacggccgcctcccggctaccggggacttctggagtccgagaagtcaacggcgcggttgctgcggccgccgcgctccccggcccgaggcgatggagaacggagcggtgtacagccccactacggaggaggacccgggccccgccagaggcccccggagcggcctcgctgcctactttttcatgggccggctcccattgctccggcgcgttctcaagggcttgcagctgttgctgtctctgctggccttcatctgtgaagaagttgtatcacaatgtactttatgtggaggactttatttttttgagtttgtaagctgcagtgcctttcttctgagtctccttatactgattgtgtattgcactccattttatgagagagttgataccacaaaagtaaaatcatcggatttttatattactttgggaacaggatgtgtgtttttgttggcatccatcatttttgtttccacacatgacaggacttcagctgagattgctgcaattgtgtttggatttatagcaagttttatgttcctacttgactttatcactatgctgtatgaaaaacgacaggagtcccagctgagaaaacctgaaaataccactagggctgaagccctcactgagccacttaatgcctaaagactctggggagcagatgttacctaaggtagtgaccctgcattgtggtgcctgagccctggcagaagctcttgtaaaatttgttaattgtttaaaccacttcttttggagagcaaggggaaggtcaagaaggcagttttatcaatattgtgtcagtcaccacaaagtaggccagataagttaaaaaaaatttttttttaaataataattgaaacttatctcaaatggagattttggtgggaggaggagaaaacaattgtttttaaatcacacagctcaacggttgataaatgattctgtcattctgttacaggtcattcttttactaggcttagcttccaaattatgctttatagctgtataaacatcgtgattatattcatctacttagaaattgttttatttttaaattaatttgcttagctgtttgttttgatgcttagattatgttctgttaatgggaatttaacatatttaagaaaccaatatttaaaatgttggtctaggtttttttccttaacatatattaccaggctttactgtatttcactcagccttaaatgttataatatttttggataacggttattaattctttgagaccttcgtatagcctataaaatgtatgggagatgttggtattttatgtgtataaaagcaacaatatcagcaacttcgtgtttatactgcaccttggttgttgatgtcaagtaaaaaaaagattgttttgtaacacataaaaaaatggaagaaactgataccacacctaaggaccaaagataagaaagactttttgcccaagacagtgaaagtaattataaaaacaagctttgaccacttaccaagtatctgaagagatgagttcatactatgatttagaaagtggttcgattcccctgttggcatatgattatttttactaaaattaatacagctctgtgggtcttccttagtgttttctttgaagccaatctgttttttttaggacaccagcctttggtttttcatctgttcgagatgcctcttctctgtctccttatcagatagaaatggagtcatgtgctgctgcttcatctagcagaggttggcctctggctctgacactttttgtcagttgtctttaggtggtcctgaatcttgggcccttttgattgtgaatactgtgtagcaggatcttgagagtccttgttcttacataggcattgctctagtttgtctttggcaaaaaaaaaaaaaaaaaaaaaa

SEQ ID NO: 1881 - protein, 183 aa, Homo sapiens
  ref <308>: DATABASE ACCESSION NUMBER: Refseq / NP_060271
  ref <309>: DATABASE ENTRY DATE: 2002-10-18
MENGAVYSPTTEEDPGPARGPRSGLAAYFFMGRLPLLRRVLKGLQLLLSLLAFICEEVVSQCTLCGGLYFFEFVSCSAFLLSLLILIVYCTPFYERVDTTKVKSSDFYITLGTGCVFLLASIIFVSTHDRTSAEIAAIVFGFIASFMFLLDFITMLYEKRQESQLRKPENTTRAEALTEPLNA

SEQ ID NO: 1882 - DNA, 554 bp, Rattus norvegicus
  ref <308>: DATABASE ACCESSION NUMBER: EMBL / AA892921
  ref <309>: DATABASE ENTRY DATE: 2000-03-03
cagtgagttcagagagctctggactgtgctgagtggctggagacaacacttcatcagcttcgacagtgataggagtgggacagtggatccccaggagctgcagaaggccctaaccactatggggttcaggttgagcccccaaaccgtgaattcagtagcaaagcggtacagcaccagcgggaagatcacctttgatgactacatagcctgctgtgtcaaactgagggctctcacagatagcttccgcagacgggattctggtcaacaaggagttgtgaatttctcgtacgatgatttcatccagtgtgtcatgactgtctaactcaagaggccgctgtctgaatatattcaacattccaactggagcccacctattgcttcctcctgcccttcagtgctgtgtgcagactctgccgacacacgctccttgacaactgttgaatgggattatgcctttatctagaaccaaggcttcatttttaattttgataataaattcctttgaagtttaatagtaaaaaaaaaaaaaaaaaaaaaaaatgtttggcggccgg

SEQ ID NO: 1883 - DNA, 929 bp, Homo sapiens
  ref <308>: DATABASE ACCESSION NUMBER: Refseq / NM_006432
  ref <309>: DATABASE ENTRY DATE: 2002-04-15
ggcacgaggacaggtcgcctgactgggctcctccccgggcccgccccgacaggtttgtcttgtgaccgcgggcggccgctgcttctttcccgagcttggaacttcgttatccgcgatgcgtttcctggcagctacattcctgctcctggcgctcagcaccgctgcccaggccgaaccggtgcagttcaaggactgcggttctgtggatggagttataaaggaagtgaatgtgagcccatgccccacccaaccctgccagctgagcaaaggacagtcttacagcgtcaatgtcaccttcaccagcaatattcagtctaaaagcagcaaggccgtggtgcatggcatcctgatgggcgtcccagttccctttcccattcctgagcctgatggttgtaagagtggaattaactgccctatccaaaaagacaagacctatagctacctgaataaactaccagtgaaaagcgaatatccctctataaaactggtggtggagtggcaacttcaggatgacaaaaaccaaagtctcttctgctgggaaatcccagtacagatcgtttctcatctctaagtgcctcattgagttcggtgcatctggccaatgagtctgctgagactcttgacagcacctccagctctgctgcttcaacaacagtgacttgctctccaatggtatccagtgattcgttgaagaggaggtgctctgtagcagaaactgagctccgggtggctggttctcagtggttgtctcatgtctctttttctgtcttaggtggtttcattaaatgcagcacttggttagcagatgtttaattttttttttaacaacattaacttgtggcctctttctacacctggaaatttactcttgaataaataaaaactcgtttgtcttgtcaaaaaaaaaaaaaaaaaaaaaaaaaaaaaaa

SEQ ID NO: 1884 - protein, 151 aa, Homo sapiens
  ref <308>: DATABASE ACCESSION NUMBER: Refseq / NP_006423
  ref <309>: DATABASE ENTRY DATE: 2002-04-15
MRFLAATFLLLALSTAAQAEPVQFKDCGSVDGVIKEVNVSPCPTQPCQLSKGQSYSVNVTFTSNIQSKSSKAVVHGILMGVPVPFPIPEPDGCKSGINCPIQKDKTYSYLNKLPVKSEYPSIKLVVEWQLQDDKNQSLFCWEIPVQIVSHL

SEQ ID NO: 1885 - DNA, 560 bp, Rattus norvegicus
  ref <308>: DATABASE ACCESSION NUMBER: EMBL / AA894200
  ref <309>: DATABASE ENTRY DATE: 2000-03-03
gctggggagctaactgccccattctgctgctgaaacaccacagtcctttttccacccctgctggacagcttggagagcttggaggtacctcaccccaaactgccgctcctcctgccggcggctgacagtgactgtaggtgtagctgagaacctttctgcctctgctgtgttcttgctatttagagtggggtgggggctaacagctagtgggaggggaaccagggacagagagaactggtcactcatggtggctgttttggatactgaccccaaggttggctgctatgggcacgttccctcatgccaccttcatggtcttgtggtctcctggcccatgggtacccctccccagccctgtgcttggctgactccaccccatctctttacagagcttgtccggatggtgctgaatggctgaggacatttacgtgtctcgagcctgctccttgcccagtgtgagattcctgtgtggccccagaggctccctaatcacagcaccttgcctgtctggtttcttttggatgatgtttgccttcaccaaataaaacttgctctctgtg

SEQ ID NO: 1886 - DNA, 717 bp, Homo sapiens
  ref <308>: DATABASE ACCESSION NUMBER: Refseq / NM_079425
  ref <309>: DATABASE ENTRY DATE: 2003-01-15
attactgcaggaaaaggtcccggagagctgagcagtcaagatgtgtgacttcaccgaagaccagaccgcagatctgatcccaagcactgagttcaaggaggccttccagctgtttgaccgaacaggtgatggcaagatcctgtacagccagtgtggggatgtgatgagggccctgggccagaaccctaccaacgccgaggtgctcaaggtcctggggaaccccaagagtgatgagatgaatgtgaaggtgctggactttgagcactttctgcccatgctgcagacagtggccaagaacaaggaccagggcacctatgaggattatgtcgaaggacttcgggtgtttgacaaggaaggaaatggcaccgtcatgggtgctgaaatccggcatgttcttgtcacactgggtgagaagatgacagaggaagaagtagagatgctggtggcagggcatgaggacagcaatggttgtatcaactatgaagcgtttgtgaggcatatcctgtcggggtgacgggcccatggggcgagctcgtccgcatggtgctgaatggctgaggaccttcccagtctccccagagtccgtgcctttccctgtgtgaattttgtatctagcctaaagtttccctaggctttcttgtctcagcaactttcccatcttgtctctcttggatgatgtttgccgtcagcattcaccaaataaacttgctctctggg

SEQ ID NO: 1887 - protein, 157 aa, Homo sapiens
  ref <308>: DATABASE ACCESSION NUMBER: Refseq / NP_524149
  ref <309>: DATABASE ENTRY DATE: 2003-01-15
MCDFTEDQTADLIPSTEFKEAFQLFDRTGDGKILYSQCGDVMRALGQNPTNAEVLKVLGNPKSDEMNVKVLDFEHFLPMLQTVAKNKDQGTYEDYVEGLRVFDKEGNGTVMGAEIRHVLVTLGEKMTEEEVEMLVAGHEDSNGCINYEAFVRHILSG

SEQ ID NO: 1888 - DNA, 787 bp, Rattus norvegicus; identical to SEQ ID NO: 48
  ref <308>: DATABASE ACCESSION NUMBER: Refseq / NM_031970
  ref <309>: DATABASE ENTRY DATE: 2002-11-05

SEQ ID NO: 1889 - protein, 205 aa, Rattus norvegicus; identical to SEQ ID NO: 49
  ref <308>: DATABASE ACCESSION NUMBER: Refseq / NP_114176
  ref <309>: DATABASE ENTRY DATE: 2002-11-05

SEQ ID NO: 1890 - DNA, 3132 bp, Rattus norvegicus; identical to SEQ ID NO: 1279
  ref <308>: DATABASE ACCESSION NUMBER: Refseq / NM_031020
  ref <309>: DATABASE ENTRY DATE: 2003-01-13

SEQ ID NO: 1891 - protein, 360 aa, Rattus norvegicus; identical to SEQ ID NO: 1280
  ref <308>: DATABASE ACCESSION NUMBER: Refseq / NP_112282
  ref <309>: DATABASE ENTRY DATE: 2003-01-13

SEQ ID NO: 1892 - DNA, 3679 bp, Homo sapiens; identical to SEQ ID NO: 1281
  ref <308>: DATABASE ACCESSION NUMBER: Refseq / NM_139014
  ref <309>: DATABASE ENTRY DATE: 2002-05-20

SEQ ID NO: 1893 - protein, 307 aa, Homo sapiens; identical to SEQ ID NO: 1282
  ref <308>: DATABASE ACCESSION NUMBER: Refseq / NP_620583
  ref <309>: DATABASE ENTRY DATE: 2002-05-20

SEQ ID NO: 1894 - DNA, 469 bp, Rattus norvegicus
  ref <308>: DATABASE ACCESSION NUMBER: EMBL / AI177919
  ref <309>: DATABASE ENTRY DATE: 1999-01-22
tgctctggagaatgtgctcttcttcccttcacagaacaaggaatcagtgatgtagaatcagaaagagccgatggtggcaggtgtctcctggggaggagcttgtcaatgctatgtttgtcttcccattgtgcaagcatccattgcatgagacagacagtctgcaatgagaacgcaacttaggtgcagatgggaaactcgaagttctgatgcctcctttcagaggaagggaggagcatggagtgcagtgtgtgctgagggagctcctgagctgagggccggcctgcagccctcctgctgcgcatcctcctgctgcgcatccagaccccgtgtagaaaagctcagtgcatctctttttgttctcctatggcagcagcccttgaagatttgagttggttaatgtatcttcaggttaaaacggccctggttcatttattctgcatttgttcaataaatatttaattgaattcgt

SEQ ID NO: 1895 - DNA, 1655 bp, Homo sapiens
  ref <308>: DATABASE ACCESSION NUMBER: Refseq / NM_000106
  ref <309>: DATABASE ENTRY DATE: 2001-05-15
gctgagagtgtcctgcctggtcctctgtgcctggtggggtgggggtgccaggtgtgtccagaggagcccatttggtagtgaggcaggtatggggctagaagcactggtgcccctggccgtgatagtggccatcttcctgctcctggtggacctgatgcaccggcgccaacgctgggctgcacgctacccaccaggccccctgccactgcccgggctgggcaacctgctgcatgtggacttccagaacacaccatactgcttcgaccagttgcggcgccgcttcggggacgtgttcagcctgcagctggcctggacgccggtggtcgtgctcaatgggctggcggccgtgcgcgaggcgctggtgacccacggcgaggacaccgccgaccgcccgcctgtgcccatcacccagatcctgggtttcgggccgcgttcccaaggggtgttcctggcgcgctatgggcccgcgtggcgcgagcagaggcgcttctccgtgtccaccttgcgcaacttgggcctgggcaagaagtcgctggagcagtgggtgaccgaggaggccgcctgcctttgtgccgccttcgccaaccactccggacgcccctttcgccccaacggtctcttggacaaagccgtgagcaacgtgatcgcctccctcacctgcgggcgccgcttcgagtacgacgaccctcgcttcctcaggctgctggacctagctcaggagggactgaaggaggagtcgggctttctgcgcgaggtgctgaatgctgtccccgtcctcctgcatatcccagcgctggctggcaaggtcctacgcttccaaaaggctttcctgacccagctggatgagctgctaactgagcacaggatgacctgggacccagcccagcccccccgagacctgactgaggccttcctggcagagatggagaaggccaaggggaaccctgagagcagcttcaatgatgagaacctgcgcatagtggtggctgacctgttctctgccgggatggtgaccacctcgaccacgctggcctggggcctcctgctcatgatcctacatccggatgtgcagcgccgtgtccaacaggagatcgacgacgtgatagggcaggtgcggcgaccagagatgggtgaccaggctcacatgccctacaccactgccgtgattcatgaggtgcagcgctttggggacatcgtccccctgggtatgacccatatgacatcccgtgacatcgaagtacagggcttccgcatccctaagggaacgacactcatcaccaacctgtcatcggtgctgaaggatgaggccgtctgggagaagcccttccgcttccaccccgaacacttcctggatgcccagggccactttgtgaagccggaggccttcctgcctttctcagcaggccgccgtgcatgcctcggggagcccctggcccgcatggagctcttcctcttcttcacctccctgctgcagcacttcagcttctcggtgcccactggacagccccggcccagccaccatggtgtctttgctttcctggtgagcccatccccctatgagctttgtgctgtgccccgctagaatggggtacctagtccccagcctgctcctagcccagaggctctaatgtacaataaagcaatgtggtagttcc

SEQ ID NO: 1896 - protein, 497 aa, Homo sapiens
  ref <308>: DATABASE ACCESSION NUMBER: Refseq / NP_000097
  ref <309>: DATABASE ENTRY DATE: 2001-05-15
MGLEALVPLAVIVAIFLLLVDLMHRRQRWAARYPPGPLPLPGLGNLLHVDFQNTPYCFDQLRRRFGDVFSLQLAWTPVVVLNGLAAVREALVTHGEDTADRPPVPITQILGFGPRSQGVFLARYGPAWREQRRFSVSTLRNLGLGKKSLEQWVTEEAACLCAAFANHSGRPFRPNGLLDKAVSNVIASLTCGRRFEYDDPRFLRLLDLAQEGLKEESGFLREVLNAVPVLLHIPALAGKVLRFQKAFLTQLDELLTEHRMTWDPAQPPRDLTEAFLAEMEKAKGNPESSFNDENLRIVVADLFSAGMVTTSTTLAWGLLLMILHPDVQRRVQQEIDDVIGQVRRPEMGDQAHMPYTTAVIHEVQRFGDIVPLGMTHMTSRDIEVQGFRIPKGTTLITNLSSVLKDEAVWEKPFRFHPEHFLDAQGHFVKPEAFLPFSAGRRACLGEPLARMELFLFFTSLLQHFSFSVPTGQPRPSHHGVFAFLVSPSPYELCAVPR

SEQ ID NO: 1897 - DNA, 357 bp, Rattus norvegicus
  misc_feature (1)..(357): n=a, c, g or t
  ref <308>: DATABASE ACCESSION NUMBER: EMBL / H31489
  ref <309>: DATABASE ENTRY DATE: 2000-03-04
ccctggaatatgtggtgtttgaaaggcacttgatgaacccgtatggnagctggagaatgcatgccaagattgtgcccccgtgggcaccccctaagcaaccaattctcaagaccttgatgattcctggtcctcagctgaaaccgtgggaggagtacgaagagacacaaggggaggcccataagcctcaactaacctgatggcatgaatgactcctggggagcctggcagaggtggcgcacacctttaatcccagcactcggaagacagaggcaggtggatctctgtgagttcaagggcagcctggtctacagaacaagttgcagggcagcctgcgctacacagagaaccctgtctcag

SEQ ID NO: 1898 - DNA, 2759 bp, Rattus norvegicus
  ref <308>: DATABASE ACCESSION NUMBER: Refseq / NM_053573
  ref <309>: DATABASE ENTRY DATE: 2002-11-05
aacctggtggcccttctcgacagcggagcgcgcggggacgctgcagcggcgggcaacgcgggcaggcagcgcgctccaggcagggccgcctggtcacctcccggcgccggggcggcgcggcgatggccagggcgcagagggaggcagagaccggcgggcgacggcgggcggagggggcgcggggacgcggccgggcgcccctgcccgccctggtgcccgccgcctaaggctgcccggggcgcgggagccggcgccggcgcggcgcgggcgcaggagaccactcgaggcgcgatgtcggtgccgctgctgaagatcggggtcgtgctaagcaccatggccatgatcaccaactggatgtcccagacgctgccctcgctggtgggcctcaataccacccggctctcggccgccagcggcgggacgctggaccgcagcaccggcgtgttgcccaccaaccccgaggagagctggcaggtgtacagctctgcccaggacagtgagggcaggtgtatctgcacggtggtcgccccccagcagaccatgtgttcacgggatgcccgcacaaaacagctgaggcagctactggagaaggtgcaaaacatgtctcaatccatagaagtcttggacaggcggactcagagagacctgcagtacgtggagaagatggagaaccagatgaaaggcctggagtccaagttcaggcaggtggaggagagccataagcagcatctggccaggcagttcaaggcaataaaagcgaaaatggatgaacttaggcctttgattcctgtgttggaagagtacaaggccgatgccaaattggtattgcagtttaaggaggaggtccagaatctgacgtcagtgcttaacgaactgcaagaggaaattggcgcctatgactacgatgaacttcagagcagagtgtccaatcttgaagaaaggctccgtgcatgcatgcaaaaactagcctgcgggaagctgacaggcataagtgacccggtgactgtcaagacctcaggctcaaggttcgggtcctggatgacagacccactggccccagaaggtgataaccgggtctggtacatggatggttatcacaacaaccgctttgtccgtgagtacaagtccatggtggacttcatgaacacggataattttacctcgcaccgtctcccacacccctggtcgggcacgggccaggtggtctacaatggctccatctatttcaacaaattccagagtcacattatcattaggtttgacctgaagacagagacgatcctgaagacgcggagcctggactacgctggctacaacaacatgtaccactatgcctggggcggccactcagacatcgacctcatggtggacgagaacgggctctgggccgtctacgccacaaaccagaacgcaggcaacattgtcatcagcaagctggatcctgtctcactgcaaatcctccagacctggaacaccagctaccccaagcgcagcgccggcgaggccttcatcatctgcggcaccctctacgtcaccaacggttactcggggggcaccaaggtccactatgcctaccaaaccaacgcctcgacctacgagtacattgacatccccttccagaacaaatactctcacatctccatgctggactacaaccctaaagaccgcgcgctgtacgcctggaacaacggccatcagaccctctacaacgtcaccctcttccacgtcatccgctccgatgagttgtagctcccgcttttccagaagccaagggtccaagtcctcaccccgaggacattttccataaaacagctgccaaatgattccaagaatactataacagtcctgattttgagaaatcagcgcaattttgacgccgagagatggtgtcctctctgtgttcctcctgctcgtgcaggtgggccacagatttcagaagaaaccgccatgtatgtggatggaactgcagcccaaggctccttggctgtccccatcccaccccatccctctctggtccaataactcaaagaagcaaggcgatgactgttggcccctctcacccaagaacaacccactgctaagattgcatggacatttccttaggtcgtgcccagcgagatgacgtgatggccattctccccacccacagcccccagcccccgtggcgctcggtgtaggctgcttcggcccacacgtatcgcagctgcctttttcttgactgtgttgttgtctcttagattaactgtgctgagactcccggtagctcatggacctgtgtctagtactttcccgaagcgatggtgggtgtgcgtagagtgaagttgctgtacccacgttgttgaacttgcgtaccctgtagctagatcgtgaggtgtccgtctgttatcccccccaaggtggtaactccgtgtgttcaatttatgcaatgaatgttgtcatgcgatgctgtagtttggattgataagtggatggtttctgtttctaaaaagaaaaaaaaatcagtgttcgcccttataggagacatagtcaagttcatgttgataataacccagtgaaattcttctcttgtcaagttatctgaattgtgtaaccatagatgggaaggacgcatcttgggaaacttcagtttcctacgggaaggaactccccaagggcagccatgtgtgaaaagatcattttttaaagaaaaaaaaaataagtcaaagagggcaactttgtactattcagttatctaaggaacaataaagatattaggagat

SEQ ID NO: 1899 - protein, 485 aa, Rattus norvegicus
  ref <308>: DATABASE ACCESSION NUMBER: Refseq / NP_446025
  ref <309>: DATABASE ENTRY DATE: 2002-11-05
MSVPLLKIGVVLSTMAMITNWMSQTLPSLVGLNTTRLSAASGGTLDRSTGVLPTNPEESWQVYSSAQDSEGRCICTVVAPQQTMCSRDARTKQLRQLLEKVQNMSQSIEVLDRRTQRDLQYVEKMENQMKGLESKFRQVEESHKQHLARQFKAIKAKMDELRPLIPVLEEYKADAKLVLQFKEEVQNLTSVLNELQEEIGAYDYDELQSRVSNLEERLRACMQKLACGKLTGISDPVTVKTSGSRFGSWMTDPLAPEGDNRVWYMDGYHNNRFVREYKSMVDFMNTDNFTSHRLPHPWSGTGQVVYNGSIYFNKFQSHIIIRFDLKTETILKTRSLDYAGYNNMYHYAWGGHSDIDLMVDENGLWAVYATNQNAGNIVISKLDPVSLQILQTWNTSYPKRSAGEAFIICGTLYVTNGYSGGTKVHYAYQTNASTYEYIDIPFQNKYSHISMLDYNPKDRALYAWNNGHQTLYNVTLFHVIRSDEL

SEQ ID NO: 1900 - DNA, 980 bp, Homo sapiens
  ref <308>: DATABASE ACCESSION NUMBER: Refseq / NM_058199
  ref <309>: DATABASE ENTRY DATE: 2001-12-18
gcgcgggggagccattaggaggcgaggagagaggagggcgcagctcccgcccagcccagccctgcccagccctgcccggaggcagacgcgccggaaccgggacgcgataaatatgcagagcggaggcttcgcgcagcagagcccgcgcgccgcccgctccgggtgctgaatccaggcgtggggacacgagccaggcgccgccgccggagccagcggagccggggccagagccggagcgcgtccgcgtccacgcagccgccggccggccagcacccagggccctgcatgccaggtcgttggaggtggcagcgagacatgcacccggcccggaagctcctcagcctcctcttcctcatcctgatgggcactgaactcactcaaaataaaagagaaaacaaagcagagaagatgggagggccagagagcgagaggaagaccacaggagagaagacactgaacgagcttcccttgttttgcctggaagcccacgctggctccctggctctgcccaggatgtgcagtccaaatcccaatccagcagtggggttatgtcgtcccgcttaccctcagagcccttctcctggtgctgcccagacgatcagccagtccctcctggagaggttctgcatggcctctaggagagaagttttcttggccccaggaaggcctggtggagggtggtggttgtgcactgttgctggacagatgcattcattcatgtgcacacacacacacacacatgcacacacaggggagcagatacctgcagagaagagccaaccaggtcctgattagtggcaagctgccccacaaagggctatgcctgtgtcttattgagacaccttggcaaagagatggctgattctgggtggtcctggacatggccgcacccaagggccctccaagccttaatggcaccctgaagcctccatgcccaggccaaaagatgcttttcctccctaaaaaaaaaaaaaaaaaaa

SEQ ID NO: 1901 - protein, 169 aa, Homo sapiens
  ref <308>: DATABASE ACCESSION NUMBER: Refseq / NP_478106
  ref <309>: DATABASE ENTRY DATE: 2001-12-18
MPGRWRWQRDMHPARKLLSLLFLILMGTELTQNKRENKAEKMGGPESERKTTGEKTLNELPLFCLEAHAGSLALPRMCSPNPNPAVGLCRPAYPQSPSPGAAQTISQSLLERFCMASRREVFLAPGRPGGGWWLCTVAGQMHSFMCTHTHTHAHTGEQIPAEKSQPGPD

SEQ ID NO: 1902 - DNA, 9136 bp, Rattus norvegicus
  ref <308>: DATABASE ACCESSION NUMBER: Refseq / NM_017332
  ref <309>: DATABASE ENTRY DATE: 2002-11-05
agagacggcagcagcgtcccgtccagttcgcctgccgcgctcgcttgtcgtctgcctccagatcccagacagagaagagccatggaggaggtggtgatagccggtatgtccgggaaattgcccgagtcagagaacctgcaggagttctgggccaacctcattggcggtgtggacatggtcacagacgatgacaggaggtggaaggctgggctctatgggttgcctaagcggtctggaaagctgaaggatctgtccaagttcgacgcctccttttttggggtccaccccaagcaggcacacacaatggacccgcagctccggctgctgctggaagtcagctatgaagctattgtggacggaggtatcaacccggcctcactccgaggaacaaacactggtgtctgggtgggtgtgagtggttccgaggcgtcggaggccctgagcagagatcctgagactcttctgggctacagcatggtgggctgccagagagcaatgatggccaaccggctctctttcttcttcgacttcaaaggacccagcattgccctggacacagcctgctcctctagcctactggcactacagaatgcctatcaggctatccgcagtggggagtgccctgctgccattgtgggcgggatcaacctgctgctaaagcctaacacctctgtgcagttcatgaagctaggcatgctcagccccgatggcacctgcagatcctttgatgattcagggaacgggtattgccgtgctgaggctgtcgtggcagttctgctgactaagaagtccttggctcggcgagtctatgccactattctgaatgccgggacgaacacagatggctgcaaggagcaaggcgtgacattcccctctggagaagcccaggaacaactcatccgttctctgtatcagccgggcggtgtggcccccgagtctcttgaatatattgaagcccatggcacgggcaccaaggtgggggacccccaggaactgaacggcattactcggtccctgtgtgctttccgccagagccctttgttaattggctccaccaaatccaacatgggacaccctgagcctgcctcggggcttgcagccctgaccaaggtgctgttatccctagaaaatggggtttgggcccccaacctgcatttccacaaccccaaccctgaaatcccagcacttcttgatgggcggctgcaggtggtcgataggcccctgcctgttcgtggtggcatcgtgggcatcaactcgtttggcttcggaggtgccaatgttcacgtcatcctccagcccaacacacagcaggccccagcacctgccccacatgctgccctaccgcatttgctgcatgccagtggacggaccatggaggcagtgcagggcctgctggaacagggccgccagcacagtcaggacttggcctttgtgagcatgctcaatgacattgcagcaacccctacagcagccatgcccttcagaggttacactgtgttaggtgttgagggccatgtccaggaagtgcagcaagtgcctgccagccagcgcccactctggttcatctgctcagggatgggcacacagtggcgtggaatggggctgagccttatgcgcctggacagtttccgtgagtccatcctgcgctctgatgaggctctgaagcccttgggagtcaaagtgtcagacctgctgctgagcactgatgagcacacctttgatgacatcgtgcattcctttgtgagcctcaccgccatccagattgccctcatcgacctgctgacgtctatggggctgaaacctgatggcatcattgggcactccttgggagaggttgcctgtggctatgcagatggctgtctctcccagagagaggctgtgcttgcagcctactggagaggccagtgcattaaggatgccaaccttccggctggatccatggcagctgttggtttgtcctgggaagaatgtaaacaacgctgccctcctggtgtggtgcctgcctgccacaactctgaggacactgtgaccatctctggacctcaggctgcagtgaatgaatttgtggagcagctaaagcaagagggcgtgtttgccaaggaggtgcgaacaggtggcctggccttccactcctacttcatggaaggaattgcccccacgctgctgcaggctctcaagaaggtgatccgggagccacggccacgctcagcacgctggctcagcacctctatccctgaggcccagtggcagagcagcctggcccgcacatcttctgctgagtacaacgtcaacaacctggtgagccctgtgctcttccaggaagcactgtggcacgtccccgagcacgccgtggtgctggagattgcaccccatgcactgttgcaggctgtcctgaagcgaggcgtgaagcctagctgcaccatcatccccttgatgaagagggaccataaagataacttggagttcttcctcaccaacctcggcaaggtgcacctcacaggcatcgacatcaaccctaatgccttgttcccacctgtggaattcccggttccccgagggactcctctcatctcccctcacatcaagtgggaccacagtcagacttgggatatcccagttgctgaagacttccccaacggttccagctcctcctcagctacagtctacaacattgacgccagttccgagtcatctgaccactacctggtcgaccactgcattgacggccgtgtcctcttccctggcactggctacctgtacctggtgtggaagacactggctcgaagcctgagcttgtccctagaagagacccctgtggtgtttgagaacgtgacatttcatcaggccaccatcctgcccaggacaggaaccgtgcctctggaggtgcggctgctagaggcctcacatgcatttgaggtgtctgacagtggcaacctgatagtgagcgggaaagtgtaccagtgggaagaccctgactccaagttattcgaccacccagaagtcccgatccccgccgagtccgagtctgtctcccgcttgacgcagggagaagtatacaaggagctgcggctacgtggctatgactatggccctcatttccagggcgtctatgaggccaccctcgaaggtgagcaaggcaagctgctctggaaagacaactgggtgaccttcatggacacaatgctgcagatatccatcctgggcttcagcaagcagagtctgcagctacccacccgtgtgactgccatctatattgaccctgcaacccacctgcagaaggtgtacatgctggagggagacactcaagtggctgacgtgaccacgagccgctgtctgggcgtgaccgtctctggtggtgtctacatttcgagactacagacaacagcaacctcacggcggcagcaggaacagctggtccccaccctggagaagtttgtcttcacaccccatgtggagcctgagtgcctgtctgagagtgctatcctgcagaaagagctgcagctgtgcaagggtctggcaaaggctctgcagaccaaggccacccagcaagggctgaagatgacagtgcctgggctagaggaccttccccagcatggactgcctcgactcttggctgctgcctgccagctgcagctcaacgggaacctgcaactggagttaggtgaggtactggctcgagagaggctcctgctgccagaagaccctctgatcagtggcctccttaactcccaggccctcaaggcctgcatagacacagccctggagaacctgtctactctcaagatgaaggtggtggaggtgctggctggagaaggccacttgtattcccacatctcagcactgctcaacacccagcctatgctgcaactggagtatacagccaccgaccggcacccccaggccctgaaggatgttcagaccaagctgcagcagcatgatgtagcacagggccagtgggacccttctggtcctgctcctaccaacctgggtgctcttgaccttgtggtgtgcaactgtgcgttagccaccctgggggatccagccctggccctggacaacatggtagctgccctcaaggatggtggtttcctgctaatgcacacagtgctcaaaggacatgcccttggggaaaccctggcctgcctcccttctgaggtgcagcctgggcccagcttcttaagccaggaagagtgggagagcctgttctcaaggaaggcactgcacctggtgggccttaaaaagtcattctacggtactgcgctgttcctgtgccgccgtctcagcccacaggacaagcccatcttcctgcctgtggaggatactagtttccagtgggtggactctctgaagagcattctggccacatcctcctcccagcctgtgtggctaacagccatgaactgccccacctcaggtgtggtaggcttggtgaactgtctccgaaaagagccgggtggacaccggattcggtgtatcctgctgtccaacctcagcagcacatctcacgtccccaagctggaccctggctcttcagagctacagaaggtgctagagagtgatctggtgatgaacgtgtacagggacggtgcctggggtgccttccgtcacttccagttagagcaggacaagcccgaggagcagacagcacatgcctttgtaaacgtccttacccgaggggaccttgcctccatccgctgggtctcttctcccctgaaacacatgcagccgccctcgagctcaggagcacagctctgcactgtctactatgcctcactgaacttccgagatatcatgctggccacgggcaagctgtcccctgatgccattccaggtaaatgggccagccgggactgcatgcttggcatggagttctcaggccgtgataagtgcggccggcgtgtgatggggctggtacccgcagaaggcctggccacctcagtcctgttatcacccgacttcctctgggatgtaccctctagctggaccctggaggaggcggcttctgtgcctgttgtctacaccaccgcctactactccttagtagtgcgtggtcgtattcagcacggggaaactgtgctcattcactcgggctccggtggtgtgggccaagcggccatttccattgcccttagcctgggctgccgagtcttcaccactgtgggctccgctgagaagcgagcttacctccaggccagattccctcagctggatgacaccagctttgctaactctcgagacacatcgtttgagcagcatgtgttactgcacacaggtggcaaaggggtggacctggtcctcaactccctggcagaagagaagctgcaggccagtgtgcggtgcttggctcagcatggccgcttcctagagatcggcaaatttgatctttctaacaaccaccctctgggcatggccatcttcttgaagaacgtcactttccatgggatcctgctggatgcactttttgagggggccaacgacagctggcgggaggtggcagagctgctgaaggccggcatccgtgatggggttgtgaagcctctcaagtgtacagtgtttcccaaggcccaggtggaggacgccttccgatacatggctcaaggaaaacatattggcaaagtccttgtccaggtacgggaggaggagcccgaggctatgctgccaggggctcagcccaccctgatttccgccatctccaagaccttctgcccagagcataagagttacatcatcactggtggcctaggtggctttggcctggaactggcccggtggcttgtgcttcgtggggcccaaaggcttgtactaacttcccgatctggaatccgcacaggctaccaagccaagcacgttcgggagtggaggcgccagggcatccatgtgctagtgtcgacaagcaatgtcagttcactggagggggcccgtgctctcatcgctgaagccacaaagcttgggcccgttggaggtgtcttcaacctggccatggttttaagggatgccatgctggagaaccagactccagaactcttccaggatgtcaacaagcccaagtacaatggcaccctgaaccttgacagggcgacccgggaagcctgtcctgagctggactactttgtggccttctcctctgtaagctgcgggcgtggtaatgctggccaatccaactatggcttcgccaactctaccatggagcgtatttgcgaacagcgccggcacgatggcctcccaggtcttgccgtgcaatggggtgccattggtgacgtgggcattatcttggaagcgatgggtaccaatgacacagtcgttggcggcacactgccacagcgcatctcctcctgcatggaggtgctggacctcttcctgaatcagccccacgcagtcctgagcagttttgtgctggttgagaagaaagctgtggcccatggtgatggtgaagcccagagggatctggtgaaagcagtggcacacatcctaggcatccgcgacctcgcagggattaacctggacagctcgctggcagacctcggcctggactcgctcatgggtgtggaagtgcgccagatcctggaacgtgaacatgatctggtgctacccattcgtgaagtacggcaactcacactgcggaagcttcaggaaatgtcctccaaggctggctcagacactgagttggcagcccccaagtccaagaatgatacatccctgaagcaggcccagctgaatctgagtatcctgctggtgaaccctgagggccctaccttaacacgactcaactcagtgcagagctctgagcggcctctgttcctggtgcaccccattgaaggttccatcactgtgttccacagcctggctgccaagctcagtgtgcccacctacggtctgcagtgcacccaagcggcccccctggacagcattccaaacctggctgcctactacattgattgcatcaagcaggtgcagcctgaggggccccaccgagtggctgggtattcttttggagcttgtgtagccttcgagatgtgctcccagctgcaggcccagcagggcccagcccccgcccacaacaacctcttcttgtttgatggctcacacacctacgtattggcgtacacccagagctaccgggcaaagctgaccccaggctgtgaggctgaggctgaagctgaagccatatgcttcttcattaagcagtttgttgatgcagagcatagcaaggtgctagaggccctgctaccactgaagagcctggaggaccgggttgctgctgctgtggacctcatcactagaagccaccagagcctggaccgccgtgacctgagctttgctgccgtgtccttctactacaagcttcgagccgccgaccagtataaacccaaggccaagtaccacggcaatgtgatcctgctgcgggccaagacaggtggcacctacggcgaggacttgggtgccgattacaacctgtcccaggtgtgtgatgggaaggtgtctgtgcacatcattgagggtgaccatcgtacgctgctggagggcaggggcctggagtctatcatcaacatcatccacagctccctggctgagcctcgagtgagtgtacgggagggctagacctgcctaccatgaagccacgacccacaccggccaccagagatgctccgatccccatcacaccctgagtgcagggactggggagggtcctgctggtgggaccccctcaccccagtggcccagcaccaccccctcccctggtggctgctacaaacaggaccatcacatgtgtcccagccacttagtggggttcccagagccactgacttggaggcaccctggtctgtgaagagtcagtggaggccagcaagagccaaactgagccttttctgccaagtgacatttgtcacactggttgtttctccattaaattctcatatttattgcattgctgggaaagaccgcccaccccagggttaactcattccagaacccctaaagtgggaaaagccatgtggggaaggctgctggctggagcccctttttgtcttagccctgtacccgctcactgcagggcagggtatggagagggctggttcccggggaacgaggaccccagcagacactgtagcccatggcccttggtccccagcactcccggctgcacccatgatgcagggcctaccagactctgcggaccgcaccgggcactcactgtatttgttttccaagattcaaattgctgcttgggttttgaatttactgcagctgtcagtgtaaagaaacatgtctgaactgtgtcctttttacaccaacctggtaaaaatgctcttgatgctgtcccgttgccacaattaaactgcacgtgagctctggcttccgttcagtctctttccagtcccagacctgagtccccagagcctccacagctcttacagtgagaatcaaattggcccactccttggaaggcgtggcattctgtcagagtaaaaggaaagtagagtgtgctgattcacgttcagcgtgtggggctggctagagaccttggcactgtagtgaacagaatgtgtccacctttaagtcaccctgaaggcatcaccatagctacagcctcacccaggggtagagaatagtactgtctacttgttgactacctggcagttggtgccagcccctatagaggaaaacagcagtgtgtggccactgtgagaagcatatccctggaaacaggtgaccagagcagagggctaatgcctacctgagtcacacaaaactgaccaggcttgagtgtccagaagagtctatcagaaggccacagcattcagtcctatccacagagagcagcagactaagttgtctccttgccagcttagaaaactgcagtgctggggtacaggtagggtgttcaggaggtccgggccccagtgattagtctaagactgaagcatctggttggctgtggtcccacctagaaaattcttaaagctcttgtcatgtacttcctgggaaggacctaccctgtctcaataatgtctctagctcgttggagtctactgactcaaacatttataaagtgtcctagaaaggcctgactcccctacaaggctgtgtgatccttcaaactcacatatgtgagccaataaaaccttgagactct

SEQ ID NO: 1903 - protein, 2505 aa, Rattus norvegicus
  ref <308>: DATABASE ACCESSION NUMBER: Refseq / NP_059028
  ref <309>: DATABASE ENTRY DATE: 2002-11-05
MEEVVIAGMSGKLPESENLQEFWANLIGGVDMVTDDDRRWKAGLYGLPKRSGKLKDLSKFDASFFGVHPKQAHTMDPQLRLLLEVSYEAIVDGGINPASLRGTNTGVWVGVSGSEASEALSRDPETLLGYSMVGCQRAMMANRLSFFFDFKGPSIALDTACSSSLLALQNAYQAIRSGECPAAIVGGINLLLKPNTSVQFMKLGMLSPDGTCRSFDDSGNGYCRAEAVVAVLLTKKSLARRVYATILNAGTNTDGCKEQGVTFPSGEAQEQLIRSLYQPGGVAPESLEYIEAHGTGTKVGDPQELNGITRSLCAFRQSPLLIGSTKSNMGHPEPASGLAALTKVLLSLENGVWAPNLHFHNPNPEIPALLDGRLQVVDRPLPVRGGIVGINSFGFGGANVHVILQPNTQQAPAPAPHAALPHLLHASGRTMEAVQGLLEQGRQHSQDLAFVSMLNDIAATPTAAMPFRGYTVLGVEGHVQEVQQVPASQRPLWFICSGMGTQWRGMGLSLMRLDSFRESILRSDEALKPLGVKVSDLLLSTDEHTFDDIVHSFVSLTAIQIALIDLLTSMGLKPDGIIGHSLGEVACGYADGCLSQREAVLAAYWRGQCIKDANLPAGSMAAVGLSWEECKQRCPPGVVPACHNSEDTVTISGPQAAVNEFVEQLKQEGVFAKEVRTGGLAFHSYFMEGIAPTLLQALKKVIREPRPRSARWLSTSIPEAQWQSSLARTSSAEYNVNNLVSPVLFQEALWHVPEHAVVLEIAPHALLQAVLKRGVKPSCTIIPLMKRDHKDNLEFFLTNLGKVHLTGIDINPNALFPPVEFPVPRGTPLISPHIKWDHSQTWDIPVAEDFPNGSSSSSATVYNIDASSESSDHYLVDHCIDGRVLFPGTGYLYLVWKTLARSLSLSLEETPVVFENVTFHQATILPRTGTVPLEVRLLEASHAFEVSDSGNLIVSGKVYQWEDPDSKLFDHPEVPIPAESESVSRLTQGEVYKELRLRGYDYGPHFQGVYEATLEGEQGKLLWKDNWVTFMDTMLQISILGFSKQSLQLPTRVTAIYIDPATHLQKVYMLEGDTQVADVTTSRCLGVTVSGGVYISRLQTTATSRRQQEQLVPTLEKFVFTPHVEPECLSESAILQKELQLCKGLAKALQTKATQQGLKMTVPGLEDLPQHGLPRLLAAACQLQLNGNLQLELGEVLARERLLLPEDPLISGLLNSQALKACIDTALENLSTLKMKVVEVLAGEGHLYSHISALLNTQPMLQLEYTATDRHPQALKDVQTKLQQHDVAQGQWDPSGPAPTNLGALDLVVCNCALATLGDPALALDNMVAALKDGGFLLMHTVLKGHALGETLACLPSEVQPGPSFLSQEEWESLFSRKALHLVGLKKSFYGTALFLCRRLSPQDKPIFLPVEDTSFQWVDSLKSILATSSSQPVWLTAMNCPTSGVVGLVNCLRKEPGGHRIRCILLSNLSSTSHVPKLDPGSSELQKVLESDLVMNVYRDGAWGAFRHFQLEQDKPEEQTAHAFVNVLTRGDLASIRWVSSPLKHMQPPSSSGAQLCTVYYASLNFRDIMLATGKLSPDAIPGKWASRDCMLGMEFSGRDKCGRRVMGLVPAEGLATSVLLSPDFLWDVPSSWTLEEAASVPVVYTTAYYSLVVRGRIQHGETVLIHSGSGGVGQAAISIALSLGCRVFTTVGSAEKRAYLQARFPQLDDTSFANSRDTSFEQHVLLHTGGKGVDLVLNSLAEEKLQASVRCLAQHGRFLEIGKFDLSNNHPLGMAIFLKNVTFHGILLDALFEGANDSWREVAELLKAGIRDGVVKPLKCTVFPKAQVEDAFRYMAQGKHIGKVLVQVREEEPEAMLPGAQPTLISAISKTFCPEHKSYIITGGLGGFGLELARWLVLRGAQRLVLTSRSGIRTGYQAKHVREWRRQGIHVLVSTSNVSSLEGARALIAEATKLGPVGGVFNLAMVLRDAMLENQTPELFQDVNKPKYNGTLNLDRATREACPELDYFVAFSSVSCGRGNAGQSNYGFANSTMERICEQRRHDGLPGLAVQWGAIGDVGIILEAMGTNDTVVGGTLPQRISSCMEVLDLFLNQPHAVLSSFVLVEKKAVAHGDGEAQRDLVKAVAHILGIRDLAGINLDSSLADLGLDSLMGVEVRQILEREHDLVLPIREVRQLTLRKLQEMSSKAGSDTELAAPKSKNDTSLKQAQLNLSILLVNPEGPTLTRLNSVQSSERPLFLVHPIEGSITVFHSLAAKLSVPTYGLQCTQAAPLDSIPNLAAYYIDCIKQVQPEGPHRVAGYSFGACVAFEMCSQLQAQQGPAPAHNNLFLFDGSHTYVLAYTQSYRAKLTPGCEAEAEAEAICFFIKQFVDAEHSKVLEALLPLKSLEDRVAAAVDLITRSHQSLDRRDLSFAAVSFYYKLRAADQYKPKAKYHGNVILLRAKTGGTYGEDLGADYNLSQVCDGKVSVHIIEGDHRTLLEGRGLESIINIIHSSLAEPRVSVREG

SEQ ID NO: 1904 - DNA, 1505 bp, Rattus norvegicus
  misc_feature (1)..(1505): n=a, c, g or t
  ref <308>: DATABASE ACCESSION NUMBER: Refseq / NM_080585
  ref <309>: DATABASE ENTRY DATE: 2003-01-13
gtagcttggctgtgtcgggcctgaaccgagcagctgcgcgacgtcatggacacctccgggaagcaggctgaggctatggcgctgctggctgaagcggagcgcaaggtgaagaactcgcagtccttcttctccggcctctttggaggttcatccaaaatagaggaagcatgcgagatctatgccagagctgcgaacatgttcaagatggccaagaactggagcgctgctgggaacgctttctgccaggctgcccaactgcacctacagctccagagcaagcacgatgcagccacctgctttgtggacgccggcaacgctttcaagaaagctgacccccaagaggccattaactgtctgatgagagcaattgagatctatacagacatgggcagattcacaatcgcagccaagcaccacatctccattgctgagatctatgagacagaactggtggatgtagagaaggccattgcccactacgagcaatctgcagactactacaaaggagaagagtccaacagctcagccaacaagtgtctgctgaaggtggctggctacgccgcacagctggagcagtaccagaaggctatcgacatctatgagcaggtggggaccagcgccatggacagtcccctcctcaagtacagcgccaaagactacttcttcaaggcggccctttgccacttctgcatcgacatgctgaacgccaagcttgctgttcagaagtatgaggagctgttccctgccttctcggattcccgggaatgcaagctgatgaaaaagctgctggaagcccatgaggaacagaatgtggacagctacacagagtcggtgaaggaatatgactccatctccagactggaccagtggcttaccaccatgcttctacgaatcaagaagaccattcagggtgatgaggaagacctgcgctaggcctccagccactgccttccacccatctgtctgtcacagaggtggagccaacacctccaccaggagtctgaaggagtgggtncaatgtaggcctcatcctccagggcaccaggcaagctctcctggatggctggtcaccctatgcccactgcgtccttcaccccgccatttatttaagctcccaaaggtgtcctcctgctctggaaaacccacctggacagattctccaatacagacttctctgtgtgcttcaggaacctggagtcagcatccagtcccatctcctgaccagcagtgtactaaggctatttccatatctcctaccttgtaccctagcagagataagaacacaggtagttcgtgagacttgctctccctggctgggggtagcctctgcccctggagctttcccttgttcctacaatgccaacctctcaggttagacccagccctggagctcacagggtgccttggccctgccctgccctgcacctgcttctctcgctgcatccaggtctgtctgtcgacntgaagctgcggctggcccaagaaagacaannacctgccacnng

SEQ ID NO: 1905 - protein, 295 aa, Rattus norvegicus
  ref <308>: DATABASE ACCESSION NUMBER: Refseq / NP_542152
  ref <309>: DATABASE ENTRY DATE: 2003-01-13
MDTSGKQAEAMALLAEAERKVKNSQSFFSGLFGGSSKIEEACEIYARAANMFKMAKNWSAAGNAFCQAAQLHLQLQSKHDAATCFVDAGNAFKKADPQEAINCLMRAIEIYTDMGRFTIAAKHHISIAEIYETELVDVEKAIAHYEQSADYYKGEESNSSANKCLLKVAGYAAQLEQYQKAIDIYEQVGTSAMDSPLLKYSAKDYFFKAALCHFCIDMLNAKLAVQKYEELFPAFSDSRECKLMKKLLEAHEEQNVDSYTESVKEYDSISRLDQWLTTMLLRIKKTIQGDEEDLR

SEQ ID NO: 1906 - DNA, 502 bp, Rattus norvegicus
  misc_feature (1)..(502): n=a, c, g or t
  ref <308>: DATABASE ACCESSION NUMBER: EMBL / AA893384
  ref <309>: DATABASE ENTRY DATE: 2000-03-03
gtggcgggcagggcagtgctcttgggcccagcgcttaggccactcgcattccttgtgggccctgggtgaggagctgcttccagacagtgngagagggcctgatggagaggtccccaaggacaagaacggagtcgtgttcgacctcaggccctttgtggcagatctcattgccttcatggaaggaagcagacattccccacgatacactctgtggttctgtgtgggggaatcgtggccccaggaccagccgtgggtcaagaggcttgtgatggtcaaggttgttcctacatgtcttaaggagctgttagagatggcccgggaagggggagcctcatcactgaaaaccgtggacttgcacatctccaacagccagccgatctcccttacctctgaccagtacaaggcctgcctccaggacttggtggaagacatggacttccaggccactggagaaacctgagcccagctcagctgctccaataaagcaatttatgccaccatc

SEQ ID NO: 1907 - DNA, 1407 bp, Homo sapiens
  ref <308>: DATABASE ACCESSION NUMBER: Refseq / NM_001571
  ref <309>: DATABASE ENTRY DATE: 2000-10-31
ggttccagctgcccgcacgccccgaccttccatcgtaggccggaccatgggaaccccaaagccacggatcctgccctggctggtgtcgcagctggacctggggcaactggagggcgtggcctgggtgaacaagagccgcacgcgcttccgcatcccttggaagcacggcctacggcaggatgcacagcaggaggatttcggaatcttccaggcctgggccgaggccactggtgcatatgttcccgggagggataagccagacctgccaacctggaagaggaatttccgctctgccctcaaccgcaaagaagggttgcgtttagcagaggaccggagcaaggaccctcacgacccacataaaatctacgagtttgtgaactcaggagttggggacttttcccagccagacacctctccggacaccaatggtggaggcagtacttctgatacccaggaagacattctggatgagttactgggtaacatggtgttggccccactcccagatccgggacccccaagcctggctgtagcccctgagccctgccctcagcccctgcggagccccagcttggacaatcccactcccttcccaaacctggggccctctgagaacccactgaagcggctgttggtgccgggggaagagtgggagttcgaggtgacagccttctaccggggccgccaagtcttccagcagaccatctcctgcccggagggcctgcggctggtggggtccgaagtgggagacaggacgctgcctggatggccagtcacactgccagaccctggcatgtccctgacagacaggggagtgatgagctacgtgaggcatgtgctgagctgcctgggtgggggactggctctctggcgggccgggcagtggctctgggcccagcggctggggcactgccacacatactgggcagtgagcgaggagctgctccccaacagcgggcatgggcctgatggcgaggtccccaaggacaaggaaggaggcgtgtttgacctggggcccttcattgtagatctgattaccttcacggaaggaagcggacgctcaccacgctatgccctctggttctgtgtgggggagtcatggccccaggaccagccgtggaccaagaggctcgtgatggtcaaggttgtgcccacgtgcctcagggccttggtagaaatggcccgggtagggggtgcctcctccctggagaatactgtggacctgcacatttccaacagccacccactctccctcacctccgaccagtacaaggcctacctgcaggacttggtggagggcatggatttccagggccctggggagagctgagccctcgctcctcatggtgtgcctccaacccccctgttccccaccacctcaaccaataaactggttcctgctatgaa

SEQ ID NO: 1908 - protein, 427 aa, Homo sapiens
  ref <308>: DATABASE ACCESSION NUMBER: Refseq / NP_001562
  ref <309>: DATABASE ENTRY DATE: 2000-10-31
MGTPKPRILPWLVSQLDLGQLEGVAWVNKSRTRFRIPWKHGLRQDAQQEDFGIFQAWAEATGAYVPGRDKPDLPTWKRNFRSALNRKEGLRLAEDRSKDPHDPHKIYEFVNSGVGDFSQPDTSPDTNGGGSTSDTQEDILDELLGNMVLAPLPDPGPPSLAVAPEPCPQPLRSPSLDNPTPFPNLGPSENPLKRLLVPGEEWEFEVTAFYRGRQVFQQTISCPEGLRLVGSEVGDRTLPGWPVTLPDPGMSLTDRGVMSYVRHVLSCLGGGLALWRAGQWLWAQRLGHCHTYWAVSEELLPNSGHGPDGEVPKDKEGGVFDLGPFIVDLITFTEGSGRSPRYALWFCVGESWPQDQPWTKRLVMVKVVPTCLRALVEMARVGGASSLENTVDLHISNSHPLSLTSDQYKAYLQDLVEGMDFQGPGES

SEQ ID NO: 1909 - DNA, 3089 bp, Rattus norvegicus
  ref <308>: DATABASE ACCESSION NUMBER: Refseq / NM_031978
  ref <309>: DATABASE ENTRY DATE: 2003-01-13
gatacactgcgcagtggaacggcgagtgcagggcgcagccatgatcacttcagccgctggaattatttctcttctggatgaagaagagccacagctcaaggaatttgcactacacaaattgaatgcagttgtgaatgacttctgggcagaaatttctgagtctgtagacaaaatagaagttttatatgaagatgaaggtttccgcagtcggcagtttgcagccttggtggcatcgaaagtattttatcacctgggggctttcgaggagtctctgaattatgctcttggagcaggtgacctcttcaatgtcaatgataactctgaatatgtggagactattatagcaaaatgcattgatcattataccaaacagtgtgtggaaaatgcagatttgcctgaaggagaaaagaagccaattgaccagagattggaaggcatcgtgaataagatgttccagcgatgtctcgatgatcacaagtataagcaagcgattggcattgctctggagaccaggagactagatgtgtttgagaagactatactggaatctaatgatgtcccaggaatgctagcttacagcctcaagctctgcatgtctttaatgcagaataagcagtttcggaataaagtattgcgagtcctggttaaaatctacatgaacttggaaaaacctgatttcatcaatgtttgtcagtgcttaatcttcttagatgacacccaggccgtgagtgatatcttagaaaagctggtaaaggaagacaacctgctgatggcctatcagatttgctttgatttgtacgaaagtgccagccagcagtttttgtcatctgtgatccagaatcttcgaactgttgggacccctattgcttctgtgcctggatctaccaatacgggtactgtgccaggaccagagaaagacagtgactctatggagaccgaggagaagacagccggtgcagtggcagggaaaacaccagacgctagtccagagcccaaggaccagacattgaaaatgattaaaattttaagtggtgaaatggctatcgagttacacctgcagttcctaatacgcaataataacacagacctcatgattctgaaaaacacaaaggatgcagtacgaaattctgtatgtcatacagcaactgtaatagcaaactcattcatgcactgtgggactaccagtgaccagttccttagagataacttggaatggctggccagagccactaactgggccaaatttactgcaactgccagcttgggtgtaatccataagggccatgagaaggaagcactacagttaatggcaacatacctccctaaggacacttctccaggatcagcctatcaggaaggtggaggtctctatgcattgggtctcattcatgccaatcatggtggtgacataattgactatctccttaatcagctcaagaatgccagcaatgatatcgttagacatggaggcagcttgggccttggtttggctgcaatgggaactgcacgtcaggatgtatatgatttgctgaaaacaaacctgtatcaggatgatgctgtgacaggggaggcagctggcctggccttaggtttggttatgttaggctctaaaaacacccaggcgattgaggatatggttggctatgcacaagaaactcaacacgagaagattctgcgtggtctagcagttggcattgcgttagtgatgtatgggaggatggaggaggccgatgctctcattgaatctctctgtcgtgataaggacccaattcttagaagatctggaatgtatactgtagccatggcttattgtggctctggtaacaataaagctattcgacgcctgctgcatgttgctgtaagtgatgtcaacgatgatgtcagaagagcagcagtagagtctcttggcttcattttgttcaggacgcctgaacagtgtccaagtgtggtctctttgttgtccgagagttataaccctcatgtgcgctacggcgctgcaatggccctgggagtctgctgtgctggtacaggaaacaaggaagcaattaatttactggagccaatgaccaatgaccctgtgaactacgtgcggcaaggggctctgatagcctcagctctcatcatgatccaacagaccgaaatcacgtgtccaaaggtaaaccagttccggcagctgtattccaaagtcatcaatgacaagcatgatgatgtcatggccaaatttggcgctattctggcccaaggcatactggatgcaggtggtcataatgtcacaatctccttacagtccaggactgggcacactcatatgccttctgtggttggcgtccttgtctttacccagttctggttctggtttcccctttcacacttcctatcattggcttatactcctacctgtatcatcggccttaacaaggatttaaagatgccgaaagttcaatataaatcaaattgtaaaccatccacattcgcataccctgcccctctggaagttccaaaagaaaaagaaaaggaaaaggtttccaccgctgtgttgtctattactgccaaagctaaaaaaaaagaaaaagaaaaagaaaaaaaggaggaggagaagatggaagtggacgaagcagaaaagaaggaagagaaagagaagaaaaaagaaccggaaccaaacttccagctgttggataatccagcacgggtcatgcctgcccagctgaaggtcttaagtatgacagagacctgcagataccaacccttcaagccactctccatcgggggcatcataattctgaaagacaccagcgaagacattgaggaacttgtggaacccgtggcagcacatggcccaaagattgaagaggaggagcaggagccagagcccccagagccatttgagtacatcgatgactagggccagggatcccacctgctcagctgtagatgactatcctggcacacactgaaatgtcgtgagggaacccacgctgagacccgctcgatccacacatcattgcctacgctgacataaggaacccgtgtcctgagtctttgattgagaagattctgactgttcagtgttctctttcacaaaaaaaaaa

SEQ ID NO: 1910 - protein, 953 aa, Rattus norvegicus
  ref <308>: DATABASE ACCESSION NUMBER: Refseq / NP_114184
  ref <309>: DATABASE ENTRY DATE: 2003-01-13
MITSAAGIISLLDEEEPQLKEFALHKLNAVVNDFWAEISESVDKIEVLYEDEGFRSRQFAALVASKVFYHLGAFEESLNYALGAGDLFNVNDNSEYVETIIAKCIDHYTKQCVENADLPEGEKKPIDQRLEGIVNKMFQRCLDDHKYKQAIGIALETRRLDVFEKTILESNDVPGMLAYSLKLCMSLMQNKQFRNKVLRVLVKIYMNLEKPDFINVCQCLIFLDDTQAVSDILEKLVKEDNLLMAYQICFDLYESASQQFLSSVIQNLRTVGTPIASVPGSTNTGTVPGPEKDSDSMETEEKTAGAVAGKTPDASPEPKDQTLKMIKILSGEMAIELHLQFLIRNNNTDLMILKNTKDAVRNSVCHTATVIANSFMHCGTTSDQFLRDNLEWLARATNWAKFTATASLGVIHKGHEKEALQLMATYLPKDTSPGSAYQEGGGLYALGLIHANHGGDIIDYLLNQLKNASNDIVRHGGSLGLGLAAMGTARQDVYDLLKTNLYQDDAVTGEAAGLALGLVMLGSKNTQAIEDMVGYAQETQHEKILRGLAVGIALVMYGRMEEADALIESLCRDKDPILRRSGMYTVAMAYCGSGNNKAIRRLLHVAVSDVNDDVRRAAVESLGFILFRTPEQCPSVVSLLSESYNPHVRYGAAMALGVCCAGTGNKEAINLLEPMTNDPVNYVRQGALIASALIMIQQTEITCPKVNQFRQLYSKVINDKHDDVMAKFGAILAQGILDAGGHNVTISLQSRTGHTHMPSVVGVLVFTQFWFWFPLSHFLSLAYTPTCIIGLNKDLKMPKVQYKSNCKPSTFAYPAPLEVPKEKEKEKVSTAVLSITAKAKKKEKEKEKKEEEKMEVDEAEKKEEKEKKKEPEPNFQLLDNPARVMPAQLKVLSMTETCRYQPFKPLSIGGIIILKDTSEDIEELVEPVAAHGPKIEEEEQEPEPPEPFEYIDD

SEQ ID NO: 1911 - DNA, 3227 bp, Homo sapiens
  ref <308>: DATABASE ACCESSION NUMBER: Refseq / NM_002807
  ref <309>: DATABASE ENTRY DATE: 2002-12-23
gaggaggcgactgactgagcagcgcacccggggagcaaggaggcgcggtgaactgagcggcccctgagctgacagatacactgcgcagctggaacggcgagcgagccgacgggcgagtgaggggcgcagccatgatcacctcggccgctggaattatttctcttctggatgaagatgaaccacagcttaaggaatttgcactacacaaattgaatgcagttgttaatgacttctgggcagaaatttccgagtccgtagacaaaatagaggttttatacgaagatgaaggtttccggagtcggcagtttgcagccttagtggcatctaaagtattttatcacctgggggcttttgaggagtctctgaattatgctcttggagcaggggacctcttcaatgtcaatgataactctgaatatgtggaaactattatagcaaaatgcattgatcactacaccaaacaatgtgtggaaaatgcagatttgcctgaaggagaaaaaaaaccaattgaccagagattggaaggcatcgtaaataaaatgttccagcgatgtctagatgatcacaagtataaacaggctattggcattgctctggagacacgaagactggacgtctttgaaaagaccatactggagtcgaatgatgtcccaggaatgttagcttatagccttaagctctgcatgtctttaatgcagaataaacagtttcggaataaagtactaagagttctagttaaaatctacatgaacttggagaaacctgatttcatcaatgtttgtcagtgcttaattttcttagatgatcctcaggctgtgagtgatatcttagagaaactggtaaaggaagacaacctcctgatggcatatcagatttgttttgatttgtatgaaagtgctagccagcagtttttgtcatctgtaatccagaatcttcgaactgttggcacccctattgcttctgtgcctggatccactaatacgggtactgttccgggatcagagaaagacagtgactcgatggaaacagaagaaaagacaagcagtgcatttgtaggaaagacaccagaagccagtccagagcctaaggaccagactttgaaaatgattaaaattttaagtggtgaaatggctattgagttacatctgcagttcttaatacgaaacaataatacagacctcatgattctaaaaaacacaaaggatgcagtacggaattctgtatgtcatactgcaaccgttatagcaaactcttttatgcactgtgggacaaccagtgaccagtttcttagagataatttggaatggttagccagagccactaactgggcaaaatttactgctacagccagtttgggtgtaattcataagggtcatgaaaaagaagcattacagttaatggcaacataccttcccaaggatacttctccaggatcagcctatcaggaaggtggaggtctctatgcactaggtcttattcatgccaatcatggtggtgatataattgactatctgcttaatcagcttaagaacgccagcaatgatatcgttagacacggtggcagtctgggccttggtttggcagccatgggaactgcacgtcaagatgtttatgatttgctaaaaacaaacctttatcaggatgatgcagtaacaggggaagcagctggcctggccctaggtttggttatgttgggctctaaaaatgctcaggctattgaggacatggttggttatgcacaagaaactcaacatgagaagattctgcgtggtcttgcagttggcatagctttagtaatgtatgggaggatggaagaggctgatgctctcattgaatctctctgtcgtgacaaggacccaattcttcgaaggtctggaatgtatactgtagccatggcttattgtggctctggtaacaacaaagcaattcgacgcctgctacatgttgctgtaagtgatgttaatgatgatgtcaggagggcagcagtagaatcacttgggttcattctattcagaacccctgaacagtgcccaagtgttgtctctttgttgtcagagagttacaaccctcatgtgcgctacggagctgcaatggccttggggatatgctgtgctggtacaggaaacaaggaagccattaatttgctagaaccaatgacaaacgaccccgtgaactacgtgaggcaaggggcactcatagcttcagctctcatcatgatccagcagactgaaatcacttgtccaaaggtgaatcagttcagacagctgtattccaaagtcatcaatgataagcatgatgatgtcatggccaagtttggcgctattctggcccagggcatactggatgcaggtggtcataatgtcacaatctccttgcagtccaggactgggcatactcatatgccttctgtggttggcgtccttgtatttacccagttttggttctggtttcctctttcacacttcctgtcattggcttatacccctacctgtgtcattggccttaacaaggacttaaagatgccgaaagttcagtataaatcgaactgtaaaccatccacatttgcatatcctgcccctctggaagtaccaaaagaaaaagaaaaggaaaaggtttctactgctgtattatctataactgccaaggctaaaaagaaggaaaaagaaaaggaaaaaaaggaggaggagaaaatggaagtggatgaggcagagaaaaaggaggaaaaagagaagaaaaaagaacctgagccaaacttccagttattggataacccagcccgagttatgcctgcccagcttaaggtcctaaccatgccggagacctgtagataccagcctttcaaaccactctctattggaggcatcatcattctgaaggataccagtgaagacattgaggagctggtggaacctgtggcagcacatggcccaaaaatcgaggaggaggaacaagagccagaacccccagaaccatttgagtatattgatgattaagggccagaggatctcacttgcttatctgaagaagattgtccaggctcatattgggaatgcttatgaggaaattcatgccgagacctgctattcaatgcatgtatcgttgcctctgcactgacctgaagaaccctgtctccaagtctttggttgaagagaagatatatgactgttgagtgtgctctttcacagaacttggttttcaaataaatataagatctccagatggacaag

SEQ ID NO: 1912 - protein, 953 aa, Homo sapiens
  ref <308>: DATABASE ACCESSION NUMBER: Refseq / NP_002798
  ref <309>: DATABASE ENTRY DATE: 2002-12-23
MITSAAGIISLLDEDEPQLKEFALHKLNAVVNDFWAEISESVDKIEVLYEDEGFRSRQFAALVASKVFYHLGAFEESLNYALGAGDLFNVNDNSEYVETIIAKCIDHYTKQCVENADLPEGEKKPIDQRLEGIVNKMFQRCLDDHKYKQAIGIALETRRLDVFEKTILESNDVPGMLAYSLKLCMSLMQNKQFRNKVLRVLVKIYMNLEKPDFINVCQCLIFLDDPQAVSDILEKLVKEDNLLMAYQICFDLYESASQQFLSSVIQNLRTVGTPIASVPGSTNTGTVPGSEKDSDSMETEEKTSSAFVGKTPEASPEPKDQTLKMIKILSGEMAIELHLQFLIRNNNTDLMILKNTKDAVRNSVCHTATVIANSFMHCGTTSDQFLRDNLEWLARATNWAKFTATASLGVIHKGHEKEALQLMATYLPKDTSPGSAYQEGGGLYALGLIHANHGGDIIDYLLNQLKNASNDIVRHGGSLGLGLAAMGTARQDVYDLLKTNLYQDDAVTGEAAGLALGLVMLGSKNAQAIEDMVGYAQETQHEKILRGLAVGIALVMYGRMEEADALIESLCRDKDPILRRSGMYTVAMAYCGSGNNKAIRRLLHVAVSDVNDDVRRAAVESLGFILFRTPEQCPSVVSLLSESYNPHVRYGAAMALGICCAGTGNKEAINLLEPMTNDPVNYVRQGALIASALIMIQQTEITCPKVNQFRQLYSKVINDKHDDVMAKFGAILAQGILDAGGHNVTISLQSRTGHTHMPSVVGVLVFTQFWFWFPLSHFLSLAYTPTCVIGLNKDLKMPKVQYKSNCKPSTFAYPAPLEVPKEKEKEKVSTAVLSITAKAKKKEKEKEKKEEEKMEVDEAEKKEEKEKKKEPEPNFQLLDNPARVMPAQLKVLTMPETCRYQPFKPLSIGGIIILKDTSEDIEELVEPVAAHGPKIEEEEQEPEPPEPFEYIDD

SEQ ID NO: 1913 - DNA, 2571 bp, Rattus norvegicus
  ref <308>: DATABASE ACCESSION NUMBER: Refseq / NM_138827
  ref <309>: DATABASE ENTRY DATE: 2002-10-20
ggggcgggccaatggcggcggtcctataaaaaggcagctccgcgcgctctcttcctaagaacacaagaatcccttgtggagtgtcggtttaggttgcagggtcttaagtgagtcagggcgcggaggtccggcgggagacgcatagtcacagaacgtccattctccgtttcacagcccgcacagcttgagcctcgagcgcagcgcggccatggagcccagcagcaagaaggtgacgggccgccttatgttggccgtgggaggggcagtgctcggatccctgcagttcggctataacaccggtgtcatcaacgccccccagaaggtaattgaggagttctacaatcaaacatggaaccaccgctatggagagtccatcccatccaccacactcaccacactctggtctctctccgtggccatcttctctgtcgggggcatgattggttccttctctgtgggcctctttgttaatcgctttggcaggcggaactccatgctgatgatgaacctgttggcctttgtgtctgccgtgcttatgggtttctccaaactgggcaagtcctttgagatgctgatcctgggccgcttcatcattggagtgtactgtggcctgaccaccggctttgtgcccatgtatgtgggggaggtgtcacccacagctcttcgtggagccctgggcaccctgcaccagctgggcatcgtcgttgggatccttattgcccaggtgttcggcttagactccatcatgggcaatgcagacttgtggcctctactgctcagtgtcatcttcatcccagccctgctacagtgtatcctgttgcccttctgccctgagagcccccgcttcctgctcatcaatcgtaacgaggagaaccgggccaagagtgtgctgaaaaagcttcgagggacagccgatgtgacccgagacctgcaggagatgaaagaagagggtcggcagatgatgcgggagaagaaggtcaccatcttggagctgttccgctcacccgcctaccgccagcccatcctcatcgccgtggtgctgcagctgtcccagcagctgtcgggcatcaatgctgtgttctactactcaacgagcatcttcgagaaggcaggtgtgcagcagcctgtgtatgccaccatcggctcgggtatcgtcaacacggccttcactgtggtgtcgctgttcgtcgtggagcgagctggccgtcggaccctgcatctcattggtctggctggcatggcgggctgtgctgtgctcatgaccatcgccctggccctgctggagcagctgccctggatgtcctatctgagtatcgtggccatctttggctttgtggccttctttgaagtaggccctggtcctattccatggttcattgtggccgagctgttcagccaggggccccgacctgctgctgttgctgtggctggcttctctaactggacctcaaacttcatcgtgggcatgtgcttccaatatgtggagcaactgtgtggcccctacgtcttcatcatcttcacggtgctgctggtactcttcttcatcttcacctacttcaaagttcctgagaccaaaggccggaccttcgatgagatcgcttccggcttccggcaggggggtgccagccagagcgacaagacacctgaggagctcttccaccctctgggggctgactcccaagtgtgaggagcccacagccagtcccgcctgctcccagcagccccgaggatctctctggagcacaggcagctagatgagacctcttccaaactgacagatctcgggcgagccgggcctgggcacctttcttcagtcagcaatgaagtccagaagaatattcaggactttgatggctccagaatttttaatgaaagcaagactgttgctcagatctattcagataagcagcagattttataatttttttattactgattttgttattatttttttttttatcagccactctcctatctccacactgtagtcttcaccttgattggcctagtgcctgagggtggagaccacgccctgtccagacacatgccttctttgccaagctaatctgtagggctggacctttggccaaggacacacgaatactgaacaatggctaggaggctttaccgcaggaggcggtagctgccacccacttctgcaggcctggatctcgacaccataggggtccaggctccatttaggattcgcccattcctgtctcttccaactcaaccaaccactcgattaatctttccttgcctgagaccagttgaaagcactggagtgcagggaggagagggaagggccaggctgggctgccaggttcaggtctcctgtgcactgagggccagacaaacaccatgagaaggacctcggaggctgagaacttactgctgaagacacggacactcctgccctgctgtgtatagatggaagatatttatatattttttggttgtctattaaatacagacactaagttatagtatatatctggacaaacccacttgtaaatacaccaacaaactcctgtaactttacctaagcagatataaatggctggtttttag

SEQ ID NO: 1914 - protein, 492 aa, Rattus norvegicus
  ref <308>: DATABASE ACCESSION NUMBER: Refseq / NP_620182
  ref <309>: DATABASE ENTRY DATE: 2002-10-20
MEPSSKKVTGRLMLAVGGAVLGSLQFGYNTGVINAPQKVIEEFYNQTWNHRYGESIPSTTLTTLWSLSVAIFSVGGMIGSFSVGLFVNRFGRRNSMLMMNLLAFVSAVLMGFSKLGKSFEMLILGRFIIGVYCGLTTGFVPMYVGEVSPTALRGALGTLHQLGIVVGILIAQVFGLDSIMGNADLWPLLLSVIFIPALLQCILLPFCPESPRFLLINRNEENRAKSVLKKLRGTADVTRDLQEMKEEGRQMMREKKVTILELFRSPAYRQPILIAVVLQLSQQLSGINAVFYYSTSIFEKAGVQQPVYATIGSGIVNTAFTVVSLFVVERAGRRTLHLIGLAGMAGCAVLMTIALALLEQLPWMSYLSIVAIFGFVAFFEVGPGPIPWFIVAELFSQGPRPAAVAVAGFSNWTSNFIVGMCFQYVEQLCGPYVFIIFTVLLVLFFIFTYFKVPETKGRTFDEIASGFRQGGASQSDKTPEELFHPLGADSQV

SEQ ID NO: 1915 - DNA, 669 bp, Rattus norvegicus
  misc_feature (1)..(669): n=a, c, g or t
  ref <308>: DATABASE ACCESSION NUMBER: EMBL / AA800017
  ref <309>: DATABASE ENTRY DATE: 2000-03-03
gactgcttcatctcccgcttttattgactagtcacagtccacctgatatgggcagttttgcttccctaatagtttagcttgaaaggtaattaccagaactttgctaggtccaacatatatgccccaccctgttcctctccaaccgtttccagggtccctgcagtatggcatgtgactacatgtatgttctgggattggaacatattccagctttccacaatgcttgcaatcactgccacacacacatacagtagaatttgtttgcctctgtgtctatctcctgcattgacagtaatatacaacgttactaattaagacaagctaggtcaaaggtcctcaaggactacataaggagattatcaaacanaacataaactccaagaggactgggggtacagtgcttgcctactatgtacaagcccctggatttactgcctagcacaagtacccaacagtaacagaccacgtcacagggacatttacttcaggtggnaaatgcaggcaataagacccatcgttcagtcatcctgtgctacacagtgagtttgaggctggtctgggctgttgagacaacttctcaagancanngcaaacagacccaagaattcaattaaagaagcagacaatcctcgggagtttaagggaagatggtcttcataccatttctgg

SEQ ID NO: 1916 - DNA, 4160 bp, Rattus norvegicus
  ref <308>: DATABASE ACCESSION NUMBER: Refseq / NM_130894
  ref <309>: DATABASE ENTRY DATE: 2003-01-13
cgcgaggccgggaaggtgaagttcagacaggtggagtcaacaccatcagtagccaatctggacctgaatcggcacagaggagacctcaagttcttttcatctttttgactccagccatgtccatgatgcccaacctgtgaaggtcccttaccagctagaaacgagatgtccctgctcttttctcgatgcaactccatcgtcaccgtcaagaaggataagcgacacatggctgaggtgaatgcttcccctctcaagcactttgtcactgccaagaaaaagatcaatggcatctttgagcagctgggggcctacatccaagagagtgccggcttccttgaagacacccacaggaatacagaactggacccagttactacagaagagcaggtcctggatgtcaaagggtactgtccaaggtcaggggaatcagcgaggtgctggccaggcggcacatgaaggtggctttttttggccggacgagcaatgggaagagcaccgtgatcaatgccatgctttgggacaaagttctgccatctgggattggccacaccaccaattgcttcctgcgggttgggggcacggatggccacgaggccttcctcctcacggagggctcagaagagaagaagagtgtcaagaccgtgaaccagctagcccatgccctccatcaggatgagcagctgcatgcaggcagcctggtgagtgtgatgtggcccaactccaagtgtccacttctgaaggatgacctcgtgctgatggacagccctgggatcgatgtcaccacggagctggacagctggattgataagttttgcctggatgctgatgtgtttgtactggtggccaactcagagtccacgctgatgcagacggagaagcagttcttccacaaagtgagtgagcgtctctcccggcccaacatcttcatcctgaacaaccgctgggatgcgtctgcctcggagcctgagtacatggaggaggtgcggcggcagcacatggaacgctgcaccagctttctggtggatgagctaggcgtggtggatcgagctcaggccggggaccggatcttctttgtgtctgccaaggaggtgctcagtgccagggtccagaaagcccagggcatgccagaaggaggtggcgctcttgcagaaggttttcaagtgaggatgtttgagtttcagaatttcgagaggcgatttgaggagtgcatttcccagtctgcagtaaagaccaaatttgagcagcacacagtccgggccaagcagattgcagaggccgtccgtctcatcatggattccctgcacattgcggctcaggagcagcgggtttattgtcttgaaatgcgggaagagcggcaagaccggctgagattcattgacaagcagctggagctcctggctcaagactataagctacggattaagcagatgacagaggaagtggaaaggcaggtgtccacagccatggctgaagagatcaggcgcctctctgtgctggttgacgagtaccagatggactttcacccatccccagttgtcctcaaggtttataagaatgaactgcaccgccatatagaggaaggcctgggacgaaacatgtctgaccgctgctccacagccattgccagttcactgcagactatgcagcaagacatgatagacggcttgaagccccttcttcctgtgtctgtgcggaatcagatagacatgctggtccctcgacagtgtttctccctcagctatgacctgaactgtgacaagctgtgcgctgactttcaggaggacatcgaattccatttctcccttggatggactatgctagtgaataggttcctgggccctaagaatagccggcgggccttgctgggctacaatgatcaggttcagcgtcctctccctctgacacctgccaaccccagcatgccacccttgccacagggctccctcacccaggaggagctcatggtctccatggttactggcctggcctctctgacttccaggacctctatgggcattctcgtggtcggaggagtggtgtggaaggcagtgggctggagactcatcgccctctcctttggactgtatggcctcctgtacgtgtatgagcggctgacctggaccaccagagccaaggagagggccttcaagcgccagtttgtggagtatgccagtgagaagctgcagctcattatcagttataccggctctaactgcagccaccaagttcagcaagaattgtctgggacatttgctcatctgtgccagcaagttgacatcacccgggataatctggagcaggaaattgctgccatgaacaagaaagttgaggctctggattcacttcagagcaaagccaaattgctcaggaataaagctggctggttggacagcgaactcaacatgttcatacaccagtacctgcagcccggcagatagtgggcagccagggcggacctgcaccgagaagagacagggccgcacctcccatcagctctagtccttggctgctgcagagagaaggaaagcacccactgtcttgtaccagttactccctaccccctgcaggaagacccccagctcatacccagtggagaccaacaaggactggacagctcagccccaaggagtcatgcatgtgtctgtgtctgctcatcatgctcagtcggttggaagtcactgtgcatttgataaggtcttcctcaggatgccatcctgcagaacgactgatgggcgccttcacaggcatcaggcaggcactcctttcagcccgagtacacctacagagagagaatgttgggggtgactggactccccagaaaagttcagggtactgaagaacttgtgtcttgcatttggccctcagctttagcactttttcccacttgcagagtctttcagttgtgcttggtggccaggctcacacaccctgggctttagactcaaccagcttatagggaaagctggagacccttgccagccagagcaaagtaagagctcaggggacggtatgtgaactagggtgtccgatgtggtagtgaggttggtgtctggcattgtgatgacaagggactcgcctcccttcttgcaagtttgctccaggtggttaaaggatgttgcaggaggaatggtggaagatgggagctgcccgggttagtacagaagaggtctctctatctgacctagcactgagtggctcacaaacctgtaaggctcaccttgctaatttgagctcatccctgccttggtacaagctccctgtggccaccgttctctggactggattgtgccgatgactgcagctggttacaaaacgacaggagaagcctggcggctgttctccttctgccccaaccctcaagcctcctcctcttctgctcctgaagcctcctgctgcttgcttcgcctcatgtcaacgctgaacttcttactgttaagtgttgaaattgttaatggtcaaaacagggaggatttcagtcaccaaggttgattgtcttggaagagcagttttagagtgatgaatcctttgtaggacaggtagagttagagataaagcactgggctccagcccctcccagaagcccacaaccaggagctctctgtgggacccatgggccatgtcctctcctgcccatgcctgtgtgtcacttcccctcagtctaccctttgtgctgggacagtgctggtcttggccaaggtcagcgtgaatggaaagacatagtgcattgccaggctggacggggtcatctcacagtgggtcattgccaggctggacggggtcatctcacagtgggtcaggacacatcagtgtcgtgtaatcccaatgagtgttatgtgctttttttttggggggggggtagaataaactcaaattctttttctgtatagcccttgagtaatgaatggaattttgagcttatataagtaaagattcatttataccaccagggagagcctgtatctgagagacgtttagcagagagcactttagtttcttgctgctaattgttgtgtgatcctttgctggggtgtagaaggcaccagacacagtgtgtttgcttctggtatatataggtgatgcatctgcctgggttacttgtatctctgccgatagtattggaacctaaaataaagccccagttgtgaccctgaaaaaaaaaa

SEQ ID NO: 1917 - protein, 661 aa, Rattus norvegicus
  ref <308>: DATABASE ACCESSION NUMBER: Refseq / NP_570964
  ref <309>: DATABASE ENTRY DATE: 2003-01-13
MKVAFFGRTSNGKSTVINAMLWDKVLPSGIGHTTNCFLRVGGTDGHEAFLLTEGSEEKKSVKTVNQLAHALHQDEQLHAGSLVSVMWPNSKCPLLKDDLVLMDSPGIDVTTELDSWIDKFCLDADVFVLVANSESTLMQTEKQFFHKVSERLSRPNIFILNNRWDASASEPEYMEEVRRQHMERCTSFLVDELGVVDRAQAGDRIFFVSAKEVLSARVQKAQGMPEGGGALAEGFQVRMFEFQNFERRFEECISQSAVKTKFEQHTVRAKQIAEAVRLIMDSLHIAAQEQRVYCLEMREERQDRLRFIDKQLELLAQDYKLRIKQMTEEVERQVSTAMAEEIRRLSVLVDEYQMDFHPSPVVLKVYKNELHRHIEEGLGRNMSDRCSTAIASSLQTMQQDMIDGLKPLLPVSVRNQIDMLVPRQCFSLSYDLNCDKLCADFQEDIEFHFSLGWTMLVNRFLGPKNSRRALLGYNDQVQRPLPLTPANPSMPPLPQGSLTQEELMVSMVTGLASLTSRTSMGILVVGGVVWKAVGWRLIALSFGLYGLLYVYERLTWTTRAKERAFKRQFVEYASEKLQLIISYTGSNCSHQVQQELSGTFAHLCQQVDITRDNLEQEIAAMNKKVEALDSLQSKAKLLRNKAGWLDSELNMFIHQYLQPGR

SEQ ID NO: 1918 - DNA, 534 bp, Homo sapiens
  ref <308>: DATABASE ACCESSION NUMBER: Refseq / NM_001016
  ref <309>: DATABASE ENTRY DATE: 2003-01-15
ctttccctgccgccgccgagtcgcgcggaggcggaggcttgggtgcgttcaagattcagcttcacccgtaacccaccgccatggccgaggaaggcattgctgctggaggtgtaatggacgttaatactgctttacaagaggttctgaagactgccctcatccacgatggcctagcacgtggaattcgcgaagctgccaaagccttagacaagcgccaagcccatctttgtgtgcttgcatccaactgtgatgagcctatgtatgtcaagttggtggaggccctttgtgctgaacaccaaatcaacctaattaaggttgatgacaacaagaaactaggagaatgggtaggcctttgtaaaattgacagagaggggaaaccccgtaaagtggttggttgcagttgtgtagtagttaaggactatggcaaggagtctcaggccaaggatgtcattgaagagtatttcaaatgcaagaaatgaagaaataaatctttggctcacaaaaaaaaaaaaaaaaaaaaaaaaaaaaaaaaaa

SEQ ID NO: 1919 - protein, 132 aa, Homo sapiens [sequence omitted]

SEQ ID NO: 1920 - DNA, 617 bp, Rattus norvegicus
  ref <308>: DATABASE ACCESSION NUMBER: EMBL / AA891824
  ref <309>: DATABASE ENTRY DATE: 2000-03-03
cccagtacattggacctaaacagtggctctcattctttaacaggattacaagtgagcgggctccacccagacctttgttttgctttgaggtactgttgtttgacacttcgcttcctgtgcaccacggtcctggggaagggtggtctttgtcttcagctaagtagtttactcgccattttcttctggaaacaataacatgtctctaagcattgtttcttgtgttgtgtgacattcaaatgtcattttttttttgaacgaaaaatactttcccctttgtgttttggcaggttcgttaactatttatgaagacacattttagctgagtattctataatttacactcttaagaaattatcagttggaaccaagaaagagcaagggaatgtacaatgttctcttctggcgaggggaagtcagtccccctgtattatatgtatgtaaccattcatctgcacagatagggcgaggagtcccgcgcggaaagccgcccgccctgagcttcttagcctccactgcatgtttcgggtttcccactgcttcaagaagttgcacaaacttttcatcccgtagcagtccgagtggctctggattaggtgccatgccctctgtggcccagc

SEQ ID NO: 1921 - DNA, 1803 bp, Rattus norvegicus
  ref <308>: DATABASE ACCESSION NUMBER: Refseq / NM_133419
  ref <309>: DATABASE ENTRY DATE: 2002-03-06
gtcccggcggcgcgtggtgaccgttggcgtgcgcggttctcggctcgcggcggcggttagcggcggttggccgggttgtctgcctgcgacatggcggacgcggaagccgccatgacgttcccgaagaagcacaagaagaagaaagagcggaagccgctgccggaagctgacgtggctgagatccagcacgcggaagatttcctgatcaaaccggagtccaaggcggctcagttggacacctcccagtggcccctgctgctcaagaactttgacagactgaacgtgcggacgacccactacacgcccatcccgtgcggctccaacccgctgaagagggagatcggggagtacgtcaggaccggcttcatcaacctggacaagccatccaacccctcttcgcacgaggtcgtggcctggatccgccgcatcctgcgcgtggagaagacggggcacagcgggacacttgaccccaaggtcaccgggtgcctcatcgtctgcatcgagcgcgccacgcgcctggtcaagtcacagcagagcgcgggcaaagagtatgtcggggtcgtgcggctgcacaatgctatcgaggggaccgcccagctctccagggccctggagaccctgacaggcgccctgttccagcgtcccccgctcatcgcagcagtgaagcggcagctgcgcgtgcgcacaatctatgagagccgtgttgtcgagtatgaccctgagcgcaggctgggtgtgttctgggtgagctgcgaggctggcacctacatccggacgctgtgcgtgcacctggggctgctgctgggcgtcggggggcagatgcaggagctgcggcgcgtgcgctcgggggtcgtgggcgagcgggaccacatggtgaccatgcacgacgtcctggacgcgcagtatctatacgaccaccaccgggacgagagctacctgcgccgcgtggttttcccactggagaagctgctgacgtcgcacaagcgcctggtgatgaaggacagtgcggtcaacgccatctgctacggcgcgaagatcatgctccccggcctcctgcgctacgaggacggcatcgaggtcaaccaggaggtcgtggtcatcaccaccaagggcgaggccgtctgcgtggccatcgcactgatgacgacggctgtgatctccacgtgcgaccacggggtagtagcgaagatcaagcgcgtcatcatggagcgggacacctacccccgcaagtggggcctggggccgaaggcaagccagaagaagcagctgatcaagcagggcctcctggacaaacatggccgacccacggacggcacccccgcctcctggacgcgcgactacgtggactacagtgactccagcaagaaagcgacggccgccgaagccacgccgggccctggggtcaccgcggacgccgccagcatcgtgaaaaggaaacgcgatagcgacagcgacgccgacgaggcgacgcccactaccacgccccgggtgaagaaggagaagaagaagaaaaaggagaaggcggacggcggggaggaggctgcggaggacggggacggcgacgccacaaggaagaaaaagaagaagaaggcaagggcggcagaggagctcagtggttagcgactacccccgacccccacgcggcgaccatcccgtcctgttttaaggacgcgaggcgtaggaacggggtctccaccactgacccctccactcacttgagcccccgacgaccgcccgcggcgattcgccggaggccatgttgagcgacaccgcagacggccctggcctgccctccattttttt

SEQ ID NO: 1922 - protein, 509 aa, Rattus norvegicus
  ref <308>: DATABASE ACCESSION NUMBER: Refseq / NP_596910
  ref <309>: DATABASE ENTRY DATE: 2002-03-06
MADAEAAMTFPKKHKKKKERKPLPEADVAEIQHAEDFLIKPESKAAQLDTSQWPLLLKNFDRLNVRTTHYTPIPCGSNPLKREIGEYVRTGFINLDKPSNPSSHEVVAWIRRILRVEKTGHSGTLDPKVTGCLIVCIERATRLVKSQQSAGKEYVGVVRLHNAIEGTAQLSRALETLTGALFQRPPLIAAVKRQLRVRTIYESRVVEYDPERRLGVFWVSCEAGTYIRTLCVHLGLLLGVGGQMQELRRVRSGVVGERDHMVTMHDVLDAQYLYDHHRDESYLRRVVFPLEKLLTSHKRLVMKDSAVNAICYGAKIMLPGLLRYEDGIEVNQEVVVITTKGEAVCVAIALMTTAVISTCDHGVVAKIKRVIMERDTYPRKWGLGPKASQKKQLIKQGLLDKHGRPTDGTPASWTRDYVDYSDSSKKATAAEATPGPGVTADAASIVKRKRDSDSDADEATPTTTPRVKKEKKKKKEKADGGEEAAEDGDGDATRKKKKKKARAAEELSG

SEQ ID NO: 1923 - DNA, 2465 bp, Homo sapiens
  ref <308>: DATABASE ACCESSION NUMBER: Refseq / NM_001363
  ref <309>: DATABASE ENTRY DATE: 2001-07-25
gagcagcgcggcctgacgggaccaaggcggcgggagtctgcggtcgttccctcggctgtggaccgggcggcacgcacgcggtgcagggtaacatggcggatgcggaagtaattattttgccaaagaaacataagaagaaaaaggagcggaagtcattgccagaagaagatgtagccgaaatacaacacgctgaagaatttcttatcaaacctgaatccaaagttgctaagttggacacgtctcagtggccccttttgctaaagaattttgataagctgaatgtaaggacaacacactatacacctcttgcatgtggttcaaatcctctgaagagagagattggggactatatcaggacaggtttcattaatcttgacaagccctctaacccctcttcccatgaggtggtagcctggattcgacggatacttcgggtggagaagacagggcacagtggtactctggatcccaaggtgactggttgtttaatcgtgtgcatagaacgagccactcgcttggtgaagtcacaacagagtgcaggcaaagagtatgtggggattgtccggctgcacaatgctattgaaggggggacccagctttctagggccctagaaactctgacaggtgccttattccagcgacccccacttattgctgcagtaaagaggcagctccgagtgaggaccatctacgagagcaaaatgattgaatacgatcctgaaagaagattaggaatcttttgggtgagttgtgaggctggcacctacattcggacattatgtgtgcaccttggtttgttattgggagttggtggtcagatgcaggagcttcggagggttcgttctggagtcatgagtgaaaaggaccacatggtgacaatgcatgatgtgcttgatgctcagtggctgtatgataaccacaaggatgagagttacctgcggcgagttgtttaccctttggaaaagctgttgacatctcataaacggctggttatgaaagacagtgcagtaaatgccatctgctatggggccaagattatgcttccaggtgttcttcgatatgaggacggcattgaggtcaatcaggagattgtggttatcaccaccaaaggagaagcaatctgcatggctattgcattaatgaccacagcggtcatctctacctgcgaccatggtatagtagccaagatcaagagagtgatcatggagagagacacttaccctcggaagtggggtttaggtccaaaggcaagtcagaagaagctgatgatcaagcagggccttctggacaagcatgggaagcccacagacagcacacctgccacctggaagcaggagtatgttgactacagtgagtctgccaaaaaagaggtggttgctgaagtggtaaaagccccgcaggtagttgccgaagcagcaaaaactgcgaagcggaagcgagagagtgagagtgaaagtgacgagactcctccagcagctcctcagttgatcaagaaggaaaagaagaagagtaagaaggacaagaaggccaaagctggtctggagagcggggccgagcctggagatggggacagtgataccaccaagaagaagaagaagaagaagaaagcaaaagaggtagaattggtttctgagtagtgaaggccacttgaagctggaggagaaactaaagccttattgagaaaacatgttatagatccttttgttgctgagagagtggaacataggtcctagacagggtgaagagttctggcacattttagctgctactttgagacctcggtgatgttacctggtgtggtcatcccatcttgtcctgttttaaggatatgggtggtgaaagatgaaagaggcagagtttatcccaatgacttctctgtttgagttgggaagcctcaccttcagacccagtaactgtccgcagctgtctgctagtggttgtcttaacatcgtagtcctagtttgcattttttaaatcccctctgtttaaaaggtttgtaaaacaaaaacaaaaaactaagtctgctcagtgaaatgctgtagaaccctaaataagtggtagaagagtgtcactgaattttgtctctgaattcagtataactgagttttgtccatgctggtgtctgggttataggcctgatgggcctggtagttttccatcttgttctggcctagaggtcagtcctttgcacttcctcaaagcttgtgtacagtgctcacctaaatccatctgactacttgttcctgtgccctcttgttttaggcctcgtttacttttaaaaaatgaaattgttcattgctgggagaagaatgttgtaatttttacttattaaagtcaacttgttaagttttttatgtattcctgttgggttttcttgttgatctcatgctagcagagcaaaaattgtaaaatattttgattaaaaatctagggacctttatgtcctatttggaattcgatatcaa

SEQ ID NO: 1924 - protein, 514 aa, Homo sapiens
  ref <308>: DATABASE ACCESSION NUMBER: Refseq / NP_001354
  ref <309>: DATABASE ENTRY DATE: 2001-07-25
MADAEVIILPKKHKKKKERKSLPEEDVAEIQHAEEFLIKPESKVAKLDTSQWPLLLKNFDKLNVRTTHYTPLACGSNPLKREIGDYIRTGFINLDKPSNPSSHEVVAWIRRILRVEKTGHSGTLDPKVTGCLIVCIERATRLVKSQQSAGKEYVGIVRLHNAIEGGTQLSRALETLTGALFQRPPLIAAVKRQLRVRTIYESKMIEYDPERRLGIFWVSCEAGTYIRTLCVHLGLLLGVGGQMQELRRVRSGVMSEKDHMVTMHDVLDAQWLYDNHKDESYLRRVVYPLEKLLTSHKRLVMKDSAVNAICYGAKIMLPGVLRYEDGIEVNQEIVVITTKGEAICMAIALMTTAVISTCDHGIVAKIKRVIMERDTYPRKWGLGPKASQKKLMIKQGLLDKHGKPTDSTPATWKQEYVDYSESAKKEVVAEVVKAPQVVAEAAKTAKRKRESESESDETPPAAPQLIKKEKKKSKKDKKAKAGLESGAEPGDGDSDTTKKKKKKKKAKEVELVSE

SEQ ID NO: 1925 - DNA, 443 bp, Rattus norvegicus
  ref <308>: DATABASE ACCESSION NUMBER: EMBL / AA892572
  ref <309>: DATABASE ENTRY DATE: 2000-03-03
gccaaggacaggaaaatggcggcttggggttcgccggcgcgcactctgcgaggccttctgcgggagctgcgctacctgaacgcggccaccgggcgaccataccgcgacacagcagcctaccggtacctggttaaggctttccgagcacatcgggtcaccagtgagaagttgtgcagagcccaacacgagcttcacttccaagctgccacctatctctgcctcttgcgtagtatccggcaacatgtagcccttcatcaggaatttcatggcaagggtgagcgctcagtggaggagtctgctggtttggtgggcctccagttgccccatcagcctggagggaagggctgggagccatgatgcagaaagtcctcagatgtttcttcattcaagaatttaaccatttctaccaatatgtatttatcattaaatcttttttaaagtgt

SEQ ID NO: 1926 - DNA, 1044 bp, Homo sapiens
  ref <308>: DATABASE ACCESSION NUMBER: EMBL / BC008467
  ref <309>: DATABASE ENTRY DATE: 2001-07-13
gggttttcagggtcgtaggacgccgttgggcaccacgctcggagaaggacaggacaatggcggccttagggtccccggcgcacacttttcgaggacttctgcgggagttgcgctacctgagcgcggccaccggccgaccctatcgcgacaccgcggcctatcggtaccttgtgaaggctttccgtgcacatcgggtcaccagtgaaaagttgtgcagagcccaacatgagcttcatttccaagctgccacctatctctgcctcctgcgtagcatccggaaacatgtggccctacatcaggaatttcatggcaagggtgagcgctcggtggaggagtctgctggcttggtgggtctcaagttgccccatcagcctggagggaagggctgggagccatgaacatggagaatatccttggatgctgcattcataggagaattgaataatttctatcaatatgtatttatcattaaattttttttaagtttaaggtttttctctgtaattttgtttactagttcttaggggaattaactggacatttcatctttactctcagtgaatttactgaactttttgcactagactgatgttgtttttctacttaaaaaaatttttttatattttattttaaaagtagtacaagccttagccaggcacggtggctcacgcctgtaatcccagcactttgggaggccaaggcaggcggatcacctgaggtcgggagttcgcgaccagcctgaccaacatggaaaaaccccgtctctactaaaaatacaaaattagccaggcgtggtggcacatgcctgtagtcccagctactcaggaggctgggacaggagaatcgcttgaacccgggaggtggaggttgcggtgagctgagatcgcgccatggcactcactccagcctgggcaacaagagcaaaactctgtctcaaaaaaaaaaaaaaaaattagtataagccttttgtttaaggaattcaaatgttataaacataaaataaaagaaaccctccaaaaaaaaaaaaaaaaaaaaaaaaaaaaa

SEQ ID NO: 1927 - protein, 113 aa, Homo sapiens
MAALGSPAHTFRGLLRELRYLSAATGRPYRDTAAYRYLVKAFRAHRVTSEKLCRAQHELHFQAATYLCLLRSIRKHVALHQEFHGKGERSVEESAGLVGLKLPHQPGGKGWEP

SEQ ID NO: 1928 - DNA, 485 bp, Rattus norvegicus
  ref <308>: DATABASE ACCESSION NUMBER: EMBL / AA894210
  ref <309>: DATABASE ENTRY DATE: 2000-03-03
gtgaaaccacaaggaaatggaaggtgagatttcacaaagaaataaacaaagttattaactttaaagacaggtgaccaaaagctcaaaagagaaatgtcagagtccagataggaaagtgccttcccacccagggttaggctacaatccaagtggctgtataacacacacacagttccactcagggtcagagggagcatcctgggattcagactcagcaatggtgccaacatgaatctacctcgtgccagagtctgagtagcctagtctagcacccaacccagctaagattggtcagcagttcccatgagtgaacactgaagaagggaattaggagaagggaactaggaaaataaatcagagtaagccctaaatgtaactaaatgatggtcagggattactaattactagtacttctatgatttctcgtaattctgtaacttctctgatgcttgttgatattgttaatttatgtatttcctgtactt

SEQ ID NO: 1929 - DNA, 1927 bp, Homo sapiens
  ref <308>: DATABASE ACCESSION NUMBER: EMBL / AF038190
  ref <309>: DATABASE ENTRY DATE: 1998-01-23
gaataattgatggaacaactttctggaagagattagagggtatgtgtcttttgaactctggaagacttgattttagagaggataaaggaagaaagtggataattctagaattaaacaccaaaaggttctatgtgtctggcaccatgtgaagcaacttacctattatttcatttcatttcatttcatttcatttcatcctataacagtcctaagagatcaaataatttgtccacgattacacagtcagtatgtagcagggccagcattcaaatcctcatctgtctatcaaacccatattcccttctattatgctatactgttttcaagttgaaggaaatcaaaccaagaatttctgttttttcactgcgattataaggaaaaatattatttttctgaaatgagacatattgatgtttaagaccttgaggtgacaggtaaaatttggaatatctgtgatgggaaaatgcaaaaaggaaggaatgggtaaaagatacctattaccatctatgccctggtatttcacttcttccattgcacagcatagactttagattggccatggattaaaaatttgagaattctgacaaaaaaactaaatagaaaggagtttgttttttaagtaggtatatgatgggtcaaatataaacttactactaacaaaactttaaacaattccctaaatgccaaacttttataaacaaaaatcaaacaaaccatcaagcaaaagagtccatagccagcagaccaaatgttgaaatctctgggctaatttgtaagatctatgttttaaaactccttagtgaagaggggcaagaaaacctctcctctttttcctctcttggtggaaatgttttgttgttgttgttggttttttcctatactatatgtaatttctatattgttgttttgtgtattttggtattataaaattatacttcttagattccgttaagaatactttctggggtgtgagccacctgagttattagttagcaaaatgaacctggggaagtgggaagagctagtattctcaattggcaagggattgattcttcaatgggttcagcaattcacttccctctgaaattaagtggcaaagtaatagcatcccttaaaaaacaggacattggtgagaggtagaatagcaggaggaattttgaaacatggagggatggctactggaaaagaactgatgaagtgcagagtctctccagacaatggtagaaaccacaggactacattaagattgggcccaaatactagtttagaaaaaggtaaataaaactagctttacttaagagtacagccagcttaactactggctagtggacatatttcagacaaatctaactggagagaaaaacagaccaggagagaaagcgaagttacaaggaaatggaactagagaaacctcacaaagggataaaggaggtaattaaaggttaaagccagatagcctcgagctcaaaggagaaatattggaggccagataggaaagtgccttcctactcagggggttatggatccagggtggctaaagaatagaagtagagttccacccagggccagagggaacaatctgggattcagacacagcagtggtgccaacgtgaatctacctcgtgctagagtctgagtagcctagtctatcacccaacacagataagactggacaggggctcccaggaaccaacatctaagaagggagtttggagaggggctaaaagaaagcaggttaagccccaaatgtaactgaatgatgaccagggataactatttactagtgcttttatgatttattgtaactctgtaactttcccagtatttgttaattttttaacttctgtttctcctgtacttacgagcagtaaaagttgttcaaaacataaaaaaaaaaaaaaaaaaaaaaaaaaaaaaaaaaaaaaaa

SEQ ID NO: 1930 - DNA, 991 bp, Rattus norvegicus
  ref <308>: DATABASE ACCESSION NUMBER: Refseq / NM_017359
  ref <309>: DATABASE ENTRY DATE: 2003-01-14
ggcaccggcgccgccaccgtcggggcttcctcgacgaggccgttcggaagatctcccgctccgtctcgagagctgctttctctcccgcacacgcttccccgctgctgaggccccagaacgcccgggtgaggagttggccgtagtgagcagcaccgatcccttggggctaccggcggcgagcgcccgagccgctcctcccaatggcgaagaagacgtacgacctgcttttcaagctgctcctgatcggggactcgggagtgggcaagacctgcgtcctttttcgtttttcggatgatgccttcaataccacctttatttccaccatagaaatagactttaagatcaaaacagtggaactacaaggaaagaagatcaagctacagatatgggacacagcaggccaggaacgatttcacaccatcacaacctcctactacagaggagcaatgggcatcatgctagtgtatgacatcaccaacggtaaaagttttgaaaacatcagcaagtggcttagaaacatagatcagcatgccaatgaagatgtggaaaggatgttactacggaacaagtgtgacatggaccacaagagagttgtaccgaaaggcaaaggagagcagattgcaagggagcatcgtattaggttttttgagactagtgcaaaagcaaatataaacatcgaaaaggcgttcctcacattacctgaagacatcctccgaaagacccctgtaaaagaacccaacagtgaaaacgtagatatcagcagtggaggaggtgtgacgggctggaagagcaaatgctgctgagcgctctcccgtccatctgttcccatccaccatccgtttctcttcttgctgcaaaataaaacactctgtccatttttaactctaaacagatatttttgttcctcatcttaactattcagtccacctattttatttgtctttcatctgtgactgcttgcgactattataattttcttcaacaaaaaaaa

SEQ ID NO: 1931 - protein, 200 aa, Rattus norvegicus
  ref <308>: DATABASE ACCESSION NUMBER: Refseq / NP_059055
  ref <309>: DATABASE ENTRY DATE: 2003-01-14
MAKKTYDLLFKLLLIGDSGVGKTCVLFRFSDDAFNTTFISTIEIDFKIKTVELQGKKIKLQIWDTAGQERFHTITTSYYRGAMGIMLVYDITNGKSFENISKWLRNIDQHANEDVERMLLRNKCDMDHKRVVPKGKGEQIAREHRIRFFETSAKANINIEKAFLTLPEDILRKTPVKEPNSENVDISSGGGVTGWKSKCC

SEQ ID NO: 1932 - DNA, 667 bp, Rattus norvegicus
  ref <308>: DATABASE ACCESSION NUMBER: EMBL / AI232268
  ref <309>: DATABASE ENTRY DATE: 2000-03-03
taaaggacagattgcgtagtatcaaccagggcctagaccgcttgaggaaggtcagccaccagggctacggccccgccactgagtttgaagagccccgagtgatagatctgtgggacctggctcagtctgccaacttcaccgagaaggaactggagtcgttcagggaggagcttaagcacttcgaggccaaaatcgaaaagcacaaccactaccagaagcagctggagatttcccaccagaagctgaagcacgtggagagcatcggtgaccccgagcacatcagccgcaacaaggagaagtacgtcctgctggaggagaagacaaaggagctgggctacaaggtgaagaagcatctgcaggacctgtccagcagggtctcaagggctcggcacaatgagctctgagaccagaagccactggcagtagcctagagaggctcttgaagacactgggaactgtcaacttgtcatactggtgtggctgtccacagtggcaaggagaaataccgatctgatcctgctgcggctggcaaggactaattttctttcaagcaagtgtagctgtcaccgccctggttgagggctttgggtacatctaccaatgagatatgaccggtctccatgctgcagcaaaagtttacattgaaattatataaatctgtcactgg

SEQ ID NO: 1933 - DNA, 5122 bp, Homo sapiens
  ref <308>: DATABASE ACCESSION NUMBER: Refseq / NM_032866
  ref <309>: DATABASE ENTRY DATE: 2002-12-23
gactggaagaaagtgaaggggagctccggaagaacctggaggagctatccaggtgaagatggaacgggagcagcatcagactgagatcagggatctccaggaccagctctcagaaatgcacgatgaactggacagtgcaaagcgatcggaggacagggagaagggagctctgattgaggagctcttacaggcaaaacaggatcttcaagatctgctgattgccaaagaggggcgagaagacctcttgagaaagcgagagcgtgaactcaccgccctgaagggagccctgaaagaagaggtttccagccatgatcaggagatggacaagctgaaggagcaatatgatgctgagttgcaggccctgagggagagtgtggaagaagcaaccaagaatgtcgaggtcttggcgagcaggagcaacacttcagagcaagaccaggcggggactgaaatgcgcgtgaagcttctgcaggaggagaatgagaagctgcagggaagaagcgaagagctggagcggagagttgctcagcttcaaaggcagatcgaggacctgaaaggcgatgaagccaaggcgaaggaaacgctgaagaagtacgagggagaaatacgacagttagaggaggcccttgtgcacgtcagaaaggaagaaaaagaagctgtgtcagccagaagggccctggagaatgaactggaggctgctcagggaaatctgagtcagactacccaggagcagaagcagttgtctgagaagctcaaagaggagagtgagcagaaggagcagctaagaaggttgaagaacgagatggagaatgagcggtggcacctgggcaaaaccattgagaaactgcagaaggagatggcagacattgttgaggcctcccgtacctcaaccctggagctccagaaccagctggacgagtataaggagaaaaaccgcagggagctcgcagaaatgcaaagacagttgaaggagaaaacgctggaggcagaaaagtcccgactgacagccatgaaaatgcaggatgggatgcgtctgatggaggaagagttacgggactaccagagagctcaggatgaagcactcacaaaaaggcagcttctggagcagacgctgaaggacctggagtatgagctggaagccaagagtcacctcaaagatgaccgcagcaggctggtcaagcagatggaggacaaggtgtctcaactggagatggaactggaagaagagagaaacaactcagatttgctgactgagaggatcagtaggagcagggaacagatggagcagttgaggaatgagctacttcaggagagagctgcgagacaagacttggagtgcgacaagatttccctggagaggcagaacaaggacttaaagagccggattatccacctggaaggttcctacaggtccagcaaagaggggctggttgtgcagatggaggccaggatcgcggagctggaggaccgcctggagagtgaggagagggatcgggccaatcttcagctcagcaaccggcggctggagcggaaagtgaaggagctggtgatgcaggtggatgatgagcacctgtcattgactgatcagaaggaccagctgagcttgcgtttgaaagccatgaagcggcaggtggaggaggctgaggaggaaatcgacagactggaaagttctaaaaagaagctgcagagggagctggaggagcagatggacatgaatgagcatctgcaggggcagctcaactccatgaagaaggacttaagactgaagaagctgccgagtaaagtgctggatgacatggatgacgacgatgacctcagcacggatgggggaagcctctatgaggcgcctgtgagctacacattctccaaggacagcaccgtcgccagccagatctgagtgctctcccgggctgtggaagtacctgtcattcctgcaggagctgcagccacccaaagtgggaggcagggaggggagcatctgtctgccactgagaccaatcacagcctctttgcacagcatgccagctcctcagtgttacattcctcgccagggtctctcagtgggtcttcgacagagagcttttgcagtttaaaatgttgggatgcctgaggaccaggagccaccacccactggggtgttgtgagagatacactttggtaggctgaggcccctgttccacagccactatttgcattgctgtccctgccccctcatcactccccctgccaagacaaagggtccagaaggctaggacttacttaatagcactgtgcagggaggaaaccatgtatagcttgtacatattttaaaccagaccttctcacgaactgctgctgttgggtttggaatgtgatggaggcttggtagggtggctggtttgtaaagttcatgcatctatattgagtattctttttttttttttttgagatggagtttcattcttgttgccgaggctggagtgcaatggcgcaaccttggctcactgcaacctctgcctccctggttcaagtgattctcctgcctcatcctcccaagaagctgagattacggatgaccaccaccactcctggctaattttttgtatttagtagagacggggtttcaccatgttggtcaggctggtcttgaactcctgacctcaggtgatccacctgcctcagcctcccaaagtgctgagattacaggcatgagccaccacgcccagccattgagtattcttttttaaaatatgaagctattagattttaagtgttgaggagcagaggtgagaagagagagagagagagaaagtcaaataaagtcaaagaccagtttggaaaccaaagttggaaaagaagaattgtagtggtcatggacagctaagactgagcatagcagttcacatggtctgggtaaacaagtcactggcacaggggaaagccagaaggttgcttgtgtctgtgactgcagctatggccttgtttgcttagtttatctggaattctgttataatttctgaactgttctgagacctgttcccagtcactgattgcaatttcttttacacaggttgggtagggagagttgtaggtaaggccttaaacaaatgaggccgtttctggaaggatagggctgtgtggtcatgtcccacagcaagcttttgggatcgggggaataagagggtatgggggaaaggttcatagacttaggtgtgagaatgaggtgggaggtgtctggtaaggtcatgggggaagggagatgagagaggagataggcagatgtgggtatggggcccagtgtgagaaggaagacagagaagttcttgaaagctgggggatgtgtgggcaagaggtggattgagcaggatctcagggttatgtcgaggaagggaagaaagaaacagaagtcaggcagaggcgtgtctgtgcaaactggaggactccttccaacttcctggaacaaagcgacatcgccagcagcaggctggcagggagtggttgaggtctgggggccaggccacatggctggagaggaatttcagggagcatagcatcgggaggatgctacatatccagggactccctcctggccttcctgtgtcacttcacaatgtgacagtccccaggcatgcccacaggccaggcccagtcacagctgggcttccacaggtcagaatatgggacaggacatggtcagggagaggaccctgtgagttggtgacatatatgtggcagagatggtagtgctcagctgcttcagcagtgtccccaaccatcccaatagggtgggggcctgtgggccagaggactccatgacagtagccatggagtcccacctgtgccaggtcagagcccacccggcaggtttcagagtggtcagcccagtttaagggtgggagtctggagccagacagccaagccccttccacatctacagggtcactgtcatcctcaccacagccaggggtgattctcacctctgcctgcttatgtggggtgtggccgattcctccctttagtcattcattcatttagcacatatttattgggcatcggtgatgtgtcaggcacagtccttggcacacagaatacagcagtgaattaaacaggcaaaaattcctcccctcctggagctcagtgtcaggaaagggggtgataaatgacaatcaaatcgacatggaggttgagcacctctgtactcagccctctgtctgtccttctgaggacgcaacaagcctggttccctagagctcactttgaccctcaatatgttcataatttccctgctgcttctcccatcgttagacatctgccagtaagcctgctgagagaagcctcagcccactcatacctagagacgctgctggggaaggtcagcacacccaagaactttgggagtgtgtgtctgttttggtttgtgagaaagtagctgcccctcattctggccagttctttccagtagccatggggctggctacaagaagcaaaactgcccatgcaaagagaacacaggtcacttttcaaaacacttgcatcattaccctaaaaataggctgttatgcgttttgacaattgcgctatcctacactctgagggagttggcaacgcatgcggtatagtggagtgggaagagttgagactgaaagttaagagaagggttttcaagtcccggctcatctcaccccagtgactttgacagtgtgctcactctcagagccatggattacctggaacaaagtgcagattagtgcccacggtcctttccaggtataacatgctatcgttctttaattttattatatatacatacttttcttctgttttttgctttaagaactaaccccgatcaagagtattttctttagctagcttaaaaagaaaacatatattttatgtaaaaacacatacatggccaaatgcaatactgaagagacaatcatcctgtatcttttatggtttttcctgcttctgagcgtcgttctacaatgcccgttgacttattccattgcgtctctgctttagggtatggtttggtcgctttggttgtcatgagaaagagacattctccttgcagctacctccatgtgagtgaattcctggataaagcaagatttcctttcaataaacgctgtcacccaatggg

SEQ ID NO: 1934 - protein, 612 aa, Homo sapiens
  ref <308>: DATABASE ACCESSION NUMBER: Refseq / NP_116255
  ref <309>: DATABASE ENTRY DATE: 2002-12-23
MEREQHQTEIRDLQDQLSEMHDELDSAKRSEDREKGALIEELLQAKQDLQDLLIAKEGREDLLRKRERELTALKGALKEEVSSHDQEMDKLKEQYDAELQALRESVEEATKNVEVLASRSNTSEQDQAGTEMRVKLLQEENEKLQGRSEELERRVAQLQRQIEDLKGDEAKAKETLKKYEGEIRQLEEALVHVRKEEKEAVSARRALENELEAAQGNLSQTTQEQKQLSEKLKEESEQKEQLRRLKNEMENERWHLGKTIEKLQKEMADIVEASRTSTLELQNQLDEYKEKNRRELAEMQRQLKEKTLEAEKSRLTAMKMQDGMRLMEEELRDYQRAQDEALTKRQLLEQTLKDLEYELEAKSHLKDDRSRLVKQMEDKVSQLEMELEEERNNSDLLTERISRSREQMEQLRNELLQERAARQDLECDKISLERQNKDLKSRIIHLEGSYRSSKEGLVVQMEARIAELEDRLESEERDRANLQLSNRRLERKVKELVMQVDDEHLSLTDQKDQLSLRLKAMKRQVEEAEEEIDRLESSKKKLQRELEEQMDMNEHLQGQLNSMKKDLRLKKLPSKVLDDMDDDDDLSTDGGSLYEAPVSYTFSKDSTVASQI

SEQ ID NO: 1935 - DNA, 1341 bp, Rattus norvegicus
  ref <308>: DATABASE ACCESSION NUMBER: Refseq / NM_022921
  ref <309>: DATABASE ENTRY DATE: 2003-01-13
catccatcagggctaccacgggaaggatggcgatctcaaacaagttctctctcctgctgatggtggtggtcgctctggctgttagccgaacaggtgctggcacacattcactgcgttatttccacactgccctgtcacggccgggccgtggggagcctcaatatatttctgtcggctatgtggatgacaagctgtttcagcgctgtgatagcgttgaggagattccgaggatggaggcccgtgcaccttggatggagaaggaaggaccagagtattgggaggagctgaaactcaaagtaaaaagcattgcacaaagagccagagcaagacttcggaccttgatccgctactacaaccagagtgaaggcggttctcacatcctgcagtggatggttgcctgcgaggtggggccagacatgagacttcttggagcacactatcaggctgcatatgacggctcggattacatcaccctgaatgaggacctgagctcctggactgcagcagacatggtggctcagatcacgaagagcgagttagagtcagaaggtagagcagaatacttcagagcctatgtggatggagagtgcctggagctgctccatagattcctgcagaatggaaaagagattcttcagagagcagatcccccaaaggcacatgtgacccttcacccaagacctgaaggtgatgtcaccctgaggtgttgggccctgggcttctaccctgctgacatcaccctaacctggcagttgaatggggaggacctgacccaggacatggagcttgtggagaccaggccttcaggggatggaaccttccagaagtgggcatctgtggtggtgccttctggagaggagcagaaatacacatgccatgtggagcatgaggggctgcctgagcctcttgtcctgaaatggggaggatcgtctcagtcctttgtcgtcatcatggtcatcatagtaatcattgttattctggctctcctgggaggtgtgctcactgttgttttggtgtacaggaggaggggcgcaggcatgctctgatgcttctctcaccatttagaaagtatgaaagcactgagtgtgtgggactgagtctgttccccataaccgtgttacctcccttttcaccagtaccacagtggaatctgggacttcttcatgccttgtggaactttagttttctatgagcggcttcttccctggtcaaaataagaatgtatatataactttatttttttttaccttcttgttataagaagttggttgtgttattaaaatttgtaaatttgaaagggaataaaagtgaacttacaaccaaaaaaaaaaaaaaaaaaaa

SEQ ID NO: 1936 - protein, 339 aa, Rattus norvegicus
  ref <308>: DATABASE ACCESSION NUMBER: Refseq / NP_075210
  ref <309>: DATABASE ENTRY DATE: 2003-01-13
MAISNKFSLLLMVVVALAVSRTGAGTHSLRYFHTALSRPGRGEPQYISVGYVDDKLFQRCDSVEEIPRMEARAPWMEKEGPEYWEELKLKVKSIAQRARARLRTLIRYYNQSEGGSHILQWMVACEVGPDMRLLGAHYQAAYDGSDYITLNEDLSSWTAADMVAQITKSELESEGRAEYFRAYVDGECLELLHRFLQNGKEILQRADPPKAHVTLHPRPEGDVTLRCWALGFYPADITLTWQLNGEDLTQDMELVETRPSGDGTFQKWASVVVPSGEEQKYTCHVEHEGLPEPLVLKWGGSSQSFVVIMVIIVIIVILALLGGVLTVVLVYRRRGAGML

SEQ ID NO: 1937 - DNA, 897 bp, Rattus norvegicus
  ref <308>: DATABASE ACCESSION NUMBER: Refseq / NM_019213
  ref <309>: DATABASE ENTRY DATE: 2003-01-14
cggcacgaggacgagagcacccgggaagagtcggcgccgctagtgccgggaccaggagcctccgcgagcaagatggccgctcccgagaccgaggccagggggcaggggtactaagtccggacccgcgtgcccttctcccggccgcctgcgccctcatcaagacctcgcgcttctagccaagacatctacatggattattctcgccgtggtcacgaggccgttccaatagagctctagttggcccagattgagaactctggcatttggctgctctgagctggaacctccgggaggtctgctgcaacaggtgcgaccctgaccgctccatgctcgtgggcgcggggaggcgtggcctcccccggggcggccacctctgttggttgctgtgcgctttcaccttaaagctctgcgaagcagaggccccggtgcgcgaggagaagctatcagtgagcacatcaacttcaccatgttggttggtagaagagtttgtggtgaccgaagagtgtactccgtgttctaacttccagattaaaacgacacctgagtgtggttctacagggtatgtggagaaaatcacatgcagctcatctaagaggaatgaattcaaaagctgccgttcagctcttctggaacaacacttattttggaagtttgaaggcatcgtggtgggggtagctttagtcttcgcttgccttgtcatcattcgtcagcgacagctggacagaaaggctcttgaaaaagtccggaagcaaattgaatccatatagctgaatctgctgtgtatggtgggtcccacggatgcatctcagatggagaaagttcagggctaatgtgccctcataagccttgtggtagtgcatcttcaatgactcctcttccaggccattaatgagcaca

SEQ ID NO: 1938 - protein, 146 aa, Rattus norvegicus
  ref <308>: DATABASE ACCESSION NUMBER: Refseq / NP_062086
  ref <309>: DATABASE ENTRY DATE: 2003-01-14
MLVGAGRRGLPRGGHLCWLLCAFTLKLCEAEAPVREEKLSVSTSTSPCWLVEEFVVTEECTPCSNFQIKTTPECGSTGYVEKITCSSSKRNEFKSCRSALLEQHLFWKFEGIVVGVALVFACLVIIRQRQLDRKALEKVRKQIESI

SEQ ID NO: 1939 - DNA, 787 bp, Rattus norvegicus; identical to SEQ ID NO: 48
  ref <308>: DATABASE ACCESSION NUMBER: Refseq / NM_031970
  ref <309>: DATABASE ENTRY DATE: 2002-11-05

SEQ ID NO: 1940 - protein, 205 aa, Rattus norvegicus; identical to SEQ ID NO: 49
  ref <308>: DATABASE ACCESSION NUMBER: Refseq / NP_114176
  ref <309>: DATABASE ENTRY DATE: 2002-11-05

SEQ ID NO: 1941 - DNA, 1274 bp, Rattus norvegicus
  ref <308>: DATABASE ACCESSION NUMBER: Refseq / NM_012948
  ref <309>: DATABASE ENTRY DATE: 2003-01-14
agagcggcgcttcctctgctaggctgcgagctgtctgtttcttgggccctgtgtataggtgccggccgcccctggcgttcaacaccgcttccaggtgccggccgtgtctgccatggacgactatgcggttttgtccgatactgagctggccgcagtgctacgccagtacaacatcccgcatgggcctattctgggctccactcgcaagctctacgaaaagaaaatcttcgagtacgagacccagagaaggaggctttcgccccccagctcgtcatcgtcttcattctcctatcggttctcagacttggattcagcctccgtggactcagacatgtatgatctgcccaaaaaggaggacgccttactttaccagagcaaggactataatgatgactactatgaggagagctatttgactaccaggacatacggggagcccgagtctgtgggcatgtccaagagcttccgccggccagggacctcacttgtagatgctgatgataccttccatcaccaggtgcgtgatgacattttctcttcttcagaagaggaaggcaaggatagggaacgccccatctatggccgagacagtgcctaccagagcatcgcagagtaccgccccatttccaatgtctccaggagctccctgggcttatcatattatcctagatcctccacctcttctgtgtcctcctcttcatcttctccctcttcatggcttacccgacgtgccattcgaccagaaaagcaggcccctactgctgctctgggccaggatcgacaggtcccactctggggccagctgttactcttcctggcctttgctacctttctgctctttgtttactattccatacaagctcaagaaggcaaccccttctggatggatccctaagggtattggtttcagagcagctcttaacaggagttttggctgactgccttagcagtgtttgctgggggtggggggtaggggcttttttgtgtattctagttagagggtacagggcccttactacggcagtgcttgtctccacctcatcttgccaaggaagcagcaaatgctggctttccacagcccagtaggccctatgtaccttcctctggagcctcctagccttattgcctctgactcttagggtatggggatctggtggggaggacctcacttcattagaggaaaacttggtggtggcagtggtagttgtcatgcatgcctgtttgttgtcaccttttcagggggtattaacaaggccatcctggctttgctttcg

SEQ ID NO: 1942 - protein, 260 aa, Rattus norvegicus
  ref <308>: DATABASE ACCESSION NUMBER: Refseq / NP_037080
  ref <309>: DATABASE ENTRY DATE: 2003-01-14
MDDYAVLSDTELAAVLRQYNIPHGPILGSTRKLYEKKIFEYETQRRRLSPPSSSSSSFSYRFSDLDSASVDSDMYDLPKKEDALLYQSKDYNDDYYEESYLTTRTYGEPESVGMSKSFRRPGTSLVDADDTFHHQVRDDIFSSSEEEGKDRERPIYGRDSAYQSIAEYRPISNVSRSSLGLSYYPRSSTSSVSSSSSSPSSWLTRRAIRPEKQAPTAALGQDRQVPLWGQLLLFLAFATFLLFVYYSIQAQEGNPFWMDP

SEQ ID NO: 1943 - DNA, 1252 bp, Homo sapiens
  ref <308>: DATABASE ACCESSION NUMBER: Refseq / NM_000117
  ref <309>: DATABASE ENTRY DATE: 2003-01-15
cggccggttttggtaggcccgggccgccgccaggcctccgcctgagcccgcacccgccatggacaactacgcagatctttcggataccgagctgaccaccttgctgcgccggtacaacatcccgcacgggcctgtagtaggatcaactcgtaggctttacgagaagaagatcttcgagtacgagacccagaggcggcggctctcgccccccagctcgtccgccgcctcctcttatagcttctctgacttgaattcgactagaggggatgcagatatgtatgatcttcccaagaaagaggacgctttactctaccagagcaagggctacaatgacgactactatgaagagagctacttcaccaccaggacttatggggagcccgagtctgccggcccgtccagggctgtccgccagtcagtgacttcattcccagatgctgacgctttccatcaccaggtgcatgatgacgatcttttgtcttcttctgaagaggagtgcaaggatagggaacgccccatgtacggccgggacagtgcctaccagagcatcacgcactaccgccctgtttcagcctccaggagctccctggacctgtcctattatcctacttcctcctccacctcttttatgtcctcctcatcatcttcctcttcatggctcacccgccgtgccatccggcctgaaaaccgtgctcctggggctgggctgggccaggatcgccaggtcccgctctggggccagctgctgcttttcctggtctttgtgatcgtcctcttcttcatttaccacttcatgcaggctgaagaaggcaaccccttctagagggagccatgagggtctgggcttcagagctaggtctttggggaagtcctggctgactgccttagcagtgggggtgggggtgggggcaggggcaggggctttatgtgtttttgcttggggggcgctgggcctagcccagagtagtgcttgctccccctgccttgtcccaccagggaggcagcagactcaggccctccatggtcctctttgtcattttgttgacatgcattcctccttttgtcatcttgttggggggaggggattaaccaaaggccaccctgactttgtttttgtggacacacaataaaagccccgtttatttgttaaaaaaaaaaaaaaaaaaaaaaaaaaaaaaaaaaaaaaaaaaaaaaaaaaaaaaaaaaaaaaaaaaaaaaaaaaaaaaaaaaaaaaaaaaaaaaaaaaaaaaaa

SEQ ID NO: 1944 - protein, 254 aa, Homo sapiens
  ref <308>: DATABASE ACCESSION NUMBER: Refseq / NP_000108
  ref <309>: DATABASE ENTRY DATE: 2003-01-15
MDNYADLSDTELTTLLRRYNIPHGPVVGSTRRLYEKKIFEYETQRRRLSPPSSSAASSYSFSDLNSTRGDADMYDLPKKEDALLYQSKGYNDDYYEESYFTTRTYGEPESAGPSRAVRQSVTSFPDADAFHHQVHDDDLLSSSEEECKDRERPMYGRDSAYQSITHYRPVSASRSSLDLSYYPTSSSTSFMSSSSSSSSWLTRRAIRPENRAPGAGLGQDRQVPLWGQLLLFLVFVIVLFFIYHFMQAEEGNPF

SEQ ID NO: 1945 - DNA, 3113 bp, Rattus norvegicus
  ref <308>: DATABASE ACCESSION NUMBER: Refseq / NM_022394
  ref <309>: DATABASE ENTRY DATE: 2003-01-13
ttcaaaaaaaaaataataacaaatccaaaaaacacacccacgcaagcccactgacccggttctgtgtgaagtgggcgacggaaccagggtccctggaatggcggagactctgtcgggtttaggagactcgggtgcggcaagcgcagcggccgtgagctccgcggcgtcagagaccgggacgcggcggctcagcgacctgcgggtgatcgacctgcgggcggagctgcggaagcgaaacctcactcgagcggcaacaagagcgtgctgatggagcggcttaagaaggccattgaagaggaaggtgggaatcctgatgaaattgaagtcatctcagaaggcaacaagaagatgcctaagaggcccagcaaagggaagaaaccagaagacgagggtgtggaggacaacgggctcgaggagaattctggggatgggcaggaggatgtggaaaccagcctggagaacctgcaagacatggatatgatggacatcagtgtgctggatgaggctgacattgataatggcagcgtggcagactgtgtggaggaagaagaggaggccacactccctgagggcctaggactgctccgaattggccgattgcaatcgaaggggctccccgaacagctgcaggagcttgctatagatgacaaggaagccattaacaatgtagatacatcatcatctgacttcaccatcctgcaggagatggaagaggcatctttggagccagaaaatgagaaaatactcgacattttgggggaaacttgtaaatctgagccagtaaaagaagaaggttcggagctggagcagccctttgcccaggccacgagtagcgtggggccagacaggaagctggcggaggaagaggacctatttgagagctgcggccacccggaagaggaagaagaagaggaggaagaagaggagcaggaagaggagcaggaggaggagggagatttagctttggccagcagcagcaagtctgagtcttcaagcactcgatgtcagtggagcgaggcagacgccctgttagcagtagtgaaaagggagccggcagaggcgcctggcggaggcactgggatggaccgcgagcctgtagggctagaggagccagttgaacagagtagcacggctgcccagctcccggagaccaccagccaggagctggtgcgagcgcccacggcagccccgagccctgagccccgagatagcaaagacgacgtgaagaagtttgcttttgacgcttgtaatgacgtccctgcggctcctaaagagtcctcagccagtgagggcgctgatcagaaaatgagttctgtggaagatgactcggatacaaaaaggctttccagagaggagaagggtcgcagcagctgtggtaggaatttctgggttagtggcctttcatctacgaccagagccacagatctgaagaacctttttagcagatacgggaaggtggtgggagctaaggttgtgacgaacgcccggagtcccggagctcgctgttacggctttgtcactatgtccacagctgaagaggcaacaaagtgcattaaccatttgcataagactgagctgcatggcaagatgatctcggtggaaaaggccaaaagtgagcccgctggcaaaagagtacctgacaggcgagatggcgacagcaagaaagagaagaccagcaccagtgacagatctgcaaaccttaagagggaggagaaaggtgacagaaaagacgatgccaagaagacggatgatgggagcacagagaagagcaaggatgcagatgaccaaaagcctgggccttcagagcgctctcgaacaaccaagtcaggaagccgtggcactgagcgtactgtggtgatggacaagtccaaaggtgtgcctgtcatcagtgtgaagacttctggttctaaagagagagcctccaaaagtcaggaccgaaagtctgtcagccgggagaagcggtctgttgtgtcctttgacaaggttaaagagtctcgaaagtccagagactcggagtcacggagggagcgggagcgggagcgcagtgagcgggagcaaaggctgcaggcccagtgggagcgggaggagcgagagcggctggagattgcccgggagcgcctggctttccaccgacataggctggagcgtgaacgcatggagagggaacggttggagcgggagcgcatgcatgtggaacaggagcggaggcgtgagcaagagcgcattcaccgagagcgagaggagcttcggcgtcagcaggaactgcgctatgaacaggagcggaggcctgctgtgcgcaggccctatgaagtagatggccggcgagatgatgcctattggccagaagctaaacgggctgcgctggatgaccgttaccactcagacttcagtcgccaggaccgctttcatgacttcgaccacagagacagaggccgctatcccaaccactctgtggataggagagaaggttcacggtcgatgatgggagacagagaaggacagcattaccctgagcgccatggaggacctgaacgccatggccgggactctcgagatggctggggctatggctcaaacaagagactgagtgaaggccgggggctgccccttcttcccaggcgtgactggggagagcatgcccggagacttgaagatgaccgggcatggcagggcacagctgatggaggcatgatggagcgtgatcaacagagatggcaaggtggtgagaggagcatgtctggccactcagggcccggtcacatgatgaatcgtggtggcatgtcagggcgaggcagttttgcccccggaggagcttcccgtcgccatgtgatcccacgtggagggatgcaggcaggcttcggcgggacagagccggggcagcagacccagtgatgcccgcttcacccccgtattgagcacctaaaccacccaaccatgacctccaagtctttttaggaaaccctcccgccattgtacaaaggatttttttttttttatttgctgccatattgtagcttgttacgatggaatttgttttcatttttgttcctgtttttttgtaataaagggttttgttcaaaaaaaaaaaaaaaaaaaaaaaaaaaaaaaaaaaa

SEQ ID NO: 1946 - protein, 874 aa, Rattus norvegicus
  ref <308>: DATABASE ACCESSION NUMBER: Refseq / NP_071789
  ref <309>: DATABASE ENTRY DATE: 2003-01-13
MERLKKAIEEEGGNPDEIEVISEGNKKMPKRPSKGKKPEDEGVEDNGLEENSGDGQEDVETSLENLQDMDMMDISVLDEADIDNGSVADCVEEEEEATLPEGLGLLRIGRLQSKGLPEQLQELAIDDKEAINNVDTSSSDFTILQEMEEASLEPENEKILDILGETCKSEPVKEEGSELEQPFAQATSSVGPDRKLAEEEDLFESCGHPEEEEEEEEEEEQEEEQEEEGDLALASSSKSESSSTRCQWSEADALLAVVKREPAEAPGGGTGMDREPVGLEEPVEQSSTAAQLPETTSQELVRAPTAAPSPEPRDSKDDVKKFAFDACNDVPAAPKESSASEGADQKMSSVEDDSDTKRLSREEKGRSSCGRNFWVSGLSSTTRATDLKNLFSRYGKVVGAKVVTNARSPGARCYGFVTMSTAEEATKCINHLHKTELHGKMISVEKAKSEPAGKRVPDRRDGDSKKEKTSTSDRSANLKREEKGDRKDDAKKTDDGSTEKSKDADDQKPGPSERSRTTKSGSRGTERTVVMDKSKGVPVISVKTSGSKERASKSQDRKSVSREKRSVVSFDKVKESRKSRDSESRRERERERSEREQRLQAQWEREERERLEIARERLAFHRHRLERERMERERLERERMHVEQERRREQERIHREREELRRQQELRYEQERRPAVRRPYEVDGRRDDAYWPEAKRAALDDRYHSDFSRQDRFHDFDHRDRGRYPNHSVDRREGSRSMMGDREGQHYPERHGGPERHGRDSRDGWGYGSNKRLSEGRGLPLLPRRDWGEHARRLEDDRAWQGTADGGMMERDQQRWQGGERSMSGHSGPGHMMNRGGMSGRGSFAPGGASRRHVIPRGGMQAGFGGTEPGQQTQ

SEQ ID NO: 1947 - DNA, 525 bp, Rattus norvegicus
  ref <308>: DATABASE ACCESSION NUMBER: EMBL / M21354
  ref <309>: DATABASE ENTRY DATE: 2000-03-04
gcaggtcccagaggcccagttggtccacatggacctcctggaaaagatggatcaagtggacatccaggtcccattggaccaccagggcctcgaggtaacagaggtgaaagaggatctgagggctcgcccggtcaccctggacagccaggaccccctggaccccctggtgcccctggtccctgctgtggtggcggtgctgccattgctggagttggaggtgaaaagtctggcggcttttcaccatattacggggatgatccaatggatttcaagatcaacactgaggagatcatgtcttcactcaagtctgttaacggacaaatagagagtcttatcagccctgatggttctagaaaaaaccctgctcgcaattgcagagacctgaaattctgccaccctgaactcaagagcggagaatactgggttgatcctaaccaaggctgcaagatggatgctataaaagtgttctgtaatatggaaaccggagaaacatgcataaatgccagtcccatgactgtcccgcgg

SEQ ID NO: 1948 - DNA, 604 bp, Rattus norvegicus
  misc_feature (1)..(604): n=a, c, g or t
  ref <308>: DATABASE ACCESSION NUMBER: EMBL / AA800291
  ref <309>: DATABASE ENTRY DATE: 2000-03-03
gacactacaactcagtaattactttattagaatgtcagtcccgctccagcaggaggaacggagaggaacacaaatagcccagggagaatagatgtgggtactcttcttcggagtcattgggcctcagcaagccagcccagggtgcagagccaccttgtggccagacaaggggtagctccttctactccacagtggaagcctactacaagtccttggtgccctggcaaagttccccccacctcataatccaggcagatttagaccacaggcatcactctgtggaataaagcaggccctcaggcatgttcagttccctcagctttcttgatttcctcagacagtgcctgcttcagtgtaacataggcttcatccaggttgtcattgacgatcaccaggtcaaacaagccaggctccttgctgctctccatgtctgcctgtgcagctgccagccgctttgccaggctctcctcagtctcagtgttgcgctgccgcagtcgttgctccagcacgtccatcgagggaggctgcacagagatgtanatgggatgcagatcagtcttcttgatgctgcgcactccttgtaggtcgacatctagcacgcaga

SEQ ID NO: 1949 - DNA, 1082 bp, Homo sapiens
  ref <308>: DATABASE ACCESSION NUMBER: Refseq / NM_000858
  ref <309>: DATABASE ENTRY DATE: 2002-11-05
ggcacgaggcgctggccgggctggctgcggccgccctgggccgggccccaccggacggcttgctctgctctttacctggggttgctgtcgaggaccctgtgcaagactcggccggtttttctttctccctgatggacagacccaaacatagccgcgcagcatcgtgaagggctggggccttcactcctctgtggctctggaagagcccgatttcctcaggaggcatgtcgggccccaggcctgtggtgctgagcgggccttcgggagctgggaagagcaccctgctgaagaggctgctccaggagcacagcggcatctttggcttcagcgtgtcccataccacgaggaacccgaggcccggcgaggagaacggcaaagattactactttgtaaccagggaggtgatgcagcgtgacatagcagccggcgacttcatcgagcatgccgagttctcggggaacctgtatggcacgagcaaggtggcggtgcaggccgtgcaggccatgaaccgcatctgtgtgctggacgtggacctgcagggtgtgcggaacatcaaggccaccgatctgcggcccatctacatctctgtgcagccgccttcactgcacgtgctggagcagcggctgcggcagcgcaacactgaaaccgaggagagcctggtgaagcggctggctgctgcccaggccgacatggagagcagcaaggagcccggcctgtttgatgtggtcatcattaacgacagcctggaccaggcctacgcagagctgaaggaggcgctctctgaggaaatcaagaaagctcaaaggaccggcgcctgaggcttgctgtctgttctcggcaccccgggcccatacaggaccagggcagcagcattgagccacccccttggcaggcgatacggcagctctgtgcccttggccagcatgtggagtggaggagatgctgcccctgtggttggaacatcctggggtgacccccgacccagcctcgctgggctgtcccctgtccctatctctcactctggacccagggctgacatcctaataaaataactgttggattagaaaaaaaaaaaaaaaaaa

SEQ ID NO: 1950 - protein, 197 aa, Homo sapiens
  ref <308>: DATABASE ACCESSION NUMBER: Refseq / NP_000849
  ref <309>: DATABASE ENTRY DATE: 2002-11-05
MSGPRPVVLSGPSGAGKSTLLKRLLQEHSGIFGFSVSHTTRNPRPGEENGKDYYFVTREVMQRDIAAGDFIEHAEFSGNLYGTSKVAVQAVQAMNRICVLDVDLQGVRNIKATDLRPIYISVQPPSLHVLEQRLRQRNTETEESLVKRLAAAQADMESSKEPGLFDVVIINDSLDQAYAELKEALSEEIKKAQRTGA

SEQ ID NO: 1951 - DNA, 5413 bp, Rattus norvegicus; identical to SEQ ID NO: 1555
  ref <308>: DATABASE ACCESSION NUMBER: Refseq / NM_080583
  ref <309>: DATABASE ENTRY DATE: 2003-01-13

SEQ ID NO: 1952 - protein, 951 aa, Rattus norvegicus; identical to SEQ ID NO: 1556
  ref <308>: DATABASE ACCESSION NUMBER: Refseq / NP_542150
  ref <309>: DATABASE ENTRY DATE: 2003-01-13

SEQ ID NO: 1953 - DNA, 402 bp, Rattus norvegicus
  ref <308>: DATABASE ACCESSION NUMBER: EMBL / AI639294
  ref <309>: DATABASE ENTRY DATE: 2000-03-04
gagacctgccctgctcaatcaaccttaccccctcctgcctttcttccttcctctcctgaggccagagagggagggcaggaagctggaagctgagcatcctccccaaatcgggctgatttgatgtgaaagccccaccatggtgtgtggtggtgaggcaggacctgttcatacaacaaggcttacccttctgctgacatccagagagctgcttgtgggtgtgttcagccgtgacctctgggctgtacgtggctaaggatagctatccatgtggcccaacacaaaacaggaaacttacttaaaaatagggttttttggggctggggatttagctcagtggtagagcgcttacctaggaagcgcaaggccctgggttcggtccccagctccgaaaaaaagaaccaa

SEQ ID NO: 1954 - DNA, 2183 bp, Rattus norvegicus
  ref <308>: DATABASE ACCESSION NUMBER: EMBL / X70369
  ref <309>: DATABASE ENTRY DATE: 1994-07-15
tgcccccggagagaaaggtgaaggaggccctcctggtgccgcaggaccccctggtggttctggacctgctggtcctcctgggcctcaaggtgtaaagggtgaacggggcagtcctggcggtcctggtgctgctggctttcccggtggccgtggtcttcctggtcctcccggcaacaatggtaatccagggcccccaggacccagtggtgctcctggcaaggatggccctccaggtcctgcaggtaacagtggttctcctggaaaccctggagtagctggaccaaaaggtgatgctggccaaccaggagagaaggggccacctggtgctcagggtcctccaggatctccaggtccacttggaattgcagggctaactggagcacgaggtcttgctggaccaccaggcatgccaggtccacggggtagccctggacctcagggtatcaagggtgaaagtggaaagccaggagccagtggccataatggggaacgtggtcctcctggaccccaaggtcttcctggtcagcctggtacagctggtgagcccggaagggatggaaaccctggatcagatggtcagccaggtcgagacggatctcctggtggcaagggtgatcgtggtgaaaatggttctcctggtgccccaggcgctcctggtcatccaggaccacctggtcctgttggtccatctggaaaaaatggtgacagaggagaaacgggtcctgctggtccttctggtgctccaggtcctgctggagctcggggtgctcctggtccccaaggtccacgaggtgacaaaggtgaaactggtgaacgtggctctaatggcatcaaaggacatcgaggattccctggcaatccaggtcccccaggttctcccggtgctgctggacaccagggtgcagttggtagtccaggccctgcaggtcccagaggcccagttggtccacatggacctcctggaaaagatggatcaagtggacatccaggtcccattggaccaccagggcctcgaggtaacagaggtgaaagaggatctgagggctcgcccggtcaccctggacagccaggaccccctggaccccctggtgcccctggtccctgctgtggtggcggtgctgccattgctggagttggaggtgaaaagtctggcggcttttcaccatattacggggatgatccaatggatttcaagatcaacactgaggagatcatgtcttcactcaagtctgttaacggacaaatagagagtcttatcagccctgatggttctagaaaaaaccctgctcggaattgcagagacctgaaattctgccaccctgaactcaagagtggagaatactgggttgatcctaaccaaggctgcaagatggatgctataaaagtgttctgtaatatggaaaccggagaaacatgcataaatgccagtcccatgactgtcccgcggaagcactggtggacagatgctggtgctgagaagaaacatgtttggtttggagaatctatgaatggtggctttcagttcagctatggcaatcctgatcttcctgaagatgtccttgatgtacagctggccttcctcagacttctttccagccgggcctcccagaacattacataccactgcaaaaacagcattgcctacatggatcaggccaatggcaatgtaaagaagtctctgaagctgatgggatccaatgagggagaattcaaggctgaaggaaatagcaaattcacttacacagttctagaggatggctgcactaaacacactggtgaatggagcaagacagtctttgaatatcaaacacgcaaggccatgagactccccatcatagatatcgcaccctatgacattggtggtcctgatcaagaatttggtgtggacattggccctgtttgctttttataagccaaactctctgaaaccccagcaaaacaaaaaccacatccatgtgttcctcttgctttaatctcgtcaaccagtgaaagtgaccaactaaattccagttatttatttccaaacttttggaaaaagcataatttgacaaaaatagaatacaatttttttgctgtttcacccaccaatacagttcaaatgcttttgttttatttttttaccaattccaacttcataatgtctcaatggtgctataataaataaacatcaacacttttatgat

SEQ ID NO: 1955 - DNA, 6035 bp, Rattus norvegicus
  ref <308>: DATABASE ACCESSION NUMBER: EMBL / X04267
  ref <309>: DATABASE ENTRY DATE: 1996-10-10
tgcttcactctgccacagtcagaggtcccataggtccacagctgctgctgctgctctctgctgtcctgccggtgtgactcagccaacactatgagtagcgacaccgagatggaagtgtttggcatagctgcccctttcctccgaaagtcggaaaaggagaggatcgaagctcagaaccagccctttgatgccaaaacctattgctttgtggttgactcaaaggaagaatatgccaaggggaaaattaagagtagccaggatgggaaagtcacggtggagacagaagacaacaggaccctggtggttaaaccagaggacgtgtatgccatgaaccctcccaagtttgacaagatcgaggacatggccatgctgacccacctgaacgagcctgctgtgctgtacaacctcaaggaccgatacacgtcctggatgatctacacctattcaggcctcttctgtgtcaccgtcaacccctacaagtggttgccggtgtacacccctgaggtggtggatggctaccgaggcaaaaagcgccaggaggccccgccccacatcttctccatctctgacaacgcctaccagttcatgctgacggatcgtgagaaccagtccatcctgatcaccggagaatccggggccgggaagacggtgaacaccaagcgtgtcatccagtactttgcaacaattgcagccactggggaccttgccaagaagaaggactccaaaatgaaggggaccctggaagatcaaatcatcagcgccaaccccctgctggaggcctttgggaatgccaagaccgtgaggaatgacaactcttcccgctttggcaagttcatccgcatccatttcggcaccactgggaagctggcctctgcagatattgaaacttatctgctggaaaagtccagagtcaccttccagctgaaggctgagagaagctatcacatcttctaccagattctttccaacaagaagccggaactgatcgagttgctgctgattacgaccaacccttacgactacccattcatcagccagggtgaaatcctggtggccagcatcgatgatcgtgaggaactgttggctacagacagtgccattgacatcctgggcttcaccccggaggagaaatctggactctataaactgacaggggctgtgatgcattatgggaacatgaagttcaagcagaagcagcgagaggagcaagctgagccagatggcaccgaagtggctgacaaaacagcctacttgatgggcctgaactcttcagacctcctcaaagccttgtgctttcccagagtgaaagttgggaatgagtacgttacaaaaggccaaactgtggaccaggttcaccatgctgtgaatgctctctccaagtccgtttatgagaagctgttcttgtggatggtcactcgtattaaccagcagctggacacaaagctaccaagacaacacttcattggggttttggacattgcgggttttgaaatttttgagtataacagcctggagcagctgtgcatcaacttcaccaacgagaaactgcaacagtttttcaaccaccacatgttcgtgctggagcaggaggagtacaagaaggaaggcatcgagtggaccttcatcgacttcgggatggacctggcggcctgcatcgagctcatcgagaagccgatgggcatcttctccatcctggaagaggagtgcatgttccccaaggcgacagacacctccttcaagaacaagctgtatgaccagcaccttggaaaatccaacaacttccagaagcctaaggtggtcaaaggcaaggccgaggcccacttctccctcatccactatgcgggcaccgtggactacagtgtctcgggctggctggagaagaacaaggaccccctgaatgagaccgtggtggggctgtaccagaagtcttccaacagactcctggcccatctctatgccaccttcgctacgacagatgctgacggtgggaagaagaaagtcgctaagaagaaaggctcttccttccaaacagtgtctgcgctgttcagggaaaacttgaacaagctgatgtccaatttaagaaccactcacccacactttgtgcgctgtataatacccaatgaaaccaagaccccaggggccatggaacacagcctggtcctgcaccagctgaggtgtaacggggtgctagaaggcatccgcatctgcaggaaggggttccccaacaggattctgtatggagactttaaacagagataccgagtgctgaacgccagtgccatcccggagggccagttcattgacagcaagaaagcttgcgagaagctcttggcttccattgacatcgaccacacacagtacaaatttggacacaccaaggtgttctttaaggctggcttgctgggaaccctggaggagatgcgggatgagcgtctggccaaactgatcactcggacacaagccgtgtgcagagggttcctcatgcgtgtggaattccagaagatgatgcagaggagggaatccatcttctgcatccagtacaacatccgcgccttcatgaacgtcaagcactggccctggatgaaactcttcttcaagatcaagcccctgctgaagagcgccgagacggagaaggagatggccaccatgaaggaggagttccagaagaccaaggacgagctcgccaagtcggaggcaaagaggaaggagctggaggagaagctggtcactctggtacaagagaagaacgacctgcagctccaagtacaggcggagagtgagaatttgctggatgccgaggagcgatgcgaccagctgatcaaagccaagttccagctggaggccaaaattaaagaggtgaccgaaagagctgaggatgaggaggagatcaacgccgagctcacggccaagaagaggaagctggaggacgagtgctcggagctgaagaaggacatcgatgaccttgagctgacactggccaaggttgagaaggagaagcacgccacggagaacaaggtaaaaaaccttaccgaagaactggcaggcctggatgaaactattgcaaagctaacacgggagaagaaggccctccaagaggcccaccagcagaccctggacgacctccaggctgaggaagacaaggtcaattctctgagcaagctcaagagcaagctggagcagcaagtggatgatttggagagctccctcgaacaagagaagaagctgcgtgtggacctggaaaggaacaagaggaagctggagggagacctgaagcttgcccaagagtccatattagatctggagaacgacaagcaacagctggacgagaggctcaagaagaaggactttgaatatagccagctgcagagcaaggtggaagatgagcagacgctgagcctccaacttcagaagaaaatcaaagagttacaggcccgcattgaggagctggaggaagagatagaggcggagagggccacccgggccaagacagagaagcagcgcagcgactacgcccgcgagctggaggagctgagtgaacgtctggaggaggcgggcggtgtcacctctacccagattgagctgaacaagaagcgtgaggctgagttcttgaagctgcgcagggacctggaggaggccaccctgcagcacgaggccaccgtggccacgctgcggaagaagcacgcggacagcgcggcggagctggcagagcagatcgacaacctgcagcgcgtcaagcagaagctggagaaggagaagagcgagttcaagctggagatcgacgacctctccagcagtgtggagagtgtgtccaaatccaaggccaacctggagaagatatgccgaactctagaggatcagttaagcgaggccaggggcaagaacgaggagacgcagagaagcctaagtgagctgaccacacagaagtcccggctgcagacagaagcgggtgagctgagtcgtcaactggaagaaaaggaaagcatagtatctcagctttccaggagcaagcaagcctttacccaacagatagaggagctcaagaggcaactggaggaagagaacaaggccaagaatgcgctggcccacgccctgcagtcctcccgccacgactgtgacctgcttcgggaacagtacgaggaggagcaggaaggcaaagccgagctgcagagggcgctgtccaaggccaacagcgaggtggcccaatggaggaccaaatatgagacggatgccatccagcgcacggaggagctggaggaggccaaaaaaaagcttgctcagcgccttcaggattcggaggagcaggtcgaggctgtgaatgcaaaatgcgcttccttggaaaagaccaagcagaggctgcaaggggaggtggaggacttgatggtggatgtggagagagccaactctctggctgccgctctggacaagaagcagaggaactttgacaaggtgttagccgagtggaagacgaagtgtgaggagagccaagcagagctggaggcggctctcaaggaatcccggtccttgagcactgagctcttcaaactgaaaaacgcctatgaagaagccttggatcaactcgaaactgtgaagcgagagaataagaacttagaacaagagatagcagatctcaccgaacaaattgctgagaacggtaaaagcatccacgagctagagaaatccagaaagcagatggagctggagaaggctgatatccagatggcgctggaggaagcagaggcagctctggagcacgaagaagccaagatcctcaggatccagcttgaactgacgcaggtgaaatcagagatcgatagaaagatcgcagagaaggatgaagagatcgagcagctgaagaggaactaccagaggacagtggagaccatgcagggcgccctggatgctgaggtgcgcagcaggaatgaggcgatccggctgaagaagaagatggagggcgacctcaatgagattgagatccagctgagccatgccaaccgccaggccgcagagaccatcaagcacctccggagtgtccagggacagctgaaggacacccagctgcacctggatgacgctctccgaggccaggaggacctgaaggagcagctggcgatcgtggagcgcagagccaacctgctgcaggctgaggtggaggagctgcgggccactctggagcagacggagagggcccggaagctggcagagcaggagctgctggactccaacgagagggttcagctgctgcacacccagaacaccagcctcatccacaccaagaagaagttggagactgacctcacacagctccagagtgaggtggaggatgccagcagggacgcaaggaacgccgaggagaaggccaaaaaggccatcactgatgccgccatgatggcggaggagctaaagaaggagcaggacaccagcgcccatctggagcggatgaagaagaacctggagcagacggtgaaggacctgcagcaccgtctggacgaggctgagcagctggcactgaagggcggcaagaagcagatccagaaactggagacgaggatcagagagctagagtttgagctggaaggggaacagaagaggaacacagagtctgtgaagggcctgaggaagtatgagcggcgtgtcaaggagctcacctaccagagtgaggaggacaggaagaatgtgctgagattgcaggatctggtggataaacttcaagtgaaagtcaagtcctacaagaggcaggctgaggaggctgatgaacaagccaatgttcatctcaccaagttccggaaagcccagcatgagctagaggaggccgaggaacgtgcggatattgcagaatcgcaagtcaataaactgcgggctaaaacccgggacttcacctctagccggatggtggtccatgaaagtgaggagtgagcatgtcctcctggtgaggggcagaagatatgcagaatgtatgttttcgtggctcctgaccatcctgcttaatttccacgtaacccctttccacatgcaataaaatttgccttgtttcaagt

SEQ ID NO: 1956 - DNA, 2837 bp, Rattus norvegicus; identical to SEQ ID NO: 76
  ref <308>: DATABASE ACCESSION NUMBER: Refseq / NM_030987
  ref <309>: DATABASE ENTRY DATE: 2003-01-13

SEQ ID NO: 1957 - protein, 340 aa, Rattus norvegicus; identical to SEQ ID NO: 77
  ref <308>: DATABASE ACCESSION NUMBER: Refseq / NP_112249
  ref <309>: DATABASE ENTRY DATE: 2003-01-13

SEQ ID NO: 1958 - DNA, 1319 bp, Homo sapiens; identical to SEQ ID NO: 78
  ref <308>: DATABASE ACCESSION NUMBER: EMBL / AY007113
  ref <309>: DATABASE ENTRY DATE: 2000-09-06

SEQ ID NO: 1959 - DNA, 541 bp, Rattus norvegicus
  misc_feature (1)..(541): n=a, c, g or t
  ref <308>: DATABASE ACCESSION NUMBER: EMBL / AA799576
  ref <309>: DATABASE ENTRY DATE: 2000-03-03
aacagacaataaaagggctttctttttaattcaaaggtatagccagataagtagatttgtttagaaccattcttgtgaaatactttttaaaaaaatacgaccaacttctttgcaaattacagacaaatacctcaactatgatgatctaatttttggtgaataatatacatgattagacagaaataggcaagctcacactggaagattaactatcaaacactcagtcaaaactccgtttatggcccccacttcttgatcgatttctgttcccacttcgtcttctaccgtcttgccgacttcctgaacgactcccctgtcgactctgtctacctgatcggccaccagatcgaccaccagatcggcctgaacggcctgacctgccgccagaccagccgctcctctgtctgggattagaagatgtgtttccatcataatattcttcaatttcaggtaacttggctggcactgagagtatccagtctgagtcantgcactctgcctgtaatctttctgactcacttgtaggaacatcaaacaaaca

SEQ ID NO: 1960 - DNA, 2575 bp, Homo sapiens
  ref <308>: DATABASE ACCESSION NUMBER: Refseq / NM_024045
  ref <309>: DATABASE ENTRY DATE: 2002-12-23
gcatggccaaggccgggcggccgccttgcccccgcttcctttcacgctgtcgctgcccgtaggtggttgtggccactgtgcccggagggaggcggcggtggccagtaatgcctgggaaactcctctggggggacattatggagctggaagcacccttggaggagtccgagagccagaagaaggagaggcaaaagagtgacagaaggaagtcaaggcaccattatgactcggatgagaaatcagaaacaagagaaaatggtgttacagatgacctggatgctcccaaggccaaaaaatctaaaatgaaagagaagctaaatggagacactgaagaaggatttaatagactttcagatgaattctccaaatctcataagtcaagaagaaaagatctaccaaatggagatatagatgaatatgaaaaaaaatcaaagcgagtatcatctttagatacttctactcataaatcaagtgataataaactagaggagaccttaacacgtgaacagaaagaaggagccttctccaattttcctatttctgaagagactataaagcttctgaaaggtcgaggggtaacatatctctttcctattcaagttaagacctttggtcctgtatatgaaggaaaagatttaatagctcaagcacggacaggaacaggaaagacattctcttttgccatccccttaattgaaagactccaaagaaatcaagaaacaattaaaaaaagccgctcaccaaaggtacttgttttggctccaacaagggaactggcaaaccaagtagccaaagacttcaaagatataactaggaaactcagcgtggcgtgtttttatggtggaacatcatatcaaagccaaattaatcatattcgaaatggtattgacatcttggttggaacacctggtcgtatcaaagaccatctgcagagtggccgattggatctttctaaactgcgacatgttgtgcttgatgaagtggatcagatgttagatttaggtttcgctgaacaagttgaagatattattcatgaatcctacaaaactgattctgaagacaatcctcagactttacttttttctgcaacttgcccacagtgggtatacaaagttgcaaaaaaatacatgaaatccagatatgaacaggttgaccttgttggaaaaatgactcaaaaggctgcaactactgtggaacatttggccatccagtgtcattggtctcagaggccagcagttattggagatgtccttcaagtctacagtgggtctgaagggagggctattattttctgtgagaccaagaagaatgtaactgaaatggccatgaatccacacataaaacagaatgcccagtgtttacatggggacattgcacagtcacaaagagaaattacactaaaaggcttcagagaaggtagttttaaagttttggtggcaaccaatgtggctgcccgtggtttggacattcctgaagttgacctggtgattcaaagttctcctcctcaggatgttgagtcctatatccatcgctctggacgcacaggtagagctggacggacagggatttgtatatgtttttatcaaccaagagaaagaggtcaactaagatatgtggaacaaaaagcaggaattacttttaaacgtgtaggtgttccttctacaatggatttagttaaatctaaaagcatggatgccatcaggtctctggcttccgtttcttatgctgctgttgattttttccgaccatcagctcagagactgatagaagagaaaggtgcagtggatgcattggctgcagctttagcccacatttctggtgcatcaagctttgaaccacgatctttgatcacctctgataaggggtttgtgaccatgactctggaaagcctagaggaaatacaggatgtcagctgtgcttggaaagaacttaacagaaagctgagtagtaatgcagtgtctcagattaccagaatgtgcctcctgaaaggaaatatgggtgtttgctttgatgttcctacaactgagtcagaaaggttacaggcagagtggcatgattccgactggatactctcagtgccagccaaattacctgaaattgaagaatattatgatggaaacacatcttctaattccagacagaggagtggctggtcaagtggtcgatcaggccggtcaggccggtcaggtggtcgatctggcggccggtcaggtagacagagtcgacaaggaagtcgctcaggaagtcgacaagatggtagaagacgaagtgggaatagaaatcgatcaagaagtgggggccacaaacggagttttgactgagtatttgatagttaatctaccagtgtgagcttgcctatttctgcctaatcatgtacattatccaccaaaaattaggtcatcatagttgaggtatgtgtctgctatttgcaaagaagttggtcgtatttttttaaaaagtatttcacaagaatggaacaaatctacttatccagttatacctttgaataaaaaaacctccttttattgtctcttttcaaaaaaaaaaaaaaaaaaaaaaaaaaaaaaaaaaaaaa

SEQ ID NO: 1961 - protein, 737 aa, Homo sapiens
  ref <308>: DATABASE ACCESSION NUMBER: Refseq / NP_076950
  ref <309>: DATABASE ENTRY DATE: 2002-12-23
MPGKLLWGDIMELEAPLEESESQKKERQKSDRRKSRHHYDSDEKSETRENGVTDDLDAPKAKKSKMKEKLNGDTEEGFNRLSDEFSKSHKSRRKDLPNGDIDEYEKKSKRVSSLDTSTHKSSDNKLEETLTREQKEGAFSNFPISEETIKLLKGRGVTYLFPIQVKTFGPVYEGKDLIAQARTGTGKTFSFAIPLIERLQRNQETIKKSRSPKVLVLAPTRELANQVAKDFKDITRKLSVACFYGGTSYQSQINHIRNGIDILVGTPGRIKDHLQSGRLDLSKLRHVVLDEVDQMLDLGFAEQVEDIIHESYKTDSEDNPQTLLFSATCPQWVYKVAKKYMKSRYEQVDLVGKMTQKAATTVEHLAIQCHWSQRPAVIGDVLQVYSGSEGRAIIFCETKKNVTEMAMNPHIKQNAQCLHGDIAQSQREITLKGFREGSFKVLVATNVAARGLDIPEVDLVIQSSPPQDVESYIHRSGRTGRAGRTGICICFYQPRERGQLRYVEQKAGITFKRVGVPSTMDLVKSKSMDAIRSLASVSYAAVDFFRPSAQRLIEEKGAVDALAAALAHISGASSFEPRSLITSDKGFVTMTLESLEEIQDVSCAWKELNRKLSSNAVSQITRMCLLKGNMGVCFDVPTTESERLQAEWHDSDWILSVPAKLPEIEEYYDGNTSSNSRQRSGWSSGRSGRSGRSGGRSGGRSGRQSRQGSRSGSRQDGRRRSGNRNRSRSGGHKRSFD

SEQ ID NO: 1962 - DNA, 661 bp, Rattus norvegicus
  misc_feature (1)..(661): n=a, c, g or t
  ref <308>: DATABASE ACCESSION NUMBER: EMBL / AI010371
  ref <309>: DATABASE ENTRY DATE: 2000-03-03
tcgtatgttgtgtggaattgtgagcggataacaatttcacacaggaaacagctatgacatgattacgaatttaatacgactcactatagggaatttggccctcgaggccaagaattcggcacgaggtgacctgtttcttcctgccagaaaccatcttctaatggctgtgaacttgcagtggattaattcattggttgtaccatctttatgacctagtcacctttttctgtagcaccatcaccagtttcaagtcttcaacgtacactagccttttggactgttttatatccaaactacaatactctccgtatctatatttttcaaactggttatagtagtattttctatcttgccttatgtttttctgaaagtattgcattttctgtgttagtagcatgcaaacatagcatattgagacccaagtttaaactccaacttaaaaaaaaaaagtattatgcaggacttggcagtgcctctgatcataattctaaaccttgattgagataaattatgtgtaaacgttctgtatcacctgtaaagaactaaataaatgtaatatttgttgttaattcattttaggtgttaaaagtatatattctatgctaaccaatatagttagattctacataaaaaaaaaaaaaaaaaaaaannaatggaagcg

SEQ ID NO: 1963 - DNA, 4171 bp, Rattus norvegicus
  ref <308>: DATABASE ACCESSION NUMBER: EMBL / AB005540
  ref <309>: DATABASE ENTRY DATE: 1998-12-29
ggcacgaggtctccccagcgcccggcggtccagcagcccgcgccccgccgcctcgctcctccccggctccgctgcccggagtactgggccgtccgcgaggctccgcggcccgggagccatgttgagcggggggctcggccacgcgtgaggcggccggcggccctcgcggagcggaaggcgcgagagggggaggcctgagcctgaggcgcctcggcgcgtccgccgccaccggacctgcatccgctcgttctgcgcgcccgcccgcccgtccgcccggagcccgcgatctccgcacttgctgaatttttcaagccatatccagctgataggatgaaaaagtttaagaggagactgtccctcacgctcaggggaagccagactattgatgagtccctgtcggagctggctgaacagatgaccatagaggagagcagtagcaaagacaacgagcccattgtgaagaatggcaggccgccaacgtctcacagcatgcattccttcctccatcagtacacagggtccttcaagaagcccccactgcgaagaccccacagcgttattggaggaagccttggttcctttatggcaatgcccagaaatggaagcagattagatattgttcatgaaaatctgaaaatgggatcagatggtgagagtgaccaagcttctgggacatcatctgatgaagtccagtcccctacaggtgtttgcctcagaaatcgtatacatagacggatctcgatggaggacttgaataagcggctgtcgctgcctgcagacatcaggatacccgatggctacctggagaagctgcagatcagcagcccgcccttcgaccagcccatgagccgcaggtcccgcagagcctccttatcagaaattgggtttgggaaaatggaaacctacatcaaattggaaaagcttggagagggcacatatgcaacggtatataaagggagaagtaagttgacagagaacttggtggcattaaaagagatccgcttggaacacgaagaaggtgcaccctgtacagctataagagaagtttcactgttaaaggacttaaaacatgcaaatatagtaacgttgcatgacatcgttcacacggacaagtctttgactctggtctttgagtacctggacaaagacctgaagcagtacatggacgactgtgggagcatcatgagcatgcacaacgtcaagctgttcctgtaccagattctccgtggtttggcatattgccatagaagaaaagtgttgcaccgggacctgaaaccacagaacctcctcattaatgaaagaggagaactaaagctggctgactttggactagccagagccaagtcagtccccaccaagacctactcaaatgaagttgtcacgctgtggtatcggccccctgacgtgcttcttggttcctcggagtactcaactcagatcgacatgtggggagttggctgcattttctttgaaatggcttctggaagaccactgtttccagggtcaactgtggaagatgaactgcacttaatatttcgactactaggaactccatctcaggaaacttggccaggtgtttcttcaaatgatgaattcaagaactacaacttcccaaaatataagccacaacctctaattaatcatgcacccaggttagattctgaaggaattgagttgataacaaagtttcttcagtatgaatctaagaaaagggctccagcagaagaggccatgaaacatgtgtacttccgaagtctagggccgagaatacatgctttaccagaaagcgtatcaatattcagtttgaaagagattcagttgcaaaaggacccgggttttcgaaattcttcctatccagagacaggtgtgtttgtcataaaccatttcacatgtcgatcatgaattttttttcgtggagccaagctttgggtttataaatcgatcagtaaaattattgatgtaaaaaaaaaaaaccaacaatgtacagtgcatcccaaaactctgtatttttagaattgcatatacttgctgttctgtacaatgtgggcagcgcagtaaatcttcagagagaaatgtgattcagtcaagtcagggatcctgcgagctgcagatggcacagagacctttcacaagtgacctggcttgaccactgcacacgccatccctggtacccgaggcagaagacacggcttgtgcttacctagccatccgcttcgtcactcggaagcctagaagctgtagactgaccccgtcaacacaaaggccctttaagacagtgccgaccactcttaccgtggaatagtagcgtttgctggtgggaatgttagcctcctagagtcaccaaatactgtatgtgggataatcactgagccttgaactgcctcatgaaatgactttatattttaggacatgggaagaacagaagacagagcatgctcttttaagtctggtagcttggtctcaagcccagccccagcctttcttaccagccatggactcagagctgaaggcagtcatttcttgtgctggacttgggatctccgtgtgtctgcactgtcctcttcccagtggagtctttttatttcagacctacagattgtttttatatttcttgtcacagtgtgacaatttttttttttttgtacagttggttttaaggtcttctctgcctgtagagccaggaggttacagctctcaatgtaactgtggctgcagatttgtgcaggactgagaaacacagtgcattatttattgtggaatcattgctgctaaataactactgtctgtttatttaacacaacagttgaatgcctgaagaagttgcagtggctttattagatgtgaacgcatctgtttctcctcacaaattgtttgactgctgcatttcgttgttgttttgttttgtttgtttgtttgtttttaaaaaaaaattaaactgcagtgtttcctggaatgtatatttagctttgcttagcagtaaaataagtgagccatcgtgaacactcgaagttcgtgctacttataatttcttaggagcattggccaatagagtagctgagagagggacagcaccgtgtgtttgggaagcgtgtaatgtgaggggctgagccaagcaaatgaatagcagccattttgggttcccacatcagacaccaatcaactaagaacaccaagttatccatttttacctattcctcacctgagagatgtctactgcctcttcgtatgcctacacttgattaacttttacactgtgctttcagttaacatttaaccgtagaggtcattcaaacaggaaaagccttgctgctgtttgtctgaagcacgtttcttttcctagatactacttcattttgaggaacagtttctttcacttgggggctgtgtatgtttcaaataacgttcacttggaataaccagctgaaactgactctgtctttaaatggagccatgatgaattagaaatgagaaataagagcccagaggactgccttagcattgtgggtattatctgctcatcagagacactaacagtgtaacttgaattatgcatgtccttgaccatcacagacactcggtgttggtaaccgtgtcttaggcattcgtgttcatcgttaaggactattggttagtgcatcttacaactagaaatcttaattggtatactttgaaatggtcatgtaagtttttgccttatatcatgaaaatagttataacttaatttttgtcctgccattcactgtaaaacattcagggtcctctcatttctgttcaggaaatcctgtagtttattgtttgttatttaacagtattaaagtgagtttttgtatattttcattttaactttatttgtgaatagtgattgtggcatgtttggggatgttattttaatatttcacaatactgaaattttaatttttttttttaaaaaaagaaagttctggaagaaacagattcatgtgtaacagtgaatattggaccactgctgcttttcacgattgtcagctggttttatgttaagccccgtagcctaactgctgttatttctaactgacagacatgtattaatattgtactttgaaggttataaatattatgtgaaaattccttccttcgttttgaaatttataataactaaatctctgtgttatataaaatgtgatctttgtgg

SEQ ID NO: 1964 - protein, 524 aa, Rattus norvegicus
  misc_feature (1)..(524): Xaa=Unknown amino acid
MKKFKRRLSLTLRGSQTIDESLSELAEQMTIEESSSKDNEPIVKNGRPPTSHSMHSFLHQYTGSFKKPPLRRPHSVIGGSLGSFMAMPRNGSRLDIVHENLKMGSDGESDQASGTSSDEVQSPTGVCLRNRIHRRISMEDLNKRLSLPADIRIPDGYLEKLQISSPPFDQPMSRRSRRASLSEIGFGKMETYIKLEKLGEGTYATVYKGRSKLTENLVALKEIRLEHEEGAPCTAIREVSLLKDLKHANIVTLHDIVHTDKSLTLVFEYLDKDLKQYMDDCGSIMSMHNVKLFLYQILRGLAYCHRRKVLHRDLKPQNLLINERGELKLADFGLARAKSVPTKTYSNEVVTLWYRPPDVLLGSSEYSTQIDMWGVGCIFFEMASGRPLFPGSTVEDELHLIFRLLGTPSQETWPGVSSNDEFKNYNFPKYKPQPLINHAPRLDSEGIELITKFLQYESKKRAPAEEAMKHVYFRSLGPRIHALPESVSIFSLKEIQLQKDPGFRNSSYPETGVFVINHFTCRSX

SEQ ID NO: 1965 - DNA, 3741 bp, Rattus norvegicus
  ref <308>: DATABASE ACCESSION NUMBER: Refseq / NM_017340
  ref <309>: DATABASE ENTRY DATE: 2003-01-14
acacgggtcgttgctttggtgtctgtcacttctgtcgccacctcctctgccaacaccaacactgacctccgtcatgaaccccgacctgcgcaaggagcgggcctccgccaccttcaatccggagttgatcacgcacatcttggatggcagtccggagaatacccggcgccgtcgagaaattgagaacttgattctgaacgacccagacttccagcatgaggactataacttcctcactcgaagccagcgttatgaggtggctgttaagaagagtgccaccatggtgaagaagatgagggaatatggcatctcggaccctgaagaaatcatgtggtttaaaaaactatatttggccaattttgtggaacctgttggcctcaattactccatgtttattcctaccttgctgaatcagggcaccactgctcagcaggagaaatggatgcgcccgtcccaagaactccagataattggcacctacgcccagacggagatgggccacggaactcatcttcgaggcttggaaaccactgccacatatgaccccaagacccaagagttcattctcaacagccctactgtgacttccattaagtggtggcctgggggacttgggaaaacttccaatcacgcaatagttctggctcagctcatcactcaaggagagtgctacgggttacatgcctttgttgtccctatccgtgaaattgggacccacaagcccttgccaggcatcactgtcggggatatcggtcccaaatttggttatgaagagatggataacggctacctgaagatggacaattaccgtattcccagagagaacatgctgatgaaatacgcccaggtgaagcctgatggcacatatgtaaagcctttgagtaacaagctgacgtatgggaccatggtttttgtgaggtccttcctcgtgggaaatgcagctcagagtctgtccaaggcttgcacaatcgccatacgatacagcgctgtgaggcgccagtctgaaatcaagcaaagcgaaccagaaccacagattttggattttcaaacccagcagtataaactcttcccgctcctggccactgcctatgccttccacttcgtaggaaggtacatgaaggagacctaccttcgaattaatgagagcattggccaaggggacctgagtgaactgcctgagcttcacgccctcactgctgggctgaaggcttttactacttggacagccaatgctggcatcgaagaatgtcgaatggcctgcggcgggcacggctattctcacagcagtgggattccaaatatttacgtcacttttaccccggcctgcaccttcgagggagagaacactgttatgatgctgcagacagccaggttcttgatgaaaatctatgaccaggtgcggtcggggaagttggtgggtggtatggtgtcatacctgaatgacctgccgagtcagcggatccagccacagcaggtggcagtctggccaactatggtggacatcaacagcctggagggcctgacagaagcctacaagcttcgtgcagccagattggtagaaatcgctgcaaaaaaccttcagactcacgtgagtcacaggaagagcaaggaagtagcatggaacctaacctctgtcgaccttgttcgggcaagtgaggcgcattgccactacgtggtcgttaaggtcttctcagacaaactccccaagattcaagacaaagccgtccaagctgtgctgaggaacctgtgtctcttgtattctctctatgggatcagccagaaaggaggggactttcttgaggggagcatcatcacaggggctcagctgtcacaagtaaacgctcggatcctggagctgctcaccctgatccgccccaatgctgttgctctggtggatgcctttgactttaaggacatgacacttggctctgttcttggccgctatgatggaaatgtgtatgaaaacttgtttgagtgggccaagaaatccccactgaacaaaacagaggtccatgaatcttaccacaagcacttgaagcccctgcagtccaagctttgaagtttccctgggacacgtctgagctccacaagcagcagaaactctctcctctactcactaatccttgtgaaatcgtcatcaaatttgtgtagctacagagcaaatgatgggtttcttttcctccctataagtaaagagaaatgaacagactttagagattaaatgagaaattcggtgttgtaagtgcagtaatgcagacagagacgtaggaactcagaaagcttcagagctgtggtctgacttgcatttgtactgctgctaatctcagtaggccttgactctggagaattaacagagttttaactacaaatacttacttattttcacatttttactgctaatcactggatatatgttttttaaacaaaagtgttatatagagtggaattttccaggcattcgtgcctaccactttctgatctactgctaagagcaggagtttgggggccagaaactaatagaaaccttgatgtgggtgtgtggctgtcacacaggccgctgctgcctgccatgtgggtgtgtcacccctattaactgtcacattaacatagtcaacaagaggactccttcaacacccacccaccaagaaaccagagttcccgatgggcacaagcacccactccaggctcagccttcgtggtagtggcactactgtgcctttgaccccactttttgacacagttaagttacttgtcttacctccaggctttcagccattgcctggatttcagtcatggtggctgaccttccctttcttgcttgccttccttctcctgaaagagataaaagagatagtagtcagcctctcctcatagattaagtatatggagagccctcagctatggtattactgtattttggtgactttgttaagtaaatttcctgggacaatcctgatttgaaagattctgtattctgttgcacaagctattaaaatgctcagtggtcaccaaagtatttcacacacacacactcacaaatcactcaggtcaccttttacactagaaataacaggaaagccctggccacagccatctgctgagagtgttagttgagatgtttcgttgaagatggctgaagaaagtgcaggccctggggagtttctccttgctgagagccggctctgtggtgagcccctagcagccttacgaggcggtgaaacggccccttcagatgggagcagcctctacaatcattctgagcttaaaggtgaaatatgcaccttttgtcctataaatgtcctataaatgcttggggggaggggtaatgttttgttttttttttcttgaaacagagcccagaatggccttgaactctgatcctcacagcctggtaaatgctgggcctacaggtgtgcgccgacatgtctggctgatcggagctctttattcttaaaagcacagtagggagatgattgtaacattaagtctgtgtctgtggcattcgcattgtgagagcagttccttagaacagttctgagagcacagcatcaatgtagtgaaaacgatgtcgacgcctgacatgaaatcacaaccctccgggtcatcgacacaagccttaacctttctcctggaatgactggtaatcccttaagattgacagtacacagcatgtcaccttgttggggtttctattgacagtaattcatattctggaaaggaactaataaatataaatgaccg

SEQ ID NO: 1966 - protein, 661 aa, Rattus norvegicus
  ref <308>: DATABASE ACCESSION NUMBER: Refseq / NP_059036
  ref <309>: DATABASE ENTRY DATE: 2003-01-14
MNPDLRKERASATFNPELITHILDGSPENTRRRREIENLILNDPDFQHEDYNFLTRSQRYEVAVKKSATMVKKMREYGISDPEEIMWFKKLYLANFVEPVGLNYSMFIPTLLNQGTTAQQEKWMRPSQELQIIGTYAQTEMGHGTHLRGLETTATYDPKTQEFILNSPTVTSIKWWPGGLGKTSNHAIVLAQLITQGECYGLHAFVVPIREIGTHKPLPGITVGDIGPKFGYEEMDNGYLKMDNYRIPRENMLMKYAQVKPDGTYVKPLSNKLTYGTMVFVRSFLVGNAAQSLSKACTIAIRYSAVRRQSEIKQSEPEPQILDFQTQQYKLFPLLATAYAFHFVGRYMKETYLRINESIGQGDLSELPELHALTAGLKAFTTWTANAGIEECRMACGGHGYSHSSGIPNIYVTFTPACTFEGENTVMMLQTARFLMKIYDQVRSGKLVGGMVSYLNDLPSQRIQPQQVAVWPTMVDINSLEGLTEAYKLRAARLVEIAAKNLQTHVSHRKSKEVAWNLTSVDLVRASEAHCHYVVVKVFSDKLPKIQDKAVQAVLRNLCLLYSLYGISQKGGDFLEGSIITGAQLSQVNARILELLTLIRPNAVALVDAFDFKDMTLGSVLGRYDGNVYENLFEWAKKSPLNKTEVHESYHKHLKPLQSKL

SEQ ID NO: 1967 - DNA, 410 bp, Rattus norvegicus
  ref <308>: DATABASE ACCESSION NUMBER: EMBL / AA858590
  ref <309>: DATABASE ENTRY DATE: 2000-03-03
tttttttttttttttttgcagatacaaagccgtatttatacatttatttatatgtctattcacttacgaagaggaccatttgggggacaggaagcaagtaggctgggtggcacctccctgccttcctcagagtcagagtgagtacatgataaataggagtcagagccatggagaaaagggagttaaccagaagggagacgctctatgaacacgcaggctgctaaggggtacagcatgggcagggatctgtgctgcgggccctatatacagcttaaagcgagggggagattagcccagtggctataggaacagcagaaggaagagaggaagggagtgccagctaggctgtcagcttccagcctgtggcccttacaccttcccctaagcccttctacatttggggcttaagg

SEQ ID NO: 1968 - DNA, 5745 bp, Homo sapiens
  ref <308>: DATABASE ACCESSION NUMBER: Refseq / NM_032669
  ref <309>: DATABASE ENTRY DATE: 2002-11-04
cacagggcctgcagagaggggacccaccgggcaggatgcactggcttccagcaggccacgacatcaacggtgccctggagccctccaacatagacaccagcatcctggaggagtacatcagcaaggaggatgcctccgacctctgcttccctgacatctctgctccagccagctcggcctcctactcccacgggcagcctgcgatgcctggctccagcggggtccaccacctgagcccccctgggggtggaccctccccggggcgccatggtcccctcccacccccgggctacggcaccccgctgaactgcaacaacaacaacggcatgggcgctgcccccaagcccttcccggggggcaccgggccccccatcaaggctgagcccaaggctccctatgccccaggcacactgccggactctcccccagactcgggctccgaggcctactccccccagcaggtgaatgagccccacctcctgcgcacgataacccctgagacactgtgccacgtgggagtgccctcccgcctggagcatccgcccccacctccagcccacttgccaggccccccgccacccccaccacccccacctcactaccctgtcctgcagcgggatctgtacatgaaggccgagcccccgatcccccactacgctgccatggggcaggggctggtgcccactgatcttcaccacacccagcagtcccagatgctgcaccagctcctgcagcagcacggagctgagctccctacacacccctccaagaagaggaagcactctgaatcccccccgagcaccctcaatgcccagatgctgaatggaatgatcaaacaggagcctgggaccgtgacagccctgcctctgcaccccactcgagccccatcgccaccctggcctccccagggtccgctctccccgggccctggttccttgcctctcagcattgcccgtgtccagacaccgccttggcacccgccaggtgccccctccccaggcctcctgcaggacagtgacagcctcagtggctcctacctggaccccaactaccagtccatcaagtggcagcctcatcagcagaacaagtgggcgaccctgtacgatgctaactacaaggagctgcccatgctcacctaccgcgtggatgcggacaagggcttcaacttttcggtgggcgacgacgcctttgtgtgccagaagaagaaccacttccaggtgacagtgtacatcggcatgctgggcgagcccaagtacgtcaagacgcccgagggcctcaagcccctcgactgcttctatctgaagctgcacggagtgaagctggaggccctgaaccagtccattaacatcgagcagtcccagtcagaccggagcaagcggcccttcaacccggtcacggtcaatctgccccctgagcaggtcacgaaggtgactgtggggcggctgcacttcagcgagaccaccgctaacaacatgcgtaagaagggcaagcccaacccggaccagaggtacttcatgctggtggtggccctccaggctcatgcacagaaccagaactacacgctggccgcccagatctcagagcgcatcattgtgcgggcctccaacccaggccagttcgagagcgacagcgatgtgttgtggcagcgggcacaggtgcccgacaccgtcttccaccacggccgcgtgggcatcaacacagaccggccggatgaggcgctggttgtgcacgggaatgtcaaggtcatgggctcgcttatgcacccctccgacctgcgcgccaaggaacacgtgcaggaggtggacaccaccgagcaattgaagaggatctcgcgcatgcggctggtgcactacagatacaagcccgagttcgccgccagcgcgggcatcgaggccaccgcgccagagacaggtgtcatcgctcaggaggtgaaggagatcttgcctgaggctgtgaaagacaccggagacatggtctttgccaatgggaaaaccatagagaacttcctggtggtgaacaaggagcgcatcttcatggagaacgtaggggccgtgaaggagctgtgcaagctgacagacaacctggagacgcgcattgatgagctggagcgctggagccacaagctggccaagctgcggcggctcgacagcctcaagtccaccggcagctcgggcgccttcagccatgcagggagccagttcagtcgggcgggcagcgtcccccacaagaagaggccccccaaggtggccagcaagtcatcgtccgtggttccggaccaggcctgcatcagccagcgcttcctgcagggaaccatcattgccctggtggtggtcatggccttcagcgtggtgtccatgtccacactgtacgtgctgagcctgcgcacagaggaggacctggtagacactgatggcaggtccagccagagctttgggaccacgcagctccgacagtcccccttgaccacggggctaccaggcatacagccctctttgctgctggtgaccaccagcctcaccagctcggccccaggttctgctgtccgcaccttggacatgtgttccagccacccctgccctgtcatctgctgttcctcacccactaccaaccctaccactggtcctagtcttggccccagctttaaccctggccatgttctcagcccaagtcccagccccagcaccaaccgctcaggccccagccagatggcccttctgccagtcaccaacatcagagccaagtcctggggtctttcagtcaatggcattggccactccaagcatcacaagagtctggagcctctggccagccctgcagtccccttccctggggggcagggcaaagccaagaacagtcccagccttggtttccatggccgggcccgccgaggggccctccagtccagcgtgggccctgctgagcccacctgggcccagggccagtcagagccagtgccctccctgacctccatccaggtgctggagaattcgatgtccatcacctcccagtactgtgctccaggggatgcctgcaggcctgggaacttcacctaccacatccctgtcagtagtggcaccccactgcacctcagcctgactctgcagatgaactcctcctcccccgtgtctgtggtgctgtgcagcctgaggtcaaaggaggaaccatgtgaggaggggagccttccacagagtctccacacccaccaggacacccagggcacctctcaccggtggccaataaccatcctgtccttccgtgaattcacctaccacttccgggtggcactgctgggtcaggccaactgcagttcagaggctctcgcccagccagccacagactaccacttccacttctaccgcctgtgtgactgagctgccctcctgaggcagcaccacaccagggaccaggggtgcccaggcaccccccaacactggatgcaatggtgttacactggagcccgctgcaggccagctctgctgttcactggccctacccgagactggtgaaactggaagtcttcacactggagttgctgttccagctggtcgcccctcacggcacagagggaacctgagagccagagacttcttgggccttcctgcctgccaccccctaggggccaggacaggaccagtttacctctttccagatatggtggttggagggctggttcaggtgccctggagggaaggggaagcctgtggccctgatttgttcagagcccattctcccttgcctccccttttgagactggagccaacccttttggagagaggacctgcccacctttgagatcagcagggggctcggatccagccctaagagacttgggtggacccccatgagtcaatggagggcagacggctctcccccttaaagctgttccctgggggatggcttggtagtggactttctggggtttgcctgttacgccagactcggacttctaagctttaagtgtggcccaggaggtttcttctccctgggagggcttggctcccaagaagtcccagggcagccgaggccagccctgcctgggttggagaaactgactttgtgccttaagtctactcagtgcctggtgaagccaccctcagcccttcacaggcctgaaccagtaggggccagtgggccaggtaagccctagagccttgaaccaggaatatccaggaagaggaaattccctttgagcccccagatggtattgcagcttcactgcctgcgttcctgggagcgtctggagctcacagtgatcagtgaccacatcattctctctgagcagaggagcaggaatccctcaagcagcagcctggtcttggctggtgggcagatgcaaatagcttttgctgttattaatgaagtaattactaaatgcacttaaaccagggcaggaaggaatggaaggatggagctagaaagctcagagtgggccagagcaggggtgtgacacttgcaaagacagggctctgactctgatccctcccagggagcctccgacacccatcccactcccaaccaccaagaccctgggttagggaagaagttgtatcttaagtgccaccttcaagtttcttagtggtgcctggtgcattccgaggctacatccaggctcatggaaggagtgtagtattcatttagccatgtctgccatgggtccagaaatgggaaagggaattgctgtccttgccctgtggtatgctgccacctctttgggaagcaggccttgcccctgtcccaccactcattctcagctttgaatgggaggcctttctatagtggaggcctttccttgaagcctatgaactgcaggcccccttttgccattgatctcaaagcacttgtcctcaggatagggaagagcagggggatgcaggaatagcagggatagcttgctcccagccccctccccaatttggttccgttgacataggaattttacgattcccaaaccatgcaggggctgagccttccttatgatgactttgttctccctcccactgggggaatcctccctatgccttaaaactgccgagccccactccatgtaataggattcctgggcttcctcaatgggggttcatgttcttggactgcgggccctcagtccttaactggaaagtgaccgtccactgccccatggagcccatctggacacagcacagccccaaaaccgttagcagctggctctgtttccaagcctggggaggggttcctcagtgcaggagttggggacaggctggggatccaagctgcttgagggggtcaaccttggaccaaagttgccttaagcctgtggtaaaagggcttcagggaaggtaagtgggccacctgctggaagctgccagctgcccggctggcaatggtgtgagtgtcttggccctgtccctgccctggggtccagcaggtcatccctcccttcttctctctcctttggcgtttgttcctgtagtcactgggctaatctccccctagcttcaagctgtacatagggcctcccagtgcaaatcctcctgcccataccgtgcacccttagaagcctgcgtgtgcatagagcgccccctacttcccagttaactcccagttcttctccctgagcttggtatttgtcatgtgccaactctgactctgaggtgggcagtgagggaagcagccccgggcctgcttgcttcctgtccccgaaatgttcgtttcttctgaagtaaatatacatatataaataaatgtataaatactgctttgtatctg

SEQ ID NO: 1969 - protein, 1111 aa, Homo sapiens
  ref <308>: DATABASE ACCESSION NUMBER: Refseq / NP_116058
  ref <309>: DATABASE ENTRY DATE: 2002-11-04
MHWLPAGHDINGALEPSNIDTSILEEYISKEDASDLCFPDISAPASSASYSHGQPAMPGSSGVHHLSPPGGGPSPGRHGPLPPPGYGTPLNCNNNNGMGAAPKPFPGGTGPPIKAEPKAPYAPGTLPDSPPDSGSEAYSPQQVNEPHLLRTITPETLCHVGVPSRLEHPPPPPAHLPGPPPPPPPPPHYPVLQRDLYMKAEPPIPHYAAMGQGLVPTDLHHTQQSQMLHQLLQQHGAELPTHPSKKRKHSESPPSTLNAQMLNGMIKQEPGTVTALPLHPTRAPSPPWPPQGPLSPGPGSLPLSIARVQTPPWHPPGAPSPGLLQDSDSLSGSYLDPNYQSIKWQPHQQNKWATLYDANYKELPMLTYRVDADKGFNFSVGDDAFVCQKKNHFQVTVYIGMLGEPKYVKTPEGLKPLDCFYLKLHGVKLEALNQSINIEQSQSDRSKRPFNPVTVNLPPEQVTKVTVGRLHFSETTANNMRKKGKPNPDQRYFMLVVALQAHAQNQNYTLAAQISERIIVRASNPGQFESDSDVLWQRAQVPDTVFHHGRVGINTDRPDEALVVHGNVKVMGSLMHPSDLRAKEHVQEVDTTEQLKRISRMRLVHYRYKPEFAASAGIEATAPETGVIAQEVKEILPEAVKDTGDMVFANGKTIENFLVVNKERIFMENVGAVKELCKLTDNLETRIDELERWSHKLAKLRRLDSLKSTGSSGAFSHAGSQFSRAGSVPHKKRPPKVASKSSSVVPDQACISQRFLQGTIIALVVVMAFSVVSMSTLYVLSLRTEEDLVDTDGRSSQSFGTTQLRQSPLTTGLPGIQPSLLLVTTSLTSSAPGSAVRTLDMCSSHPCPVICCSSPTTNPTTGPSLGPSFNPGHVLSPSPSPSTNRSGPSQMALLPVTNIRAKSWGLSVNGIGHSKHHKSLEPLASPAVPFPGGQGKAKNSPSLGFHGRARRGALQSSVGPAEPTWAQGQSEPVPSLTSIQVLENSMSITSQYCAPGDACRPGNFTYHIPVSSGTPLHLSLTLQMNSSSPVSVVLCSLRSKEEPCEEGSLPQSLHTHQDTQGTSHRWPITILSFREFTYHFRVALLGQANCSSEALAQPATDYHFHFYRLCD

SEQ ID NO: 1970 - DNA, 2025 bp, Rattus norvegicus; identical to SEQ ID NO: 1842
  ref <308>: DATABASE ACCESSION NUMBER: Refseq / NM_012656
  ref <309>: DATABASE ENTRY DATE: 2003-01-14

SEQ ID NO: 1971 - protein, 301 aa, Rattus norvegicus; identical to SEQ ID NO: 1843
  ref <308>: DATABASE ACCESSION NUMBER: Refseq / NP_036788
  ref <309>: DATABASE ENTRY DATE: 2003-01-14

SEQ ID NO: 1972 - DNA, 2133 bp, Homo sapiens; identical to SEQ ID NO: 1844
  ref <308>: DATABASE ACCESSION NUMBER: Refseq / NM_003118
  ref <309>: DATABASE ENTRY DATE: 2002-11-05

SEQ ID NO: 1973 - protein, 303 aa, Homo sapiens; identical to SEQ ID NO: 1845
  ref <308>: DATABASE ACCESSION NUMBER: Refseq / NP_003109
  ref <309>: DATABASE ENTRY DATE: 2002-11-05

SEQ ID NO: 1974 - DNA, 451 bp, Rattus norvegicus
  ref <308>: DATABASE ACCESSION NUMBER: EMBL / AA893869
  ref <309>: DATABASE ENTRY DATE: 2000-03-03
ctgttgacagggacaaaggtatcccagcaacaaggaagtgggcagccacagtccatgacctcagcttacttcctggtgtggggctgaagccaataggaccaaagtagggctgcgaccccgagtgtccctcagctttctccctgtaccacagcgggagctcatacccaacccaaccactgtagccaccagccccatctgtgtcctcaagacatatccaaggaagggctcgtgggtggccggccatgtgctcagcagagacccagaggcaaggaccacaaagtatgggttccacacaagtggacacccagagtcttcctttggttggaatctttggtgacatcactgggtgcggagcccagggtcatctgcttctgtcagtgcgtctgcatcctgtgtatctcttgacaataaaggccaaattgcagccgcctgtgtgggcggggcctctacc

SEQ ID NO: 1975 - DNA, 458 bp, Rattus norvegicus
  ref <308>: DATABASE ACCESSION NUMBER: EMBL / AI639233
  ref <309>: DATABASE ENTRY DATE: 2000-03-04
atctgtcaatattattgctaaaaagaaaaaaatattttgaaaaagaaagaatgctagattctggaaattcaagtatagcgcggatgcctttcccgtatgacttatcatgcatcaagccaaatatacagattgaataattacctacaataaaaatattttatctgtagtattcagaatcacttttaaaattttctgtagatgtgaactgaggtatcgaagtctgatgtaatcatagatgtcaacatttaataaagctaaaaggaacagaatacaaagtcttctgtaattcatagagctaaattgactcttttgacataaagtcaaatgtagaactctagcaatgtattaatctcctttattattggtaaagtcttatttgaatatctaagttcaacatgggctatgtaaaattttcactgtcatactgaaaaacaataaaatttaaaaaatgcattcaa

SEQ ID NO: 1976 - DNA, 1411 bp, Rattus norvegicus
  ref <308>: DATABASE ACCESSION NUMBER: Refseq / NM_024139
  ref <309>: DATABASE ENTRY DATE: 2003-01-13
tgtctaaaaacagaggagaggccgcactgccctttaagtgctgtccctagcgccaccgtggtattgtcgctttaaggccggcggcatccctggttccgggggcggggcctgcctccctttggactccagcagccgcccggctgattcattccgggcacgagcgccaagctttgacgttagcgcctgcgcaggacgcggcctcactccggattggctggtgtcggtccgccctcccccgcgcgccacccctagtttccctccccgggccgcaggagaaacagtgccctctcccttcttgacccctggcccttccctcccttattccctcttgccgccgctgcttctggcgctgccgctcccggaggagctcccgtcacggtgatggggtctcgggcctccacgttactgcgggacgaagagctcgaggagatcaagaaggagactggcttttcccacagtcagatcacacgcctgtacagccgcttcaccagcctggacaaaggggagaacggaactctcagccgggaagatttccagaggattccagaacttgccatcaacccactgggggaccggatcatcaatgccttcttctcagagggagaggatcaggtaaacttccgaggattcatgagaactttggctcatttccgacccattgaggataacgaaaagagcaaagatgtgaatggaccggaacccctcaacagccggagcaacaaactgcactttgctttcagactttatgacttggataaagatgacaagatctcccgcgatgagctgttacaggtactgcgaatgatggtcggagtgaatatctcagatgagcagctgggcagtattgcagacaggaccatccaggaggctgaccaagatggagacagtgccatatcttttacagaatttgttaaggttttggagaaggtggatgtagaacagaagatgagcatccgatttcttcactaaagggcagagaccaaattattcttgctttctagtatttaagaactgaaacttccttctgtcctccagccccaccccatcctgtcatccccctttcccagaatactacagctcctgcatgacaacctgaagtctctcctgtccatacaaacttgcctttggtgtataaacagggcgttacagaatggtaccctgtctatttctgttcggtatccacccatcagtctttattgtaagtaccaacttcccctgttctactgctcagtgccacgcatccgtcctgtctgaggaaagaaacagggactcatgtcaagaaccagccagcaaagctcccactagatgggaccatatccatgctggccttcccttcatcagccctccatcatggtcctgggcgggtcgggtctgggtgtctctactttgacagctttcatcagctttcagc

SEQ ID NO: 1977 - protein, 195 aa, Rattus norvegicus
  ref <308>: DATABASE ACCESSION NUMBER: Refseq / NP_077053
  ref <309>: DATABASE ENTRY DATE: 2003-01-13
MGSRASTLLRDEELEEIKKETGFSHSQITRLYSRFTSLDKGENGTLSREDFQRIPELAINPLGDRIINAFFSEGEDQVNFRGFMRTLAHFRPIEDNEKSKDVNGPEPLNSRSNKLHFAFRLYDLDKDDKISRDELLQVLRMMVGVNISDEQLGSIADRTIQEADQDGDSAISFTEFVKVLEKVDVEQKMSIRFLH

SEQ ID NO: 1978 - DNA, 697 bp, Homo sapiens
  ref <308>: DATABASE ACCESSION NUMBER: Refseq / NM_007236
  ref <309>: DATABASE ENTRY DATE: 2002-11-05
cttccttccctccctccttccctcctgtcgccgtctcttctggcgccgctgctcccggaggagctcccggcacggcgatgggttctcgggcctccacgttactgcgggacgaagagctcgaggagatcaagaaggagaccggcttttcccacagtcaaatcactcgcctctacagccggttcaccagcctggacaaaggagagaatgggactctcagccgggaagatttccagaggattccagaacttgccatcaacccactgggggaccggatcatcaatgccttctttccagagggagaggaccaggtaaacttccgtggattcatgcgaactttggctcatttccgccccattgaggataatgaaaagagcaaagatgtgaatggacccgaaccactcaacagccgaagcaacaaactgcactttgcttttcgactatatgatttggataaagatgaaaagatctcccgtgatgagctgttacaggtgctacgcatgatggtcggagtaaatatctcagatgagcagctgggcagcatcgcagacaggaccattcaggaggctgatcaggatggggacagtgccatatctttcacagaatttgttaaggttttggagaaggtggatgtagaacagaaaatgagcatccgatttcttcactaaaggagaccaaactgttccttgcggtctagtat

SEQ ID NO: 1979 - protein, 195 aa, Homo sapiens
  ref <308>: DATABASE ACCESSION NUMBER: Refseq / NP_009167
  ref <309>: DATABASE ENTRY DATE: 2002-11-05
MGSRASTLLRDEELEEIKKETGFSHSQITRLYSRFTSLDKGENGTLSREDFQRIPELAINPLGDRIINAFFPEGEDQVNFRGFMRTLAHFRPIEDNEKSKDVNGPEPLNSRSNKLHFAFRLYDLDKDEKISRDELLQVLRMMVGVNISDEQLGSIADRTIQEADQDGDSAISFTEFVKVLEKVDVEQKMSIRFLH

SEQ ID NO: 1980 - DNA, 356 bp, Rattus norvegicus
  ref <308>: DATABASE ACCESSION NUMBER: EMBL / AA799819
  ref <309>: DATABASE ENTRY DATE: 2000-03-03
gacatggctgagcgtttattgcagtgctaacagagggtgctgggggcctgtccctggcccagatgatttaggggcctgcagagtagaaacaaaagcttcactgcatgactgcagcatttctgtaacctgctttgacctaaagaagagagaagccagactcttactctagagatggttgggtagccagatctaacccataccacatgcatcagtcccggtcctacagctggtgggcaactcataccaggaggaggaggtgagctggtgaggggagaaggggtcacttcgtctttcaagtcttaatttatattttaacttcaaatgtattttcagtgcctcagatacagcctcgtgcc

SEQ ID NO: 1981 - DNA, 1761 bp, Rattus norvegicus; identical to SEQ ID NO: 1698
  ref <308>: DATABASE ACCESSION NUMBER: Refseq / NM_012600
  ref <309>: DATABASE ENTRY DATE: 2003-01-14

SEQ ID NO: 1982 - protein, 586 aa, Rattus norvegicus; identical to SEQ ID NO: 1699
  ref <308>: DATABASE ACCESSION NUMBER: Refseq / NP_036732
  ref <309>: DATABASE ENTRY DATE: 2003-01-14

SEQ ID NO: 1983 - DNA, 2212 bp, Homo sapiens; identical to SEQ ID NO: 1700
  ref <308>: DATABASE ACCESSION NUMBER: Refseq / NM_002395
  ref <309>: DATABASE ENTRY DATE: 2001-03-23

SEQ ID NO: 1984 - protein, 572 aa, Homo sapiens; identical to SEQ ID NO: 1701
  ref <308>: DATABASE ACCESSION NUMBER: Refseq / NP_002386
  ref <309>: DATABASE ENTRY DATE: 2001-03-23

SEQ ID NO: 1985 - DNA, 626 bp, Rattus norvegicus
  ref <308>: DATABASE ACCESSION NUMBER: EMBL / AI230228
  ref <309>: DATABASE ENTRY DATE: 1999-01-22
ccaactggttctttatcgttaggagcgtatcccaaggaggttgagaggtcctatgtgctggatggacagctgtgagtcggccaggttctgcagctgttggttaaagtcagcagtgactgatgagcattctggatctgtgtactgcaattcccataaaaagacaggcatgataggccgtgtttatggggtgggaacttttttaaacaccatacggtttatatctatgcttttgaatttctaatgaaacagttctgtagaggcttttcagagttcgttcagcccgtgactttgtgcatgaccgtcgtctgttgtggacactggcaccctccacctactgccttttaaagctgcttcatgagaaggatctaggagttccatgatttacttttcttgccacaagtagaagaaatggttgtttctttgcttttcggttaggccgttaaacaaaactcagttacacccccacccccaaactgtgatcgcatggctgtttttgtagtttaaccagggcaatctgtacattccagatctttgctgaggtcttttctggttgttcatgtgttagtgttttcgattgacgatatgaagaacattaaagtcctgagtcatctaaaaaaaaaacattg

SEQ ID NO: 1986 - DNA, 4383 bp, Rattus norvegicus
  ref <308>: DATABASE ACCESSION NUMBER: Refseq / NM_054004
  ref <309>: DATABASE ENTRY DATE: 2003-01-13
tctggcctcttgccctaagaagcgagtgcggagggagtgggagcgagactgcccgaacgcaagtgtctggcttcccggcgaggcccaggcgtccgtcccgccgcccatgaactcgttgccccgcgagcagcgccgtcgttaggccgtccccgtcactctcgctcgcccccatccccgggcagccattcccccctacccacgtctggccggggactggacgtcgtgtcgaagcgccttccccagtccgcgtcgcgctgcgaccctggaagcgggcgccgccgccaacgagaggaggagccccggccgcggggcccagcagccactgagccagcaggcgggatcgaggccggcaacatggcgagcgcttcgtaccacatctccaacttgctggaaaaaatgacatccagcgacaaggacttcaggtttatggctacaaatgatctgatgacagaactgcagaaagactccatcaagctggatgatgacagcgaaaggaaagtcgtaaagatgattctgaagttgctggaggataaaaatggcgaagtgcagaacttagctgtgaaatgtcttggtcctttagtgagtaaagtgaaagagtaccaagttgagacgattgtagacaccctctgtacaaacatgctttctgacaaggagcagcttcgagatatttccagtattggccttaaaacagtaattggagaactccctccagcttccagtggctctgcattagctgctaatgtatgtaaaaagattactggacgccttaccagtgcaatagcaaagcaggaagatgtttctgttcagctagaagctttagatattatggctgatatgttgagcaggcaaggaggactgcttgttaatttccatccttcaattctgacctgtctacttccccagctgactagccctagacttgcagtcaggaaaagaacaattattgctcttggccacctagttatgagctgcggaaacatagtttttgtagaccttattgaacatctgttgtcagagttgtccaaaaatgactccatgtcaacaacaaggacctacatacagtgtattgctgctattagtaggcaagctggccatagaataggtgaataccttgaaaagataattcctttggtggtaaaattttgtaatgtagatgatgatgaattaagagaatactgcattcaagcttttgaatcatttgtgagaagatgccctaaggaagtttatcctcatgtttctaccattataaacatttgtctaaaataccttacctatgatccaaattacaactatgatgatgaagatgaagatgagaatgctatggatgctgatggcggagatgacgatgaccaagggagtgacgatgaatacagtgatgacgatgacatgagttggaaagtgaggcgtgcggctgccaagtgcctggatgccgtagttagcacacggcatgagatgctcccggaattctacaagaccgtctctcctgcactgatatccagatttaaagagcgcgaagagaatgtaaaggcagatgtttttcatgcatacctttctcttttgaagcaaactcgtccagtacaaagttggctgtgcgaccctgatgcaatggagcaaggagaaacacccttaacaatgcttcagagtcaggttcccaacattgttaaagccctacataaacagatgaaagaaaaaagtgtaaagacccgacagtgttgttttaacatgttaactgaactggtaaatgtgttgcctggggcactaacccaacacattcctgtacttgtaccaggaatcattttctcactcaatgataagtccagctcatcgaatctgaagattgatgcattgtcctgtctgtatgtgatcctctgtaaccactctccgcaagttttccacccgcatgttcaggctttggtccctccagtggtggcttgtgttggtgacccattttacaagatcacatcagaagcccttcttgtcactcagcagcttgtcaaagtaatccgtcctctggaccaaccctcctccttcgatgcaacgccttacatcaaagatctcttcacttgtacaattaagcgcttaaaagcagctgacattgatcaggaagtcaaggagagggctatttcctgtatgggacagattatttgcaatcttggagacaatttgggccctgacttatcaaatacacttcagattttcttggagagactcaagaatgaaatcacccggctaacgacagtgaaagcactgaccctgattgctgggtcacctttgaagatagatctgaggcctgtgctgggagagggagtccctatccttgcttcatttctcaggaaaaatcagagagctttgaaactggggaccctctctgccctagatattctcattaaaaactatagtgacagtttgacggccgccatgattgatgcagttctggatgagctccctcctcttatcagcgaaagtgatatgcacgtgtcccagatggctatcagcttccttactaccctggcaaaagtatatccctcctccctttcaaagataagcggatctattctcaatgaactgattggacttgtaaggtcacctctgctgcagggaggagctcttagtgccatgctagacttcttccaagctttggttgtcactggaacaaacaatctaggatacatggatttgctgcgcatgctaacgggtccagtttactctcagagcacagctcttactcataagcagtcttactattccattgccaaatgtgtagctgcccttactcgagcatgccctaaagagggaccggctgtagtaggtcagtttattcaagatgtcaagaactccaggtctacagattccattcgtctcttagcgctcctttctctaggagaagttggacaccatattgacttaagtgggcagttggagctaaaatctgtaatattagaggctttctcctctcctagtgaagaagttaaatcagctgcatcctatgcgttaggcagcatcagtgtaggcaacctccctgagtatctgccatttgtactacaagaaataaccagtcagcccaaaaggcagtacctgctgctgcattccctgaaggaaatcattagctctgcgtcagtggtcggccttaagccgtatgtcgagaacatctgggccttgctgctaaagcactgtgagtgcgcggaggagggcaccagaaacgtcgtcgccgagtgtctagggaagctcactcttattgatcctgaaactctcctcccgaggcttaaagggtatttgatatcagggtcatcctatgccagaagctcagtggttacagctgtgaagttcactatttctgaccaccctcagcccattgatccactgctcaagaactgcataggtgattttctaaaaacgttggaagacccagatttgaatgtaagaagagtggccttggtcacattcaattctgcagcccataacaagccgtcactgatacgggaccttctggattctgttcttccacatctttacaatgagacaaaagttaggaaggaacttataagagaggtagagatgggcccgtttaagcacacggttgatgacggcctggacattagaaaggcagcttttgagtgtatgtacacacttctagacagctgtcttgacagactggatatctttgaatttctaaatcatgtggaagatggtttgaaggaccattatgatattaagatgctaacatttttaatgttggtgagactatctaccctttgtccaagtgcagtactacagaggttggaccggcttgttgagccactacgagctacgtgtacaactaaggtgaaggcgaactctgtaaagcaggagtttgaaaagcaggacgagttaaagcgctcggccatgagggcagtagctgcactgctcaccattccagaggcagagaagagccctctcatgagtgagttccagtcacagatcagctccaacccggagctggcagccatctttgaaagtatccagaaagattcttcgtccactaacttggaatcaatggacactagttagacgtgtgttccacatgaggaccattacatttgaccgcacagtgcactgaaccgacaagttgaccatagacacgggagagaagtgtctagagcttcaggatgttccacttttattttcattcatgggaagtttgttcagctttcttccattgttgtttttgtagcttttacttcagaaatctgtatttccataatccagaggttgtaagaccactgatggttttagtggttagggcaacgtttgaaatgggaactaaagtttggatttatggaatgtggaaatagggtccagtatctgtttgccctgtaatgtgtaggattaaaatgttaaaacttt

SEQ ID NO: 1987 - protein, 1230 aa, Rattus norvegicus
  ref <308>: DATABASE ACCESSION NUMBER: Refseq / NP_446456
  ref <309>: DATABASE ENTRY DATE: 2003-01-13
MASASYHISNLLEKMTSSDKDFRFMATNDLMTELQKDSIKLDDDSERKVVKMILKLLEDKNGEVQNLAVKCLGPLVSKVKEYQVETIVDTLCTNMLSDKEQLRDISSIGLKTVIGELPPASSGSALAANVCKKITGRLTSAIAKQEDVSVQLEALDIMADMLSRQGGLLVNFHPSILTCLLPQLTSPRLAVRKRTIIALGHLVMSCGNIVFVDLIEHLLSELSKNDSMSTTRTYIQCIAAISRQAGHRIGEYLEKIIPLVVKFCNVDDDELREYCIQAFESFVRRCPKEVYPHVSTIINICLKYLTYDPNYNYDDEDEDENAMDADGGDDDDQGSDDEYSDDDDMSWKVRRAAAKCLDAVVSTRHEMLPEFYKTVSPALISRFKEREENVKADVFHAYLSLLKQTRPVQSWLCDPDAMEQGETPLTMLQSQVPNIVKALHKQMKEKSVKTRQCCFNMLTELVNVLPGALTQHIPVLVPGIIFSLNDKSSSSNLKIDALSCLYVILCNHSPQVFHPHVQALVPPVVACVGDPFYKITSEALLVTQQLVKVIRPLDQPSSFDATPYIKDLFTCTIKRLKAADIDQEVKERAISCMGQIICNLGDNLGPDLSNTLQIFLERLKNEITRLTTVKALTLIAGSPLKIDLRPVLGEGVPILASFLRKNQRALKLGTLSALDILIKNYSDSLTAAMIDAVLDELPPLISESDMHVSQMAISFLTTLAKVYPSSLSKISGSILNELIGLVRSPLLQGGALSAMLDFFQALVVTGTNNLGYMDLLRMLTGPVYSQSTALTHKQSYYSIAKCVAALTRACPKEGPAVVGQFIQDVKNSRSTDSIRLLALLSLGEVGHHIDLSGQLELKSVILEAFSSPSEEVKSAASYALGSISVGNLPEYLPFVLQEITSQPKRQYLLLHSLKEIISSASVVGLKPYVENIWALLLKHCECAEEGTRNVVAECLGKLTLIDPETLLPRLKGYLISGSSYARSSVVTAVKFTISDHPQPIDPLLKNCIGDFLKTLEDPDLNVRRVALVTFNSAAHNKPSLIRDLLDSVLPHLYNETKVRKELIREVEMGPFKHTVDDGLDIRKAAFECMYTLLDSCLDRLDIFEFLNHVEDGLKDHYDIKMLTFLMLVRLSTLCPSAVLQRLDRLVEPLRATCTTKVKANSVKQEFEKQDELKRSAMRAVAALLTIPEAEKSPLMSEFQSQISSNPELAAIFESIQKDSSSTNLESMDTS

SEQ ID NO: 1988 - DNA, 678 bp, Rattus norvegicus
  ref <308>: DATABASE ACCESSION NUMBER: EMBL / M83676
  ref <309>: DATABASE ENTRY DATE: 2000-03-04
atcggctcccgcggcgtgggcaagaccagcctgatggagcgcttcaccgacgacacgttctgcgaggcctgcaagtccaccgtgggtgttgactttaaaatcaagactgtagaactaagagggaagaaaattagattacagatctgggacacagcagggcaggagcgattcaacagcattacctcagcctattacagaagtgccaaggggatcatactcgtgtatgacatcaccaagaaagagacgttcgatgacttgccaaagtggatgaagatgatcgataagtatgcttcagaagacgctgagcttctcctggctggaaataagctggactgtgaaacagacagagaaatctccaggcagcaaggagaaaagtttgcacagcagataaccgggatgcggttgtccgaaccgagtgccaaggacaatttcaacgtggatgagatctttctgaaactcgttgatgatattttgaaaaagatgcctctcgatgttttgagaagcgagttatccaatagcatcctctctctacaaccagagcctgagatcccaccagagctgcctccacccagaccacacgtccgatgctgttgatttgatactttggagatggtgcaagccattgctagaaggggaaagcattcttgctctgcactacaatcacgtgacaacttcctt

SEQ ID NO: 1989 - DNA, 1408 bp, Rattus norvegicus
  ref <308>: DATABASE ACCESSION NUMBER: Refseq / NM_053670
  ref <309>: DATABASE ENTRY DATE: 2003-01-13
gaggcagaggcaacatggaagtgaaggatgcgaacgctgccctgctcagtaactacgaggtgttccagttactgacagacctcaaagagcagcggaaggagagcgggaagaacaagcatagcgccgggcagcagaacttgaacgccatcacctacgagacattaaaatacatatcgaaaactccatgtaagaaccagagtccggcgattgtccaagaattcctcacagcaatgaagagccacaagctgaccaaagccgagaagcttcagctgctgaatcacaggccaatgaccgctgttgagatccagctgatggtggaagagagtgaagagcggctcacggaggagcagattgaagctctcctgcacactgtcaccagcatcctgcctgcaggtccagaggatgagcagagcaaaagcactagcaatgacgcggcaatggaagaggaggagcctgcatagacatctgtggccattatgacacagctggccaggttgttcgtgatgctcaaagccacaacagccatttcctggacgttcagagaactgtttattcggcctgacccctctctcaaatattcctgatctcaggattggttgagaaaaaaaatcacaaaaataagatgaaaagaaatctttgtgccttgggttcaagaaacatggggtcagagaagggcagagggctcgagatggggcagcatggctatgcagccctctgggtagaaaggcttgtgtggcctctgtcgcacttgtacacagtggggagctattcaggcactttgatgactgtgttgtaggcaatgtcaggcaccgccatagaatggagctggggaacgacctcagacggtctcgagctcccagagctgcacacagctgctccaggggaaatgacccagggcttagctcacggtagaggaatgtcctcggcagagcaggaggcaaggaaaggagataagaggaaactgcagtctgagcccagcctggtgtacataataaggaacacacatgtgaatatacctaacacacatgcgtgccacacacacacatacaaagaaattagtcccttttctgtggcaaacccacaactctctggcctgggtgagagacaaggaaaaggcttattttgactcctggttctggtccaaggtcaaagggcatctgggtatggccctcttgttgccagagtgctcaggtagcattggctaacacattacaaaacatgagaagcgtttgtttgtcttcagagtctcttgtagcccacattgaccaaagttcattctgtctgaaatcgtcagacactttctgattctttggcctcagtctccttaaagctgggattcaaatatataccactcacttaggaggcagaggccagcctggtcacacagcaagttccatgccagccagcg

SEQ ID NO: 1990 - protein, 148 aa, Rattus norvegicus
  ref <308>: DATABASE ACCESSION NUMBER: Refseq / NP_446122
  ref <309>: DATABASE ENTRY DATE: 2003-01-13
MEVKDANAALLSNYEVFQLLTDLKEQRKESGKNKHSAGQQNLNAITYETLKYISKTPCKNQSPAIVQEFLTAMKSHKLTKAEKLQLLNHRPMTAVEIQLMVEESEERLTEEQIEALLHTVTSILPAGPEDEQSKSTSNDAAMEEEEPA

SEQ ID NO: 1991 - DNA, 553 bp, Homo sapiens
  misc_feature (1)..(553): n=a, c, g or t
  ref <308>: DATABASE ACCESSION NUMBER: EMBL / AI557374
  ref <309>: DATABASE ENTRY DATE: 2000-03-04
tgcatggaatttgnacgagaccntnntgaaccacctggccntgtgacgtgctgtggagatccagctgatggtggaagagagtnaagagcggctcacggaggagcagattgaagctcttctccacaccgtcancagcattctgcctgcagagccagaggctgagcagaagaagantacaaacagcaatgtggcaatggacgaagaggacccagcatagaagagcacagctggccccggcgtttcatgaagtcagaaggcctggcagccatttcctggacgttnagaggattgtttatttgatttttatcctcatcccagnaggcctggctttgtggttagttgggtacatcacaaaaattaagttaaaaaagaaatatttgtgcctttngggagaagaaaccatgntgaaaacaagnctnagggttttnnaggcaagagagctaaaagnttggggnccagtnncccgaggaccccatntgtcncttaaaaagatttncttcnaaagnctttttaccccaatttntggggnaggntnnttttccnaaancaggnt

SEQ ID NO: 1992 - DNA, 662 bp, Rattus norvegicus
  ref <308>: DATABASE ACCESSION NUMBER: EMBL / AA892238
  ref <309>: DATABASE ENTRY DATE: 1999-01-28
actttttatagtactacttctgaagcagtagagtcaaaatgtgtgtgctggctaagtttataatttgtttgcagttcaattaatttcagaaagttgcatcaatacttgcattacctggcaagcagtataatttaagtctatagaaaataaactaagattatagaattatcaatttggttaaaattcataagagtaagcaataatgttaaaatctctttcctgattacttaaagtactctttatggtattttgactaaattgtatctgatttgtagtctaaacactcttatgaattatatctgtctccctgatgaaaaactgtatttaaattgtgaatgtgtagcttcgttgaaatatattaaggtgtgtgttgaggcttgaatctgaaatgtacctggaggcttgttttgagctgttggtctttcaacttaaggctctattttgaaggctgtgaaaccttaaggatatcgatgggtgaggattatatactcctgctggtcttatccagtcaggatgtatgaattacctctgtcccatacttccactgctgcctcctcagccattatagattgcatcctctggaaccgtgagccaaaataataaaccttaccttccttgaaaaaaaaaaaaaaaaaaaaaaaaaaaaaaaatgtttggcggcc

SEQ ID NO: 1993 - DNA, 2775 bp, Rattus norvegicus
  ref <308>: DATABASE ACCESSION NUMBER: Refseq / NM_130826
  ref <309>: DATABASE ENTRY DATE: 2003-01-13
ctcttctgctcaagatggttgcgtcccgggcaattggcagtctcagtcgcttctctgccttcaggatcctgcgctccagaggctgcatttgcacagctttacaacttcttcctgctttgctgtctagaacccatattaattatggagtcaaaggggatgtggcagttattcggattaactcgcccaattcaaaggtaaatacattgaataaagaagtacaatcagagttcgtagaagtaatgaacgaaatctgggccaacgaccaaatcaggagcgccgtccttatttcgtcaaagcctggctgctttgttgcaggtgctgacatcaacatgctggcctcttgtacaacgccccaagaagcagcacgaatatcacaagaaggacagaaaatgtttgagaaacttgaaaagtcaccaaagcctgttgttgccgccatcagtggatcctgcttgggaggcggacttgagcttgccatagcatgtcaatacagaatagcaacaaaagacagaaaaacagtattaggtgtccctgaagtgttgctgggaatcttaccaggagccggaggtacccagaggctgcccaaaatggtgggtgtgcctgctgcttttgacatgatgctgactggtaggaacattcgtgcagacagagcaaagaaaatgggactggttgaccagttggtggacccgctaggaccaggaataaaatctccagaggaaaggacaattgaatacctagaagaagttgcagttaattttgccaaaggcctggctgacaggaaggtctctgcaaagcagagcaaaggcctgatggaaaagctgacatcgtatgccatgactatcccactttgtctgactacaacattcaaaacagtggaagaaaaagtgaagaagcagaccaaaggcctttaccctgcacctttgaagataattgacgctgtgaagactggacttgagcaaggaaatgatgctggctatcttgccgaatcagagaaatttggagagcttgcattgaccaaagaatcaaaagccctgatggggctttataatggccaggtcctgtgcaagaaaaataaatttggagcgccacagaagactgttcagcagctagccatccttggcgcagggctgatgggggctggcattgcccaggtctctgtggacaagggactgaaaactcttcttaaagacactacagtgacagggctgggccggggacagcaacaagtgttcaaaggactgaatgacaaggtaaagaagaaggcactcacatccttcgaaagggactccatcttcagcaacctgatcgggcagctcgactacaagggcttcgagaaggctgacatggtgattgaggctgtcttcgaggacctcgctgttaagcacaaagtgttaaaggaagtggaaagcgtgactccagaacactgtatcttcgccagcaacacatctgctctcccaatcaatcaaattgctgctgtgagccaaaggcctgagaaggtgatcggcatgcactacttctctcctgtggacaagatgcagcttctagagatcatcacaactgacaaaacctccaaggacaccacagcgtctgccgtggccgtgggtctcaagcaggggaaggtcatcattgtggtcaaggacggacctggcttctacaccaccaggtgtcttgctcccatgatgtcagaagtcataagaatcctccaggaaggagttgaccctaagaagctggacgccttgaccacaggcttcggcttccctgtgggtgctgccaccctggcagatgaagtagggatagatgtagcacagcacgtagcagaagatctaggcaaagccttcggggagcggtttggaggtggcagcgtagaactgctgaaactgatggtctccaagggcttcttgggtcgcaagtctgggaagggcttctacatctatcagtcgggctcaaagaataagaatttgaattctgaaatagataatatcttggtaaacctgaggctgcctgccaagcccgaggtctcctctgatgaagacatccagtaccgtgtgataacaaggtttgtgaatgaggcagtcctgtgcctacaggaagggatcctagccacgcctgaagagggagacatcggagcagtctttgggcttggctttcccccttgtctcggagggcccttccgctttgtggatctgtatggtgctcagaaggtagtggaccggctccggaagtatgagtctgcctatgggacacagtttaccccgtgtcagctactccgcgaccttgctaacaactctagcaagaagttctaccagtgagcaggccgtcccgccctgcccctccacccacgtactaacccagacccggcagtgctgcttctcagccgcgctgtctaaattatcaggaagcaggagaaagaccgaggctagccttggatttgctcctccatgatagtgccttcagccctgtcccgctcttcctcctggtgaagtctgactgtgaattaaatgtttgtacttcatgttggggggtgagccccactgtgcttcttttgcaagccctgcctgagaccccgatcagcagcctagagtaacccagaacacctgctgcctgtgccttccgggaggccagtggggcctggggtgccgagggcattttcgcaccaagccaaacacaggataacattaaaatccagactgtcggcctctgccagcctggtctgttttcctctgcctgcccttgtgtttgagcacccccatcagtaataaagccctgtgctctgagcat

SEQ ID NO: 1994 - protein, 763 aa, Rattus norvegicus
  ref <308>: DATABASE ACCESSION NUMBER: Refseq / NP_570839
  ref <309>: DATABASE ENTRY DATE: 2003-01-13
MVASRAIGSLSRFSAFRILRSRGCICTALQLLPALLSRTHINYGVKGDVAVIRINSPNSKVNTLNKEVQSEFVEVMNEIWANDQIRSAVLISSKPGCFVAGADINMLASCTTPQEAARISQEGQKMFEKLEKSPKPVVAAISGSCLGGGLELAIACQYRIATKDRKTVLGVPEVLLGILPGAGGTQRLPKMVGVPAAFDMMLTGRNIRADRAKKMGLVDQLVDPLGPGIKSPEERTIEYLEEVAVNFAKGLADRKVSAKQSKGLMEKLTSYAMTIPLCLTTTFKTVEEKVKKQTKGLYPAPLKIIDAVKTGLEQGNDAGYLAESEKFGELALTKESKALMGLYNGQVLCKKNKFGAPQKTVQQLAILGAGLMGAGIAQVSVDKGLKTLLKDTTVTGLGRGQQQVFKGLNDKVKKKALTSFERDSIFSNLIGQLDYKGFEKADMVIEAVFEDLAVKHKVLKEVESVTPEHCIFASNTSALPINQIAAVSQRPEKVIGMHYFSPVDKMQLLEIITTDKTSKDTTASAVAVGLKQGKVIIVVKDGPGFYTTRCLAPMMSEVIRILQEGVDPKKLDALTTGFGFPVGAATLADEVGIDVAQHVAEDLGKAFGERFGGGSVELLKLMVSKGFLGRKSGKGFYIYQSGSKNKNLNSEIDNILVNLRLPAKPEVSSDEDIQYRVITRFVNEAVLCLQEGILATPEEGDIGAVFGLGFPPCLGGPFRFVDLYGAQKVVDRLRKYESAYGTQFTPCQLLRDLANNSSKKFYQ

SEQ ID NO: 1995 - DNA, 561 bp, Rattus norvegicus
  ref <308>: DATABASE ACCESSION NUMBER: EMBL / AA893626
  ref <309>: DATABASE ENTRY DATE: 2000-03-03
tatttttgatattgcaactggaaagcttctgcacacgctggaaggccatgcgatgcccattcgatccttgaccttttcccctgactcccagctcctcgtcacggcttcagatgatggctacatcaagatctatgatgtgcaacatgccaatttggctggcacactgagtggccatgcatcctgggtattgaatgttgcgttctgtccagatgacactcactttgtttccagttcatccgacaaaagtgtaaaggtctgggatgttggaacaaggacctgtattcacaccttctttgaccaccaggatcaggtttggggagtaaaatataatggaaatggatcaaaaattgtgtctgttggagatgaccaggagatccatgtctatgactgcccaatttaaacaccagcatcttcagggccagtgcctcagactacgcagggttgataggacattcctcagcttttttggcacacttaaagtacagcatatattgtagaaattttgtagatacaatataaattgttcctgttttattggaaatgtaactcatattttaatgt

SEQ ID NO: 1996 - DNA, 1205 bp, Homo sapiens
  ref <308>: DATABASE ACCESSION NUMBER: Refseq / NM_025234
  ref <309>: DATABASE ENTRY DATE: 2001-12-10
gagcccgtcttccgacgtgcagcctggcagtgcagtgagctgtctggccttttgtccttgatccttggttaaggaaatgaccaaccagtacggtattctcttcaaacaagagcaagcccatgatgatgccatttggtcagttgcttgggggacgaacaagaaggaaaactctgagacagtggtcacaggctccctagatgacctggtgaaggtctggaaatggcgtgatgagaggctggacctacagtggagtctggagggacatcagctgggagtggtgtctgtggacatcagccacaccctgcccattgctgcatccagctctcttgatgctcatattcgtctttgggacttggaaaatggcaaacagataaagtccatagatgcaggacctgtggatgcctggactttggccttttctcctgattcccagtatctggccacaggaactcatgtcgggaaagtgaacatttttggtgtggaaagtgggaaaaaggaatattctttggacacgagaggaaaattcattcttagtattgcatatagtcctgatgggaaatacctagccagtggagccatagatggaatcatcaatatttttgatattgcaactggaaaacttctgcataccctggaaggccatgccatgcccattcgctccttgaccttttccccggactcccagctccttgtcactgcttcagatgatggctacatcaagatctatgatgtacaacatgccaatttggctggcacgctgagcggccatgcctcctgggtgctgaacgttgcattctgtcctgatgacactcactttgtttccagttcgtctgacaaaagtgtaaaagtttgggatgttggaacgaggacttgtgttcacaccttctttgatcaccaggatcaggtctggggagtaaaatacaatggaaatggttcaaaaattgtgtctgttggagatgaccaggaaattcacatctatgattgtccaatttaaacatcaaagtctccaggcttatgctgcaaagagaatgtacggattgatcatgacattccttaccttcttaggcttgtttaaaagaaatatagcatttattgtagcaaagacttaaattttgtagatacaatatgaatcttttcatgttttattggaaatgctgttcatactttaacataaagctttcttaatgcaaaaaaaaaaaaaaaaa

SEQ ID NO: 1997 - protein, 305 aa, Homo sapiens
  ref <308>: DATABASE ACCESSION NUMBER: Refseq / NP_079510
  ref <309>: DATABASE ENTRY DATE: 2001-12-10
MTNQYGILFKQEQAHDDAIWSVAWGTNKKENSETVVTGSLDDLVKVWKWRDERLDLQWSLEGHQLGVVSVDISHTLPIAASSSLDAHIRLWDLENGKQIKSIDAGPVDAWTLAFSPDSQYLATGTHVGKVNIFGVESGKKEYSLDTRGKFILSIAYSPDGKYLASGAIDGIINIFDIATGKLLHTLEGHAMPIRSLTFSPDSQLLVTASDDGYIKIYDVQHANLAGTLSGHASWVLNVAFCPDDTHFVSSSSDKSVKVWDVGTRTCVHTFFDHQDQVWGVKYNGNGSKIVSVGDDQEIHIYDCPI

SEQ ID NO: 1998 - DNA, 632 bp, Rattus norvegicus
  ref <308>: DATABASE ACCESSION NUMBER: EMBL / AI168942
  ref <309>: DATABASE ENTRY DATE: 2000-03-03
tcaggttcatgtcatccgggaggtggcttccatggcccaagaaaagcttggagtgtcttgtgaagtcatcgatctgcggaccattgtgccttgggatgtggatacagtttgtaagtctgtgatcaaaacggggcgactgttgatcagccacgaggcgcccttgacaggcggctttgcctctgagatcagctccacggtccaggaagaatgtttcttgaacctagaggctccaatatctagagtgtgtggatatgacaccccgtttcctcacatttttgagcccttttatatcccagacaaatggaagtgctatgatgcccttcgcaagatgatcaactactgacgactgagaaaaccaggaagatcatgaccagatatggaaatatttttctgaactctttttatatttccttgtacttctttcttctcacacgtggttttgtgagatgaactatggcggatactggctgacgagctgcgaattacttatcatggctgtgtaaagtggattcctggatctagtgcatgagggtaacactttagagggcacatgggcggtgatcttacgattgtttcatgactacaaatatccggtggtgttgtgttcaataaagcaaaatggcatcgccctc

SEQ ID NO: 1999 - DNA, 1551 bp, Homo sapiens
  ref <308>: DATABASE ACCESSION NUMBER: Refseq / NM_000056
  ref <309>: DATABASE ENTRY DATE: 2003-01-22
aggcggcgtgcggctgcatagcctgagaatcccggtggtgagcggggatggcggttgtagcggcggctgccggctggctactcaggctcagggcggcaggggctgaggggcactggcgtcggcttcctggcgcggggctggcgcggggctttttgcaccccgccgcgactgtcgaggatgcggcccagaggcggcaggtggctcattttactttccagccagatccggagccccgggagtacgggcaaactcagaaaatgaatcttttccagtctgtaacaagtgccttggataactcattggccaaagatcctactgcagtaatatttggtgaagatgttgcctttggtggagtctttagatgcactgttggcttgcgagacaaatatggaaaagatagagtttttaataccccattgtgtgaacaaggaattgttggatttggaatcggaattgcggtcactggagctactgccattgcggaaattcagtttgcagattatattttccctgcatttgatcagattgttaatgaagctgccaagtatcgctatcgctctggggatctttttaactgtggaagcctcactatccggtccccttggggctgtgttggtcatggggctctctatcattctcagagtcctgaagcattttttgcccattgcccaggaatcaaggtggttatacccagaagccctttccaggccaaaggacttcttttgtcatgcatagaggataaaaatccttgtatattttttgaacctaaaatactttacagggcagcagcggaagaagtccctatagaaccatacaacatcccactgtcccaggccgaagtcatacaggaagggagtgatgttactctagttgcctggggcactcaggttcatgtgatccgagaggtagcttccatggcaaaagaaaagcttggagtgtcttgtgaagtcattgatctgaggactataataccttgggatgtggacacaatttgtaagtctgtgatcaaaacagggcgactgctaatcagtcacgaggctcccttgacaggcggctttgcatcggaaatcagctctacagttcaggaggaatgtttcttgaacctagaggctcctatatcaagagtatgtggttatgacacaccatttcctcacatttttgaaccattctacatcccagacaaatggaagtgttatgatgcccttcgaaaaatgatcaactattgaccatatagaaaagcggaagattatgactagatatggaaatattttttctgaatttttttttatatttcctccgacttacctctttttgaaaagagagtttttattaaatgaaccatcatgatattggctgaaaagttctacattctattattgtattgtaacacacatgtattgatgattttcattaagagtttcagtttaactttgaaaaatattccacatggtaatcttataaattctgtttaattacatctgtaaatattatgtgtgtgatagtattcaataaagtaaaatcaaattgtcaaaaaaaaaaaaaaaaaaaaaa

SEQ ID NO: 2000 - protein, 392 aa, Homo sapiens
  ref <308>: DATABASE ACCESSION NUMBER: Refseq / NP_000047
  ref <309>: DATABASE ENTRY DATE: 2003-01-22
MAVVAAAAGWLLRLRAAGAEGHWRRLPGAGLARGFLHPAATVEDAAQRRQVAHFTFQPDPEPREYGQTQKMNLFQSVTSALDNSLAKDPTAVIFGEDVAFGGVFRCTVGLRDKYGKDRVFNTPLCEQGIVGFGIGIAVTGATAIAEIQFADYIFPAFDQIVNEAAKYRYRSGDLFNCGSLTIRSPWGCVGHGALYHSQSPEAFFAHCPGIKVVIPRSPFQAKGLLLSCIEDKNPCIFFEPKILYRAAAEEVPIEPYNIPLSQAEVIQEGSDVTLVAWGTQVHVIREVASMAKEKLGVSCEVIDLRTIIPWDVDTICKSVIKTGRLLISHEAPLTGGFASEISSTVQEECFLNLEAPISRVCGYDTPFPHIFEPFYIPDKWKCYDALRKMINY

SEQ ID NO: 2001 - DNA, 973 bp, Rattus norvegicus
  ref <308>: DATABASE ACCESSION NUMBER: Refseq / NM_031125
  ref <309>: DATABASE ENTRY DATE: 2003-01-13
tttgggctcaggtccaggcactccggccaccatgcgcgacaggacccatgagttgaggcagggggataacatctcagacgatgaagatgaggttcgagtcgcgttggtggtgcactcaggtgccgcccggctgagcagcccggacgacgagttcttccagaaggtgcagacaattcggcagactatggccaaactggagagtaaagtccgggagttggagaaacagcaggtcaccattctggccacgcctcttcccgaggagagcatgaagcagggcctgcagaacctgcgagaggagatcaaacagctggggagagaagtccgggcacagctaaaagccatagagccccagaaggaagaagctgatgagaattataattcagtcaacacaagaatgaagaaaacccagcatggggtcctgtcccagcagtttgtggagctcatcaacaagtgtaactcaatgcagtccgagtaccgagagaagaacgtggagcgcattcggcggcagctgaagatcaccaatgctggaatggtgtctgacgaggaactggagcagatgctggacagtgggcagagtgaggtgtttgtgtctaatatactgaaggacacacaggtgacccggcaggccctgaatgagatctctgcgcgacacagtgagatccagcagttggagcgcacgatccgtgaactccatgagatcttcacttttctagctaccgaggtggagatgcagggagagatgatcaatcgtatcgaaaagaacattctgagctcagcagactatgtggaacgtgggcaagaacatgtcaagatagcgctagagaatcagaagaaggcgaggaagaaaaaggtcatgattgccatctgtgtttctgtcactgttctcatcttggctgtcatcattggcatcaccataaccgttggataatgtcacatgttcttggcactgggagaaacagagacccagcatttg

SEQ ID NO: 2002 - protein, 298 aa, Rattus norvegicus
  ref <308>: DATABASE ACCESSION NUMBER: Refseq / NP_112387
  ref <309>: DATABASE ENTRY DATE: 2003-01-13
MRDRTHELRQGDNISDDEDEVRVALVVHSGAARLSSPDDEFFQKVQTIRQTMAKLESKVRELEKQQVTILATPLPEESMKQGLQNLREEIKQLGREVRAQLKAIEPQKEEADENYNSVNTRMKKTQHGVLSQQFVELINKCNSMQSEYREKNVERIRRQLKITNAGMVSDEELEQMLDSGQSEVFVSNILKDTQVTRQALNEISARHSEIQQLERTIRELHEIFTFLATEVEMQGEMINRIEKNILSSADYVERGQEHVKIALENQKKARKKKVMIAICVSVTVLILAVIIGITITVG

SEQ ID NO: 2003 - DNA, 588 bp, Rattus norvegicus
  ref <308>: DATABASE ACCESSION NUMBER: EMBL / AA875143
  ref <309>: DATABASE ENTRY DATE: 2000-03-03
actgtatattaaactgaaatagtccattaaaggatttttttatttggattaaaaatatgaacaccataaaatctctagaccaggctgtaaattttccagtagaaagcgcttatatccctagaggcgtctggcacagccatggtgaggagagtgggtacacccagtggataggagggtggattccggtggggggagggtatgtatggagaggagggctacctgtggagatccatgtgtgctgggctcctgttcccttaccttgtgcagtgcctgttaggacgtgctgggttcctgaatgtgaaaaactgtggctatccagtttgtatttccttggtacatattttaaaaacaacacagtcattgactttccaattcagtaataaagtttggcaaagcctattttgtaaacaagttaattttataatgtaaaaaagttaatctaaccttgacttgttatttgcactttcatagtctatacttgatacattcccactttatatacagtaggattctacagacctgtagatgtttggccaaatgaatgctgttaataatatgtaaaattctttgattaaacatttattactt

(The sequence listing continues in the following parts.)

1. A composition comprising two or more isolated polynucleotides, wherein each of said two or more isolated polynucleotides is selected from the polynucleotides of Table 11 or a sequence which hybridizes under high stringency conditions thereto.

2. The composition of claim 1, wherein said each of said two or more isolated polynucleotides is differentially expressed in an animal subjected to pain relative to an animal not subjected to said pain by at least 1.2 fold across at least three replicate screens of neuronal tissue of an animal subjected to pain with a P-value of less than 0.05.

3. The composition of claim 1, wherein said each of said two or more isolated polynucleotides is differentially expressed by at least 1.4 fold in the neuronal tissue of an animal subjected to pain relative to said animal not subjected to said pain.

4. The composition of claim 1, wherein said each of said two or more isolated polynucleotides is differentially expressed by at least 2 fold in the neuronal tissue of an animal subjected to pain relative to said animal not subjected to said pain.

5. The composition of claim 1, wherein said neuronal tissue is selected from the group consisting of sensory neurons of the dorsal root ganglion, and dorsal horn neurons.

6. A plurality of vectors each comprising an isolated polynucleotide, wherein each of said isolated polynucleotides is selected from Table 11, or a sequence which hybridizes under high stringency conditions thereto.

7. A plurality of viral vectors each comprising an isolated polynucleotide, wherein each of said isolated polynucleotides is selected from Table 11, or a sequence which hybridizes under high stringency conditions thereto.

8. A host cell comprising the vectors of claim 6 or 7.

9. An array consisting essentially of:
(a) a plurality of polynucleotide members, wherein each of said polynucleotide members is selected from Table 11; and
(b) a solid substrate, wherein each polynucleotide member has a unique position on said array and is stably associated with said solid substrate.

10. An array comprising:
(a) a plurality of polynucleotide members, wherein each of said polynucleotide members is selected from Table 11, and wherein said plurality of polynucleotide members are obtained from neuronal tissue obtained from at least two different species of animal; and
(b) a solid substrate, wherein each polynucleotide member obtained from each of said two different species has a unique position on said array and is stably associated with said solid substrate.

11. The array of claim 9 or 10, wherein said plurality of polynucleotide members is differentially expressed by at least 1.2 fold across at least three replicate screens of neuronal tissue of an animal subjected to pain with a P-value of less than 0.05 relative to an animal not subjected to said pain.

12. The array of claim 9 or 10, wherein said plurality of polynucleotide members is differentially expressed by at least 1.4 fold in the neurons of said animal subjected to pain relative to an animal not subjected to said pain.

13. The array of claim 9 or 10, wherein said array comprises from 10 to 20,000 polynucleotide members.

14. The array of claim 9 or 10, further comprising negative and positive control sequences and quality control sequences selected from the group consisting of cDNA sequences encoded by housekeeping genes, plant gene sequences, bacterial sequences, PCR products and vector sequences.

15. A method of identifying an agent that increases or decreases the expression of a polynucleotide sequence that is differentially expressed in neuronal tissue of a first animal which is subjected to pain comprising:
(a) administering said agent to said first animal;
(b) hybridizing nucleic acid isolated from one or more sensory neurons of said first and a second animal to the array of claim 9 or 10; and
(c) measuring the hybridization of said nucleic acid isolated from said neuronal tissue of said first and second animal to said array; wherein an increase in hybridization of said nucleic acid from said first animal to one or more nucleic acid members of said array relative to hybridization of said nucleic acid from a second animal which is subjected to pain but to which is not administered said agent to one or more nucleic acid members of said array identifies said agent as increasing the expression of said polynucleotide sequence, and wherein a decrease in hybridization of said nucleic acid from said first animal to one or more nucleic acid members of said array relative to the hybridization of said nucleic acid from second animal to one or more nucleic acid members of said array identifies said agent as decreasing the expression of said polynucleotide sequence.

16. The method of claim 15, further comprising the step of verifying the increase or decrease in said hybridization by a molecular procedure selected from the group consisting of Northern analysis, in situ hybridization, and PCR.

17. The method of claim 15, further comprising the step of labeling the nucleic acid sample isolated from said first and second animal with a detectable label prior to said hybridization to said array.

18. The method of claim 17, wherein the nucleic acid sample isolated from said first animal is labeled with a different detectable label than the nucleic acid sample isolated from said second animal.

19. A method for identifying a compound which regulates the expression of a polynucleotide sequence which is differentially expressed in an animal subjected to pain, comprising:
(a) providing a cell comprising and capable of expressing one or more of the differentially expressed polynucleotide sequences shown in Table 11;
(b) contacting said cell with a candidate compound; and
(c) measuring the expression of said one or more of the polynucleotide sequences shown in Table 11, wherein an increase or decrease in the expression of said one or more of the polynucleotide sequences shown in Table 11 of at least 10% is indicative of regulation of said differentially expressed polynucleotide sequence.

20. A method for identifying a compound which increases or decreases pain in an animal, comprising:
(a) providing a cell comprising one or more of the polypeptides shown in Table 11;
(b) contacting said cell with a candidate compound; and
(c) measuring the activity of said one or more polypeptides, wherein an increase or decrease of the activity of said one or more polypeptides of at least 10% relative to the activity of said one or more polypeptides in said cell, wherein the cell is not contacted with the candidate compound, identifies said candidate compound as a compound which increases or decreases pain in an animal.

21. The method of claim 20, wherein said candidate compound is selected from the group consisting of small molecule, protein, RNAi, and antisense.

22. The method of claim 20, wherein said candidate compound is an antibody which binds to said polypeptide.

23. A method for producing a pharmaceutical formulation comprising:
(a) providing a cell comprising said one or more of the polypeptides shown in Table 11;
(b) selecting a compound which regulates the activity of said one or more polypeptides; and
(c) mixing said compound with a carrier.

24. The method of claim 23, wherein said step of selecting comprises the steps of
(a) contacting said cell with a candidate compound; and
(b) measuring the activity of said one or more polypeptides, wherein an increase or decrease of the activity of said one or more polypeptides of at least 10% relative to the activity of said one or more polypeptides in said cell, wherein the cell is not contacted with the candidate compound, identifies said candidate compound as a compound which regulates the activity of said one or more polypeptides

25. A method for identifying a compound which increases or decreases pain in an animal, comprising:
(a) administering a candidate compound to an animal comprising one or more of the polypeptides shown in Table 11; and
(b) measuring the activity of said one or more polypeptides wherein an increase or decrease of the activity of said polypeptide of at least 10% relative to the activity of said one or more polypeptides in an animal to which the candidate compound is not administered, identifies said candidate compound as a compound which increases or decreases pain in an animal.

26. The method of claim 25, wherein said candidate compound is selected from the group consisting of small molecule, protein, RNAi, and antisense.

27. The method of claim 25, wherein said candidate compound is an antibody which binds to said polypeptide.

28. A method for identifying a small molecule which increases or decreases pain in an animal, comprising:
(a) providing a cell comprising one or more of the polypeptides indicated in Table 11;
(b) generating a small molecule library;
(c) providing a candidate small molecule, selected from said library;
(d) contacting said cell with said candidate small molecule; and
(e) measuring the activity of said one or more polypeptides, wherein an increase or decrease of the activity of said one or more polypeptides of at least 10% relative to the activity of said one or more polypeptides in said cell, wherein the cell is not contacted with the candidate small molecule, identifies said candidate small molecule as a small molecule which increases or decreases pain in an animal.

29. The method of claim 28, wherein said small molecule library comprises components selected from the group consisting of heterocyclics, aromatics, alicyclics, aliphatics, steroids, antibiotics, enzyme inhibitors, ligands, hormones, alkaloids, opioids, terpenes, porphyrins, toxins, and catalysts, and combinations thereof.

30. A method for identifying a compound useful in the treatment of pain, comprising:
(a) providing a host cell comprising a vector comprising one or more of the polynucleotides identified in Table 11;
(b) maintaining said host cell under conditions which permit the expression of said one or more polynucleotides;
(c) selecting a compound which regulates the activity of a polypeptide encoded by said one or more polynucleotides;
(d) administering said compound to an animal subjected to pain; and
(e) measuring the level of pain in said animal, wherein a decrease in the level of pain in said animal of at least 10%, identifies said compound as being useful for treating pain.

31. The method of claim 30, wherein said step of selecting includes the steps of
(a) contacting said cell with a candidate compound; and
(b) measuring the activity of the polypeptide encoded by said one or more polynucleotides, wherein an increase or decrease of the activity of said polypeptide of at least 10% relative to the activity of said polypeptide in said cell, wherein the cell is not contacted with the candidate compound, identifies said candidate compound as a compound which regulates the activity of said polypeptide.

32. A method for producing a pharmaceutical formulation comprising:
(a) providing a cell comprising one of more polypeptides as shown in Table 11;
(b) maintaining said cell under conditions which permit the expression of said one or more polynucleotides;
(c) selecting a compound which regulates the activity of a polypeptide encoded by said one or more polynucleotides, wherein an increase or decrease of the activity of said polypeptide of at least 10% relative to the activity of said one or more polypeptides in an animal to which the candidate compound is not administered, identifies said candidate compound as a compound which regulates the activity of said one or more polypeptides;
(d) administering said compound to an animal subjected to pain;
(e) measuring the level of pain in said animal, wherein a decrease in the level of pain in said animal of at least 10%, identifies said compound as decreasing pain; and
(f) mixing said compound with a carrier.

33. A method of treating pain in an animal comprising administering to said animal an antisense polynucleotide capable of inhibiting the expression of one or more of the polynucleotide sequences indicated in Table 11.

34. A method of treating pain in an animal comprising administering to said animal a double stranded RNA molecule wherein one of the strands of said double stranded RNA molecule is identical to a portion of an mRNA transcript obtained from one or more of the polynucleotide sequences indicated in Table 11.

35. A method of treating pain in an animal in need thereof, comprising:
administering a therapeutically effective amount of an antibody which binds to one or more of the polypeptides indicated in Table 11.

36. A method of treating pain in an animal in need thereof, comprising:
administering a therapeutically effective amount of one or more of the polypeptides indicated in Table 11.

37. A method of detecting pain in an animal suspected of having pain comprising:
measuring the amount of one or more of the polynucleotide sequences of Table 11 in said animal, wherein if said amount of said one or more polynucleotides is increased or decreased by at least 1.2 fold across at least three replicate screens and is statistically significant at P<0.05 in said animal compared to the amount of said one or more polynucletoide sequences of Table 11 in an animal not suspected of having pain, then pain is detected in said animal suspected of having pain.

38. The method of claim 37 wherein the amount of said polynucleotide sequence is increased or decreased by at least 1.4 fold.

39. The method of claim 37, wherein said amount of said one or more polynucleotide sequences is measured in one or more sensory neurons.

40. The method of claim 39, wherein said sensory neurons are selected from the group consisting of dorsal horn neurons and dorsal root ganglion neurons.

41. The method of claim 37, wherein said amount of said one or more polynucleotide sequences is measured in a patient sample.

42. A method of detecting pain in an animal suspected of having pain comprising:
measuring the amount of one or more of the polypeptide sequences of Table 11 in said animal, wherein if said amount of said one or more polypeptides is increased or decreased by at least 1.2 fold across at least three replicate screens and is statistically significant at P<0.05 in said animal compared to the amount of said one or more polypeptide sequences of Table 11 in an animal not suspected of having pain, then pain is detected in said animal suspected of having pain.

43. The method of claim 42, wherein said amount of said one or more polypeptide sequences is measured in one or more sensory neurons.

44. The method of claim 43, wherein said sensory neurons are selected from the group consisting of dorsal horn neurons and dorsal root ganglion neurons.

45. The method of claim 42, wherein said amount of said one or more polypeptide sequences is measured in a patient sample.

46. The method of claim 42, wherein the amount of said polypeptide sequence is increased or decreased by 1.4 fold.
